United States Patent Application Publication US 2005/0196754 A1 - sequence listing, part 11

SEQ ID NO: 21547 - DNA, 3196 bp, Homo sapiens
  SIMILAR (2113)..(1565): 981254mologous to Escherichia coli elongation factor Tu,accession number J01717,Smith-Waterman Score=924.
ccaaataaatttactgacatcaaacccttcccgggtctgcgactgccagcatctcctgtttcacttcgtcagaaatggttggcgtgcgggagagtatccacaggtagtcgcggtccgggccggaaaccagcgcatggcggtattcccgatcgagtgcaataacgttataaccgccatagaaaggaccaaagaatgacactttcagcgcagcgcgagttggtgcgccggtaaagtacgctttcccttcactctgctgccacattcctctgtcagggttatagcctttattaatgacattcaggccgccgtcatcacgcaggctgtatgttgcggtgactttttccagtccacgttcaaagcggtgatcaaaacgggcaatctcataccaggtaccgagataacgtttggcgtcgaaattatttactacggtcacgccacgcggcggcgtaggagaactgcaggcaacgaccagaaatgcagctgtcgctggaataaagcggaaaagatcaaaccgagggcgaccagcagaagaaccagagctgaccgcagacagaggacaaggagaaaacgagataacggaagctgccacggcagcgaaggcccggcgcacgatgcggccgaaaaccggcaaccaaaatccagacaaacaccgcacgcgtggcttgcagatttgccacaccttcaatgcgaatggcaaccgcgcccgctgttctgccgctaatgccatggcggcgacgatttcgggtttatcgagcgggctgtccggaaccggctggcaggagacaatcaggccaccgttagcagcgattttttgatccagttgtgcaagtaacgacatacatcttcctaaatcgtttttggcgctgccaaacggcacggcaccgctgaatggtttaccgtcgatagcgtcatgagtacgcaacgcttccgggcgcgaccaacgctgaacgcgagaaggcatatccagcccaatcagcaggatcaccacgaacgtcagactgaacgagagcgatgccagcgcagtacccagatccagacgttgagcgatcaacgcgccgatgattggggccagtgcaccgcccaatgcgccaacgttgtaggtgaagcccaggcccgctgcacgctggtcggtatcgaaataaccgccaatcagttttgcatttgctggaagaacagtaacagaccgagcacccagacgtttgcgccgccaatcgcaaataccggaataatcagcagctgcgaggccagcaggctacaaacgtacgctttgcgggttcccagccagtcaccgaggaagccacctacgcagcatcccaccgccgcgccaaagccactaaagaacagcacattggctacacccaagaacagcgacgatcgcggcattttgcaggttaccggcgaagcagaaccacagcgcagtagccgccgccagtgtcattacgatatgagcgtcagcatcatggccccatatgtcaacagagtatgcgcgactgccgcgaccgcctctcgcagcgctcctcttaggagatacaccacaggactccaaggcgcttctcagacagtgagtaaaaactttagcaacaacgcccgcgccaacggtacggccgccttcacggattgcgaaacgcagaccgtcgtccatcgcgatcgggtggatcagggtaacaaccattttgatgttgtcgcccggcattaccatctctacgccttccggcagttcgatggtaccagtcacgtcagtagtacggaagtagaactgcggacggtagcctttgaagaacggagtatgacggccgccttcatctttggacagaatgtacacttcagattcgaacttggtgtgcggcttgatggtgcccggcttagccagtacctgaccacgttcgatttcttcacgtttgataccacgcagcagaacacctacgttctcaccagcacggccttcgtccagcagtttgcggaacatttcaacgccagtacaggtagacttctgagtctctttgataccaacgatttcaacttcttcaccaactttgatgataccgcgttctacacgaccggtaacaacggtaccacgaccggagatggagaatacgtcttcgatcggcagcagaacggctgtcaatcgcacgctctgttccgatatagatccggtgccccccaatcggtaccagatcaccctgacgcccgctggctgttgcccgatcccatcgaaaccctgaaagccgccgaaacgctggtacaacagggatttgtcgtgctgccttactgcggggccgatccggtattgtgtaaacgtctggaagaagtcggctgtgcagcggtgatgccgctcggcgcgccgattggctcgaatcagggactggaaacccgcgccatgctggagattattatccagcaggccacagtgccggtggttgtcgatgctggcatcggcgttcccagccatgccgcgcaggcgctggaaatgggggccgacgcggtgttagtgaatacggcgattgccgtcgcggacgatcccgtcaacatggcgaaggcatttcgtctggcggtagaagcaggcctactggcactccggaccgggcagccgcagttattttgctcatgccaccagcccgctgaccggatttctggaggcatcggcatgaaaaccttcagcgatcgctggcgacaactggactgggacgacatccgcctgcgtatcaacggcaaaacggctgctgacgtagagcgggcgctaaatgcctcgcaactcacccgcgacgacatgatggcgctgttatcgcctgccgccagtggctatctggaacaactggcccaaacgggcgcagcgtcggacccgtcagcgattgggcaaacacagttagtttctacgtcccgctttatctttccaatctttgcgctaacgactgcacaacatcaactgtctctggaaggtcactgtgcccgtcaaatcagccgccgtctgtgtcgcaactacgacctgattttgaccatggaaaagcgccatatcgaacgcttatgcgagatggcaccggagatgcgcggcaaagtgatcctgtttggtcactgggataacgaatgtgaaatccccgatccgtatcgcaaaagccgggaaacgtttacagcggtgtacacattacttgaacggtctgcccgccagtgggcgcaggcattgaacgcagagcaggtataa

SEQ ID NO: 21548 - DNA, 3158 bp, Homo sapiens
  SIMILAR (135)..(188): 881254mologous to Escherichia coli O157:H7 hydrogenase 4 subunit,accession number AE005478,Smith-Waterman Score=91.
tcaaagagcaacgtctgcaaacgctgaaactgtgcgcgagatgcgcgccgacgtgtcggagctggtagagatgctgcttgcacgccgaatatggaacaacgcactcagggcattggcattctcgaccgacaatcgcccgtgatttgcgctttgatcacccctacgccgactacggcaatttccaaaaacactgtttacctttaccggcggcgatgttttctcccgcgtatggtccgtgtcaaagagacgtttgattcgctggcaatggcattcgcgctgggctttgttgaagcgccacgcggtgaagagtgcactggagcatgctcggtgataaccaaaaattgtccgcgtgagcctcgtgccgcaactaagcaaatggcggtgttggttaatggtgggcggatacggtctgagccccgtgatattgtagctgatccggtacctgtccgcggtgacgctattggacgccgaaaagggggtatagagtaggatgaatattagcagccgggtgacgcgctgggcgtcggtatcagaacgatccggcactggtgaaagaacttgtcgaactgctgtgctgaaaggcgatgaacctgtcaccgtcgagggcaaaacgttgcctctgacgaagcggccgagacgaaggcgattgttgctggtgcgtttctcccgggacagttgatcgaaagtaataattgtggccctaagcggttgatcctgctctccagggaagtgaacagtcctcccgtggttgtcacatgagcgcgtcgtggcaatctccgcgggaaaagggggtttataaacgcgacacacgatataggtggccttacccagttgctccgcctgtcggaggaccaaacaacgcggccatcgacacagacgactagacacggaagaagcacggcggcaagagaacagaacgacaagagagagaaaaagcggagcgacaaaactacacagaccggtgcaaatgaccatgggctggttccggacccgtttgaacgcaacctgggcgtttccgtaaaacgccgaacgaaggcacgctgttctatggtctggtgaggatggcaacgatatgtgggacgccactttcttctgcggttcctgtgcgtgattcgtcgtaagccgctggatgaaattggcggcattgctgtcgaaacgtgactgaagatgcgcatacttctctgcggttgcaccgtcgtggctatcctccgcgtatatgcgtattccgcaggcggcggggctggcgaccgaaagctgtcggcgcatatcggtcagcgtattcggttgccggtctccggtaccaaagacaccaggtacgccgactcgcacctgaatggagaatgacgctgcccgcgcaatttcccgcgaagatgtcacctcttctcgtgtccgttcaggattctcgaggtggatagggctcagctccacgccagcgccatctggcagggcgccgtcccgtgacaacccggccaaaacacgtatcccaccatggccctcaggaaaattcagctcatcgcctgagtcatgtcgataatgaatcgacctgtattgtttgcggcactcttcggttgcaacattcggcgcgttattttccaccgtctttgccggaaacgctgtttttagcaccggttaaccacagcgtggatataactggcaggctgctgtacccaaataaatttactgacatcaaaccttcccgggtcgcgactgccagcatctcctgtttcacttcgtcagaaagtttggcgtgcgggagagtatccacaggtagtcgcggtccgggccgcaaccagcgcatggcggtattcccgatcgagtgcaataacgttataaccgcgttcaaagcggtgatcaaaacgggaatctcataccaggtaccgagataacgtttggcgtcgaaattatttactcggtcacgccacgcggcggcgtaggagaactgcaggcaacgaccagaaagcagctgtcggatacccagctctttttctggaataaacgcgacatagctaccaatcgccgtcgcaccggagtaagttatggcagatttagacgatattaaagatggtaaagatttcgtaccgatcaaccgcaaaaaaatatcccttttaccctgaaaggttgcgtgcgataaacgctgtgttcggcggaaactggtaactcttaatgtaccggagcaattgcgggccgatccgatattgggtaaacgtctggaagaagtcggctgtgcacggtgatgccgctcggcgcaccgattggctcgaatcagggacgcgccatgctggagattattatccagcaggccacagtgccggtggttgtgatgctggcatcggcgttcccagccataccgcgcaggcgactggaaatggggccgacgcggtgttagtgaatacggcgattgccgtcgcggacgatccgtcaacatggcgaaggcatttcgtctggcggtagaagcaggcctactggacgtcagtccggaccgggcagccgcagatattttgctcatgccaccagccgctgaccggatttctggaggcatcggcatgaaaaccttcagcgatcgcggcgacaactggactgggacgacatccgccggccccgtctgttgtttctgactcttcaatgcctgttgtacatcccgataatcgtaaatatgcgtcaccatcgatttcacatcgaatcgccctgaaaaatagcttcaatcgtgaccggataacgatcgcatagcggaataccgtcagataaggtgcctgtttaacggtgaccgcagaacccgcttttcgaaaacaatatctgcgcccatgtcttcggtaaattgctgacagcggcaatagtgtcttcttttgcgccgttaataaccactgtcgcaccaagctttccgccattgccagacgtttttccagcacatcaacgacggcaatttccttgctcccaggcatttgcacgcttgcaacgtcatcaaaccaatacaaccgcaccgccgcgaacatggacaatgcgtagacaaagcctactgatctaatcaaactcaagcggcgtaaaactgaatcggcatcaatacttgcgccgtaagaaccatagccatacaccagcaacggttgtgtcctttgcgaaaatgtttgcgatggtagaccaacgaaaccggacttcgacgccat

SEQ ID NO: 21549 - DNA, 753 bp, Homo sapiens
tcaagcctgggacggcttcaggtacatcagggggcagcagagggaccccagggaggtggcctctgaaagttccaggctcccttcagccagggatgaggccagtggagccttgagctgtcccctttcccagaaaccctggatgatgttgagttttgccagtggctgacgcaggagcacggcgtagcggcgattccgctgtcggtgttttgcgccgatcccttcccacataaactgattagtctctgttttgccaagaaggaatcgacgttgctggcagcagctgaacgcttgcgccagctttagcgtccaggcgcgggaatattgacggtcggcaaacaactcttgcagtccgttaatttgcttcaggcgcagcacttcgtcgctgtccattcccagctctttgccaattttattatcgtcccatcccaactggctaagttcacggacgatttccgacatggcggtgatttgatggcgtccacgagcgcgattatgacgaatagtcgcggcgatgcgttgattacgcgtaccttccagacaggtcaccggcaaataaccaatattagtgacaattgtcaggtcgtcagagtaaggataaagcgcttcgcggataatctgattggtgacgtgcggaccataaaagtcgctggtatcaatatgattgacgcccaatgccagcgcctcacgcagcacggttatagcgacgtggcgatctcgtggggggccaaaaactccaggacctgccagttgcat

SEQ ID NO: 21550 - DNA, 1517 bp, Homo sapiens
  SIMILAR (1107)..(280): 871254mologous to Escherichia coli K12 formate dehydrogenase- O, major subunit,accession number AE000464,Smith-Waterman Score= 1280.
atgccagccagagctctcctgtttgaggtgtctgttggcttctactgggagatgtgtcccagtcaggatacacaggggtcagggacccacttgaggaggttttctgtcccttatcagagctcaaacactgtggtgggaatccactgctcgcttcaagctgcgagcgttgccgcgattcggtgtctcctgcgctaccgggtcacctgcggcgtgacccgcctggtaacatgccttttctcccgaacgttgttgtcacggaccgtcggttggttctcgcgggtcaacttcgtcgctcccctggttctcccgactttagagcttcaggttccggggttcgatgtgaccgggaacttcagtttcgccgaccaccgatcactgtgttcttgttcgggaatgagcaacaaggttaaagccctggcagatatagccattgacttcgccctctttcatcatctcgaagtattgcaggacgtcgtagcctttatcccacttcggcaaccagtcaaagccccagctattttccgccgtcgctttatcaccaaagaaggccttcatcatagagacgaagaatttcgggtagttgccccagtagtttacctggccttccagcagcggttttggcgtgttggcggtaaggtaggtttgcagatcggtctgcttctcgcttggcagcgtcatgtaacctggcaggctctgcgacagcagccccaggtccgtcagcccctgaatattggagtgaccgcgcagggcgttaacgccgccgcctgccatccccatattgccgagcagcagctggatcatcgccatcgtacgaatgttttgcgcaccaacggagtgttgcgtccagccgagggcatacaggaacgaggcagttttatcgtgagcactggtttctgcgatgtattcgcagactttcaggaacgcgtcttttggcgtaccacagatgttttcaaccacatctggcgtgtagcgggaaacgtgctgtttcagcaagttccacacgcagcgcggatgttgcagcgtggtatcgcgtttggcgaagccgttttcgtccagttcataagtccaggaggatttatcgtacttgcgtttttccgcgtcgtagccgtgaacagtgatcctgtgaccggcgtgtcgcaaaccatgccgcaagcgccgtggacaacgccggtggaggtgaaatatctgctggaagagaagctcggcattcgggtgatggtcgataatgactgcgtgatgctggcgctggcggagaaatggcaaaataattcgcaggaacgggatttctgcgtgatcaacgttgattacggcattggctcgtcgttcgtgtatttaacgagcaaatttatcgcggcagtttgtatggtagcggacagattggtcacaccatcgttaatccggatggcgtcgtctgcgactgtggacgttatggctgcctggaaactgtcgcctcgttaagcgcattaaaaaaacaggcgcgggtatggctaaaatcacaaccggttagtactcaactt

SEQ ID NO: 21551 - DNA, 1280 bp, Homo sapiens
  SIMILAR (3)..(923): 991254mologous to Escherichia coli No definition line found,accession number U00039,Smith-Waterman Score=1559.
gcgtagaaaaagcttatgacctgctgactctggcgcagggcgagttccaggccgataccgccgttgctggtttgcaggctgcttatgctcgcgacgaaaatgatgaattcgtgaaagcgaccgttatccgtgctgaaggtcagccagacgcggcaatggaagacggcgatgcactgattttcatgaacttccgtgctgaccgcgcgcgtgaaatcactcgtgctttcgtgaacgctgatttcgatggcttcgcgcgtaagaaagtggttaacgtcgatttcgtgatgctgaccgaatacgccgctgacatcaaaactgcggttgcttacccacccgcttccctggttaacaccttcggcgagtggatggcgaaaaacgacaaaactcagttgcgtatttccgaaaccgaaaaatatgcccacgttactttcttcttcaacggtggcgtagaagagtcgttcaaaggcgaagatcgcattctgatcaactcaccgaaagtggctacctacgatctgcaaccggaaatgagctccgcagagctgaccgaaaaactggttgcggccatcaagagcggcaaatacgacaccatcatctgtaactatccgaacggcgacatggtaggtcacaccggggtgatggaagcggcggttaaagcggttgaagcgctggatcactgcgtggaagaagtcgcgaaagcggttgagtccgtgggtggacaactgctgatcaccgctgaccacggtaacgctgagcagatgcgcgatccggcaacgggtcaggcacacacgggacacaccaacctgccagttccgctgatttacgttggtgataagaacgtgaaagcggttgaaggcggcaaactttctgacatcgcgccgaccatgttgtcgctgatgggtatggaaatcccgcaagagatgactgttcaattgagcatccaaccagccagcaaactcccaattgctggcctcaggatccccaatcgggatgatatcttttgggcgaagaatattcgtaagatcgtcgtcaacgaggaagtaggtgacaccgggcgttataacttcggtcagaaatgcgttttctgggcggcgattattttcctggttctgctgctgtggcagttaattgtggttatcatggtgcatatctacgccgccctttgggtgaaaggcacgattaccgccatggtggaaggatgggttaccagcgcctgggcgaagaaacatcacccgcgctggtaccgtgaggtccgcaagacaacggaaaagaaagctgaatga

SEQ ID NO: 21552 - DNA, 2451 bp, Homo sapiens
  SIMILAR (1558)..(2256): 901254mologous to Escherichia coli protein-N(pi)- phosphohistidine-sugar phosphotransferase,accession number U28377,Smith-Waterman Score=1048.
atggcggcattttttaacttttttggcgtgttattgggcggacttagcgttgcctatgccattgtccatatgttgccaaccgatttgttgctgaatatggggtcaacccacggcctggcgatggtcttttccatgctgctggcggcgattatctggaacctgggaacgtggttcttcggtttaccggcctccagttcgcacaccttgattggtgcgattatcggcatcggtttaaccaacgcgctgttaaccggctcatcggtgatggatgcgttaaacctgcgtgaagtgaccaaaattttctcctcgctgattgtttcccctatcgtcggactgtcagttgttgcgctggataacgttaacttcacgctcaataaaggcgaagttcgtgcgctgttaggtaaaaacggcgcgggcaaatcgactctcattcgaatgcttaccggcagcgaacgcccggatagcggtttagtgaagatgagagcctgcattaataatcaacagattcgccaccataacaaatgcgtgattctggaactgctgtaccggctaaagcgcgccaataaatcaacgctggcccggctggcgcaaatttcgattccggcagtcagtaatattttgcaggaactggaaagcgaaaaacgggtggtgaatattgacgatgaaagccagacgcgcgggcatagtagcggtacatggctgattgcgccggaaggtgactggacgctgtgcctgaacgtgacgcccaccagtattgagtgtcaggttgctaatgcttgtttaagtccgaaaggtgaatttgagtatttacagattgatgcaccgacgccgcaggcgctgctgtccgaaatcgaaaaatgctggcatcgccaccgtaaattgtggccggaccataccatcaacctggcgttggcaatccacggtcaggttgatcctgtgaccggcgtgtcgcaaaccatgccgcaagcgccgtggacaacgccggtggaggtgaaatatctgctggaagagaagctcggcattcgggtgatggtcgataatgactgccagttacattattgtaagacagcaattctcaactggagccgaaaaatggcgctttcaagacaaaaatttaccttcgaaagacttcgcagattcaccttaccggaagggaaaaaacaaacttttctttgggatgcagatgtaacaaccctggcatgccgagcaactagcggagcaaaagcctttgtattccaaagcgtatatgcggggaaaacccttcgcatgactattggcaacattaacgactggaagattgatgatgcgagagccgaggcaagacggttacaaacattgatcgatacagggatagatccacgaattgctaaggctgtaaaaatcgcagaagcagaatccctgcaggcagaatcacgtaaaacaaaagtgactttctccgtcgcctgggaagactatcttcaagaattgagaaccggtatcagtgcaaaaactaaacgcccatattctactcgatacattgccgatcacattaacttgtccagtcgtggaggcgaaagtccgggcctgggactgctgctggcgtttaccttgtttggtaaagggatgagtaaacgttctgcgcccggggcgatgattattcacttcctcggtgggatccacgaactgtatttcccgtatgtgctgatgaagccgctgaccattattgccatgattgcgggcggtatgtctggcacctggatgtttaacttactggacggtggtctggtggctggcccaagtccggggtctatctttgcttacctggcactgacgccgaaaggctcgttcctggcgacaattgccggtgttacggtaggtaccctggtgtcctttgctattacttcgctgatactgaagatggaaaaaacggtggaaacggagagcgaagatgagtttgctcagtcagccaatgcggttaaggcgatgaaacaagagggtgcattctcgttaagcagggttaagcgtatcgcctttgtttgcgatgcggggatgggctccagtgcgatgggcgcgaccaccttccgtaaacgcctggaaaaagcggggctggcaattgaagtaaaacattacgccatagaaaacgtgcctgcggatgcggatatcgtcgttactcatgccagtctggaagggcgcgtgaaacgtgtgacgataaaccactatatggtccagctgttgtcttccagcctgggtgaaatcatgaccacgctgacagcacaacagattgcctgtgtttacgcctggctagcgcagttgttctcccgtgagctggacgatgaacaactgacgcaaatcgccagtgcgcagatggctgaatggttttcgttgctgaaaaacgaaccgccgctcactgcggcggtgaacgagctggaaaaccgtattgccacgctgacagtacgacgagcaagagattaa

SEQ ID NO: 21553 - DNA, 2638 bp, Homo sapiens
  SIMILAR (1007)..(1402): 961254mologous to Escherichia coli Aspartate transaminase (EC 2.6.1.1),accession number D90701,Smith-Waterman Score=668.
atggaccgcgataaccgttgggatcgcgtagaaaaagcttatgacctgctgactctggcgcagggcgagttccaggccgataccgccgttgctggtttgcaggctgcttatgctcgcgacgaaaatgatgaattcgtgaaagcgaccgttatccgtgctgaaggtcagccagacgcggcaatggaagacggcgatgcactgattttcatgaacttccgtgctgaccgcgcgcgtgaaatcactcgtgctttcgtgaacgctgatttcgatggcttcgcgcgtaagaaagtggttaacgtcgatttcgtgatgctgacccaatacgccgctgacatcaaaactaccgttgcttacccacccgcttaccttgttaacaccttcagccagtggatggcaaaaaacgacaaaactcagttgcgtatttccgaaaccgaaaaatatgcccacgagcggctggcgcaccacgttgcacagggggcaaaccaatacgcgcccatgaccggcgtgcaggccttgcgcgaggcgattgctcagaaaacggaacgtttgtatggctatcaaccagatgccgatagcgatatcaccgtaacggcaggggcgacggaagcgttatacgcggcgattaccgcactggtgcgcaatggcgatgaagtgatttgttttgatcccagctatgacagttacgcccccgccatcgcgctttctgggggaatagtgaagcgtatggcactgcaaccaccgcattttcgcgttgactggcaggaatttgccgcattattaagcgagcgcaccagactggtgatcctcaacactccgcataaccccagtgcaactgtctggcagcaggctgatttcgccgctttgtggcaggcgatcgccgggcacgagatttttgtcattagcgatgaagtctacgagcacatcaacttttcacaacagggccatgccagtgtgctggcgcatccgcaactgcgtgagcgggcagtggcggtttcttcatttggcaagaccctatcatatgaccggctggaaagtgggttattgtgttgcgccagcgcccatcagcgccgaaattcgcaaggtacatcagtatctgaccttttcggtgaataccccggcacagctggcgcttgctgatatgctacgtgcagaacctgagcattatcttgcgttaccggacttttatcgccagaagcgcgatattctggtgaatgctttaaatgaaagccggctggagattttaccgtgtgaaggtacatactttttgctggtggattacagcgcgctttctaccctggatgatgttgagttttgctagtcgctgacgcaggagcacggcgtagcggcgattccgctgtcggtgttttgcgccgatcccttcccacataaactgattcgtctcatacaaactgccgcgataaatttgctcgttaatcacgaacgacgagccaatgccgtaatcaacgttgatcacgcagaaatcccgttcctgcgaattattttgccatttctccgccagcgccagcatcacgcagtcattatcgaccatcacccgaatgccgagcttctcttccagcagatatttcacctccaccggcgttgtccacggcgctttcggcatggtttgcgacacgccggtcacaggatcaacctgaccgtggatttccaacgccaggttgatggtatggtccggccacaatttacggtggcgatgccagcaatttttcgatttcggacagcagcgccttcggcgtcggtgcatcaatctggagtaaggctgccctaccagttcatggcgttgatagccagtgataacttctgctgctgggttcatggtggttacatcaccctggcggtcaatggcaatgacgccatcggcagcgttttcaataatcagatcgttaagtgtccgcgtttcacgcagtgcctgggcgaggttattaacactctgactgatttgccccatttcaccgggcaattgtggtaatcgagtgggaatattttgtgccagagtcgagaggccatcggtgatgatatcaatattggcgctcaggcgacgggagataaggacaatcaacagcaggcttatcagcaaaccagcggtgagcacaatgataatcctcacatccattttccaggcctggcggcgaatatcttcggttaattcattggcccagatatagccgaggatttcaccattacgctcaatggggagcattgaattcaaaatatcgccgcgcacctgcctgcctgaataaactaaaggggtatttgtacgcatcacttcgcgaccagggtgatctgcggcaatggtaacgccgacattattctgatatagcgctgaaggcgcgtaggtgattatcgcatccagcattttgttgtaataaccagcaccgatgccagggaaggcgtgagtgatattttcggtaatgggggcaagttctgcatttaatgcgcggatacgctcctcacgtggtaagtcgatgtagagatcatagcgatcgcctagtgcctgattaagcaggttgaccacggcagaaagttttttctctttttcagataagactgctgaacgtccttccgtttctacgatataaccaatagtaagcgttgggacaatgaccatcaggattgccat

SEQ ID NO: 21554 - DNA, 470 bp, Homo sapiens
  SIMILAR (146)..(352): 1001254mologous to Homo sapiens 80K-H protein,accession number J03075,Smith-Waterman Score=397.
  misc_feature (1)...(470): n = a,t,c or g
gcggctgctggacaagaggggtgcggtggatactgacctttgctccggcctcgtcgtgaagacacagcgcatctccccgctgtaggcttcctcccacagaacccgtttcgggcctcagagcgtctggtgagatgctgttgccgctgcttacctgtacagccagtgctacgagctcaccaccaacgaatacgtctaccgcctctgccccttcaagcttgtctcgcagaaacccaaactcgggggctctcccaccagccttggcacctggggctcatggattggccccgaccacgacaagttcagtgccatgaagtatgagcaaggcacgggctgctggcagggccccaaccgnttccaccaccgtgcgcctcctgtgcgggaaagagaccatggtgaancagcaccacagagcccagttggtgngagtnactgatgggagctgatgaacgtcagccgtttgtncggagttt

SEQ ID NO: 21555 - DNA, 452 bp, Homo sapiens
  SIMILAR (197)..(451): 1001254mologous to Homo sapiens glucosidase II beta subunit,accession number AF144075,Smith-Waterman Score=450.
agcttggcacgaggggaaccgcggctgctggacaagaggggtgcggtggatactgacctttgctccggcctcgtcgtgaagacacagcgcatctccccgctgtaggcttcctcccacagaacccgtttcgggcctcaaagcgtctggtgagatgctgttgccgctgctgctgctgctacccatgtgctgggccgtggaggccccaccgccactgtcacccccgcagccggccagccctgctgaggaagacaaaatgccgccctacgacgagcagacgcaggccttcatcgatgctgcccaggaggcccgcaacaagttcgaggaggccgagcggtcgctgaaggacatggaggagtccatcaggaacctggagcaagagatttcttttgactttggccccaacggggagtttgcttacctgtacagccagtgctacgagctcaccaccaacg

SEQ ID NO: 21556 - DNA, 2336 bp, Homo sapiens
  SIMILAR (1145)..(1765): 581254mologous to Homo sapiens glucosidase II beta subunit,accession number AF144075,Smith-Waterman Score=501.
ctcccccaaccttatcccgcccctgggggttcgcgggcatttttcaggaactttctttccggcttgagaagccgccactcccaagatggagcaggaaccgcggctgctggacaagaggggtgcggtggatactgacctttgctccggcctcgtgtagcgtgaagacacagcgcatctccccgctgtaggcttcctcccacagaacccgtttcgggccatcagagcgtctggtgagatgctgctgccgctgctgctgctgctacccatgtgctgggccgtggaggtcaagaggccccggtgcgtcgtccctcaccaatcatcacttctaccgttgagtccaagcctttcacctggcctggacggttcggccaccatcccatttgatcaaggtcaacgattgacctattgcgactgcaaagaatggctcttgacgaagccaggcaacggctgcctggtccttaatgggcaagctttccactggccaccaaacacttgggctataaagccccttgtaataatccccttccaaaccggggtcaaacgatggtgtttgtgactgctgcgatggaacagacgaagtacaacaagcggcgtcatctggtgagaacacctgcaaagaagaagggcccgtaaggagaagagagtccctgcagcagatggcccgaggtcacccgcgaaggggttccgtcttgaagaagatcccttatttgagggactgggaaagaaggcacgggaggagaagcagaaaaagcttcattgagctacaggctgggaaagaagtctctggaagaccagtgtggagatgctgcggacagtgaaggaggaagctgagaagccagagagagaggccaaagagcagcaccaaaagctgtgggaaagaacagctggctggcttccaaggccccaacagggagcaggacgctagggcggctgatgccttcaaggagctggatgatgacatggacgggacggtctcggtgactgagctgcagactcacccggagctggacacagatggggatggggcgttgtcagaagcggaagctcaggccctcctcagtggggacacacagacagacgccacctcctttctacgaccgcgtctgggccgccatcagggacaagtaccggtccgaggcactgcccacccgaccttccagcaccttctgcccctgacttgacggagcccaaggaggagcagccgccagtgccctcgtcgcccacagaggaggaggaggaggaggaggaggaggaggaagaagaggctgaagaagaggaggaggaggaggattccgaggtgcagggggagcagcccaaggaggccccaccgccacttgtcacccccgcagccggccagccctgctgacggaagacaaaatgccgccctacgacgagcagacgcaggcccttcatcgatgctgcccaggaggcccgcaacaagttcgaggaggccgagcggtcgctgaaggacatggaggagtccatcaggaaccatggagcaagagatttcttttgactttggccccaacggcgacgtgttgcttacctgtacagccaagtgctagggacctcaccaccaacgaatacgttttacccgcctctgcccctttcaagttttgtttttcgcaggaaacccaaattcgggggtttttcccaccagccttgggcacctgggggcttcatgggattgggccccgaccacggacaagtttcagttgccatgaagttttgagcaaggcacggggcttgctggcaggggcccaacccgctccagcatccgtgacgcttctggttcgggaaagagacccatggtgaccaagcacccacagtagcccagtcgctgcgagtaccttcatggaagttgatgaacgccagccgccttgcccggagccacccgccttgaagcaaccccaaccgaaagacggaccatgacgaagttcttagctggatgggcgcaagagaacctcaaagaaaggcatgaagccaagccccatgcagtgccggtccaactccgccccttctgggccctgcctgtggcttcttgttgcccttcctcctctggccggcaaggacctttgtgggggcttcgtgcccttgcttcttgggggcccagggcggggcttgggtccacacttcccaggcccccaacagccttcaaagatgggttaagggagcttgccctccctgggcccccgcaccttggtgactcgccccaccacccccagccctgtccctgccaccccttcctagtgggggacttagtgaattgatttgaccttgttgaccttcaatacaattaaatgttgatcccccacccaaaaaaaaaaaaaaaaaaa

SEQ ID NO: 21557 - DNA, 359 bp, Homo sapiens
  SIMILAR (2)..(358): 991254mologous to Escherichia coli HipA protein,accession number D90792,Smith-Waterman Score=611.
  misc_feature (1)...(359): n = a,t,c or g
aattagagaagaaaatgactttcgcatctcggtggctggcgcacaggagaagccagcnctgctcagaataggcaatgactggtgcattccgaaaggaataacgccgacgacgcacatcattaaattaccgattggcgaaatcaggcagcccaatgcgacgctcgatctcagccaaagcgttgataatgagtattactgtctgctgctggcgaaagaacttgggttgaatgttccggacgcagaaatcattaaagcgggaaatgtgcgcgcgttagcggtcgaacgttttgacaggcgttggaatgctgagcgaacggttttacttcgcttgccacaggaggatatgtgtcagacattcg

SEQ ID NO: 21558 - DNA, 925 bp, Homo sapiens
  SIMILAR (1)..(648): 961254mologous to Escherichia coli FlgD protein,accession number D90743,Smith-Waterman Score=1043.
atgtccattgcggtaaccaccaccgatccgacaaataccggcgtcagtaccaccagcagtagttcgctcacgggcagcaacgccgcagatttacaaagcagttttctgactttgctggtggcgcagctgaaaaaccaggacccgaccaatccaatggaaaacaacgagctgacgtcgcaattggcacaaatcagcacggtcagcgggattgaaaaactcaataccacgctcggatctatttccggacagattgataacagccagtcgttacaggccagtaacctgatcggtcacggcgtgatgatccccggcaccactgttcttgcgggaaccggcagtgaagaaggggctgtgaccacgaccacgccgtttggtgttgagctgcaacaggcggcagacaaagttacggccaccatcaccgataaaaatggcgcggttgtgcgcaccattgatattggtgaactgaccgccggagttcacagtttcacctgggacggtacgttgactgatggcagcactgcgccgaacggttcttacaatgtagcgattagcgccagtaacggtggtacacaactggttgcccagccgctgcagtttgctctggtgcagggtgtgatccgcggcaacagcgacataacaacattcggggtgaatatgaaattagcacatctgggacgtcaggcattgatgggtgtgatggccgtggcgctggttgcgggcatgagcgttaaaagttttgcagatgaaggtctgcttaataaagttaaagagcgcggcacgctgctggtagggctggaaggaacttatccgccgttcagttttcagggagatgacggcaaattaaccggttttgaagtggaatttgcccaacagctggcaaaacatcttggcgttgaggcgtcactaaaaccgaccaaatgggacg

SEQ ID NO: 21559 - DNA, 3858 bp, Homo sapiens
  SIMILAR (1)..(525): 981254mologous to Escherichia coli coenzyme A ligase,accession number X97452,Smith-Waterman Score=914.
atgtctggcgggcagacggaaaaacaagcgcaactgatccgtgattttcaaccagatatgatcatggttacgccatcttattgccttaacctgattgaagagctggagcggcagttgggcggtgatgccagcggttgctcgctgcgggttggagtatttggtgctgagccgtggacacaggccatgcgtaaagagattgagcgtcgcctggggatcaccgcactggatatttatggcctgtcagaagtgatggggccgggggtggcgatggagtgtctggaaactaccgacggcccaaccatttgggaagatcatttctatcctgaaattgttaatcctcatgacggcacaccgcttgccgatggtgaacatggcgaactgttattcaccacgctgaccaaagaagcattgccggtcattcgttaccgcacgcgtgatttaacccgactgttaccaggaacggcgcggactatgcgccgcatggatcgcatcagcggacgcagcgatgacatgttggtccttcgcaggcgtcatttatgtcgacctagcgcatgccaactatgccgcccaccttccttaccggcgacggaccgtgttctggagttgtttgcccaaagcggtgcccagtggctggtgatccttggcgacgtgttgaatcacggcccgcgtaatgctttaccggagggttacgcgccagccaaagtcgctgaacggcttaatgaagtggcacataaggttatcgctgtgcgcggcaactgcgacagcgaagtggatcaaatgctgctgcatttcccgataaccgcgccgtggcaacaggtattactggaaaaacaacgtctgtttttgacgcatggtcatctttttggcccggaaaatctgcctgctttaaaccagaacgatgtgctggtgtacggtcatacccatctgccagtggcagaacagcggggggagattttccacttcaaccccggctcggtgagtattccgaaaggcggtaatccggcgagttatggcatgctggataatgacgtacttagtgtaatcgcactcaatgatcaaagtatcattgcgcaggtcgcgattaatccagcgccagaaaaagaaggtttcctgataatggaacagcgtcgtttggcaagtactgaatgggtggatattgtcaatgaagagaacgaagtcattgcacaagccagccgggaacaaatgcgggcacagtgtctgcgtcatcgtgcaacttacatcgtcgtgcatgatggcatgggcaaaattctggtccagcgtcgtaccgagacaaaagactttttacccggcatctgcgccaccagcaaagtcagaaaactgctttgtaaatctgcggcgttgctgcccgtgagcgaactactgctggtgttactgacgccggtatttgtcggatcggctgttatcggcaaactgggtgcgttcgcgatccatatcgacggtattaccgtcaagcgaaggctggtccggaatacggtattgcagttttgcggtaggagccgtcagccccttgaatatgtgagtgccggcgataccggtccggtactgcgggcgctgaaacggatgatggcgatgcgccactatatgcgttcacaaaccgtgaagggcgttactgatactcgtgccatcgacgaagtagccctgagcgtcgcccaggtcgaagagatgtatcgctatctcgccattgccaactatgaagatcgttttgttatcccgaccagccatcgggaaatggcgggcgatgccttcgcagaacgcaacggctgcggttttacctttggcgacggttgccacggttcggacagtaaattcaacctgttcaacagtagccgtatcgatgccatcaacatcaccgaaatcctcaaagtgatcggcctgttgatggagtatccggacgagctgttgtgggaatgcaaggaggacgcgctggcgttgatccgccgcgacgcgccgatgcttacggatttcacccacaacctgcttaacgcgccgctgctggataaacaggccgaatggtgcgaagtgtttgaccgcgggcgcaccacgtcgctgctgctgttcgaacatgttcatgccgagtcccgcgatcgcggccaggcaatggtggacctgctggcggagtatgaaaaggtcggcctgcagctggattgtcgggaactgcccgattatctaccgctgtatctggagtatttaagcgtactgcctgacgatcaggcgaaagaaggattgctcaatgttgcgccgatcctcggccctgggcaaaagcaactgctggcactggcgcgcgtgctgttcgagacgccgcaaatcctgatccttgatgaggcacccgccagcattgactccggtactgaacaggcgattcaacatgctctggcggcggtgcgtgaacataccacgctggtagtgattgctcaccgcttatcgaccattgttgatgccgacaccattctgtgcttcatcgtgggcaagccgtggagcagggcactcaccagcaactgctggcggcccagggacgctactggcagatgtatcaactgcaacttgcgggcgaagagctggcagccagctgcgttttcattttcaaacttcttaacttcctgctctctttctcgtttttcatttctggcacaccgcttgcaataccttcttcgtgtagcagaaccattaccgaattctgaccggaggggatctatgaagctggtgaccgtgataatcaaaccattcaagctggaagacgttcgtgaagcgttatcttccattggtattcagggcctgaccgtcaccgaagtgaaaggtttcgggcgtcagaaagggcatgccgagctgtaccggggggcggaatacagcgtcaatttcctgccaaaagtaaaaattgatgtggcgattgctgatgaccaactcgatgaagtgatcgatatcgtcagcataaatgatgtatcccggtatgaagatcgggtatccgcaacgtttttacgaagaaagttttgcgggaagtttcggttgaagaaaagtgatacatcgcagatgccccgtcaaatgtacggaaggcacgacgtgggctatcgcgttttaccggttcttccggcgtacgcaaatagcgataggtctgaaaacgcggatccagggctgttccaacaggcgacctacgaggcttgcaagcattgccccccaaccccccggaacatcggctgccgaggacgggaattcactgtgaatggaagaaacgccgtttcatttgatcctgacgtcatcatgatcggagagatccgcgatggcgaaacagcagagatcgctattaaagcggcgcaaactggtcacctggtgttgtctaccctacacactaattccacctgcgaaacgctggtacgtttacagcaaatgggggtcgcccgctggatgctatcatcggcgcttacgctggtaatagcccagcgtctggtacgcaaactttgcccacattgtcgccggcagcaaggggagcccatccacattccagacaatgtatggccatcgccgctgccccactggcaggcacccggttgtgtacattgctaccacggtttttatggtcgtacggccttatctgaaggtctgcccataaagccgacctgcaggctgtcaagcatttgcccccccaccccccgtgcagtttggtgccagcacgttcatcgtttgttcatgctttcagtgtcagaaccccaaaagcacccggaatttcgctgtctgggcaacatgcgccagcgtttgcttgcaccaccagcgacatattcaaagtgggcagtgccaccacgaataaccgtaccgagcgcaatcacgggtcgtatttaccggttttag

SEQ ID NO: 21560 - DNA, 3355 bp, Homo sapiens
  SIMILAR (648)..(58): 981254mologous to Escherichia coli RhsB core protein with unique extension,accession number U00039,Smith-Waterman Score=1042.
ctattccgttactctccggactccgccccgccgtgttcttcggctcggtactcttgggtccaccagcccgttcagtacccggtacgccggcaggggcgcaggcagcacttcatccgcttccggcacccgctcacaccaaccgagcagccaccacggcccctgcggactgtttgtcgccagataacgatgcggacttaagcggagttcttccggcagcgcctgccagagtgcggccagccggtgaccttcatccagtttcgccacgccgccgcgcaccagccacagtgactcgctgcggctgtaaccgtcctcaccgggaaacaggtgctcaaaatacaggcttctgccgccgttatcactgagtatcagtgtgttatcgcgcagctgtaagcggatatccgcaggcattttccagccggggccgaggctccccaccggcgcgggcgtttttgtccggtaactgctgtaggtgcgggagaggatgaacggcagcgggccgggcagggcgatgtcggtttcaccgggaaggacctttgcaccgagcaggggattgaccggatggccggacgtcactccgccggggcacaccgaacaggccacgccggtgggggcaccaatgcgcaccccggctgaacccagcacgatgctttcttctgaacgatagaaacgacgtgcatcttcctctgcgttttcaccaatcaccatgccttccggaataacacaagcacgatcgatgacgcagcggcgcagacggcacgagcgacctacccatacttccggtaacaatacggcggaatcaatgttgcagaatgaattcacgcgaacgcgcgagaacagaacggactgcaccaccaccgaaccggagatcacacaaccgccggaaaccagtgagttaagggtcatcccgtggctaccggagcgatcctgcacgaatttcgctggcggtaatgattcattgtaggtgcgaattggccaattgcgatcgtacatatccagttccggcaccacagaggccagatcgaggttcgctttccagtaagcttccagcgtacccacatcgcgccagtacggctcggcatccgggtcggattgtacgcaagagagcgggaacgggtgcgcataggccagaccggcttcggggggtcctcttgcgatggctttcttgatgcggatacccggggtttcacccccggttacgctaccggacagtttgatcagttctttgatttcgtccatgttggagataacaaccggagtcagggtagacttggctttctcttccagcagcggcagatcaaattcaatgacagtatcgccaactttcacgcgctgaccttcttcagcaatacgcttgaagccttcgcctttcagttcaacggtgtcgataccgaagtggacgaacagttcaacgccgctatcagattcgatagagaatgcgtggttggtttcaaagattttaccaatggtgccgtctactggcgcgaccattttgttacccgttggtttgatagcaataccatcaccaacgattttttccgcaaaaacgacatccggcacgtcttcgatattgacgatgagcgtctcacgtagggtcgtgctcaggtcgatcaaaaaaacacttccataaccttgccgaataaattcgcgattcatctcaatgatacccatccggtactgtcgattcctgagatgatgcgtctgctgatcgatgagcaccaatttagctgggacgacgcgtttgaggtgtgttgtcaggtcttctcctacactaaccacacgctgatgagcgaggcgctggaaacctggccggttgatatgctgggtaaaattctgccgcgtcacctgcagatcatctttgaaatcaacgactatttcctgaaaaccttgcaggaacagtatccgaacgataccgatctgctgggacgggcgtcgatcattgatgaatccaacggtcgtcgtgtgcgtatggcctggctggcggttgttgtgagccacaaagttaacggtgtatcggaactgcactctaatctgatggtgcaatcgttgtttgccgactttgcgaaaatcttcccgggtcgtttcaccaacgtcaccaacggtgtgacgccgcgtcgctggctggcggtagcgaacccatcgttcatcgccgttaaccagttgcattggcgtcgccttccagcttttgatattgccttttcgcctgtttcgggcacagattaaaggcaaagcgcagacaatgcttggtgatcatcaccgggacttcgcccttctcttcatgtgcttcatacgccgcgtcaatcagctgcacaccatagcgatgataaaattcacgcgctttctggttgtatacgttcgcgaggaaactcagatgcgtttgcggataaaccggcgcaggatcagcaaccggtttacggctgccgcgctggtaactggcaagacgcgcagcatccagcatgtcagcagcttcacggcggaactggtttaacagactgtttggtacaaacagcgcccccggcaaattaatttgcacatcgcgggcgtaatagagggtttgccccagttttgccagaccatccttcagattgttcattgctttttcggcgttattggcttcgtcgaactgcccgtccagcgtatgcgtgatgctgacaccctcttcactggtgagggtcagaatcagttgttcctgccagccgcccagttcaatgtctaccgccacccgacgttcggtgggtacgtccagggttgttagttccccacaggtatccgggatagacatattacgcgagcgggcgtcgagcacttttccccatgcttgtacggtagtcgccatatcaaaggtaaggatttggtcgctttctcccggcgcggcaaaggccagggggttagtaccgtagtaaatttccgcgccgccaaacggcaccaccattggatcggattggcacatcgaaatgccaatgaatccggcgcgggctgcctgctgcacaaaataagagattgcgccgctgtgacccatccggctgataccgaccaccgcaacgccattttgctgggcggttttgatggcatgttccatacccattttcgccgcgacctgtccggcggcattgtcggcatgtaaaattgccgagcacggcccggtttcctcaagacgaaactccggttcgcggttggtgccgccttttgaaatgcgttccgcgtagtattccacgcgcaccgcgccatgagagtggatccctctggcatcggcgtaaaccaatacttcacccacggttgcagcgtgctcacgttttaacccagcctggcagagtttattctcaattagctggtggagtgtttcccgactgattttcat

SEQ ID NO: 21561 - DNA, 3942 bp, Homo sapiens
  SIMILAR (1560)..(340): 941254mologous to Escherichia coli PII Uridylyl- transferase,accession number Z21842,Smith-Waterman Score=2016.
tcacagtcgttgccagtctggagtatccaatgtagctccgtaatgcatctgaaagcctccgtacagggtgaagatggccgtaaccaaatcctgacgatgggttgctacggtcatcggggtaacgcgtgtggtcagctgcggcgcattgagcagaacgaaaatgatcatagtcacatcgaacgcgattttcttttcatcgccgcactcctggccttcgcgatctacgatcagttcatcatgccccgccgtaacggccccaccctgctggcaattcctttgctccggcgtggtcgcatcgatagcgttatcttcgtcggattgattgtcattcttattgcaaagcggtccagtttccggaatattacacagcggttgttgcagatggcgacgggcatggcgtaactggcgcagcgtgttggagtaaatgccggtgatcgcactgttgtgcaccatggtgtagaacatacgcaagatggcttccggctggcgcataaatagtgtttcatcacgcaggtcgattagcgtaccgcgtagctgaaactcatcgtcgattggacgtggtttttcgtcggcgggaagggcgaggatggcttcatcgaacagttgcagcagcatctggttgagttcactgacgcggcgtgtaacgcggaagtaatccttcatcatccgctcgaccggttcgttaccttcaccactgtaattcagacgctgggcgacgctaagctggcgatcgaataacaggcgattatcgtaacggctgacgaccagatgcagggcaaagcgaatacgccacaatatatgcagacattcgtttaattccgcccgctccgccatttcatccagcgatgttgcgccaaaatgacggcgggccacccattgcagagtgtggatatcgcgcaagccgccagggctgcttttgatgtctggttcaaggttgtagctggtgccatggtaacgctgatggcgctggttctgttcttcaactttcgccgcgtagaacttgtcggaaggccagaatccttcgctgaaaatatgtttttgacagttcgaggaacagcgcaacatcgccaataataagcgggattcgattaaattggtggcgacggttaaatccgataacccttccagcatgcactcttcaagcgtgcgcacgctatgaccgacttccagctttacatcccagagcagcgttaacagctcgcccactttttgcgcctgatcgtccgggagctttttacggcttaaaatcagtaaatcgacgtctgaaagtggatgcagctcgccacgaccgtagccaccgacggcgaccaatgccaggtcggcaatctggctgaatcccgcttcaatccataatcgttgcaggagctggtcgataaactcggtgcgcgcctcaatcaactgttctgcagagatcccattgtcaaaggcatcacccagccaacgctggaaagtatcgatatgggcttttatcccaccgacggttaattcatcacggggccagacgcatggattttgcggttgaccgggcagggtggggagagcggtgtttgcgtactgttcgtaatttccaagctgctgagagatgcttatttgttcctgaccacgcttactgtagaacagattaaaataatcaataaattgtgtctgctcattggtgtctccggtaggaggcttgacggtgtaaccactcattcgactgtaggcactgtcggataagttataaaaaccttgcgtagaatagcgatatcctgcgaccagataaacatcgcggaagatccccgctgaccaccacatatcctggtcttccacgtaggtagagtccgcccactgcatcacgcgcacacacaacaggttgtcgccggttttaaccatcgcgctgatgtcaaactctgcggtcaggcgactgcccttgctgaaacccacatactgaccgttaacatagacttcaaaataggtttcgacgccgtcaaatttaatcagcgtctgtttaccctgccagccgtcgctgagggtgaaaatacgttgataggcaccggttgggttatcgctggggacaaacggcacatcgatggggaacggaaaaccttcgtcggtatattgcagtttgccgtgacccgaggggggatcctctagagtcagggacttcctcgcgataacgcagttcgtcttcgtccatccacggtagcggattgtgtccccactcacctgccgtgccattgcgcgccgatatgcgcccgcccattgaattggctttatcgcctctatgctccatcttggttcaccaatgcgcgcttttaactcgctcaaccggttaggggcttcagcactcagtaacgaaatcgccagcggttcgatcttttttcccgtagccggcatcggctggttgctggcaatgctgaaaaagctgtcaccggcattgcgtacgctgtggctgatagtgacgatggttcttggcgtcatctttgtctggatgatggtgcgtgtgtataacagcattgataccgttccgacctggtacagcatctggacgccgatgggcttcttcctgttgttgagtctggctggcgtcgatggctgggcgatgcgtctgctgccagcaatttctgtactggcacaaacattctgttgccatcgtttctgtcccgtgaatgaagagtcagttgttggaatattcagcttgtgcgacgtggatttgtcgggagcttcaaacctcttcgttagcagccatccataatccataaaggttggccagcaaatagccttcttcacacgggttaactgatgcaattgcacaacggcttgccagtggctggattgcgccagttctgccagcaactcgttatccagcggctctatttcttcaccacggcgactgcgcatcagtgcactcgccatatgtgtcatcgccatcgttccttgctcactgcgcaccggcagatggcactctgtttccagtacgttgacgacctgcatcatgcctttgcagatgtccttatcaataacgcctgctacccgttgttgatgggcgagcagggcgtgtttatctacaacggcacgcagcagttgttgcattgggtaatcatcgactcgcgtcaggaccacggcttcggtggcctgtaaaaatcgcggatcgtctgtgagcggcgtcgcctctaatcccagcatggtcagttcgttttccgccaccacgttccagatcaccgcatcgacatcgcctttaacaatgcgttgtaaactctcgtgataagagagatcagctcggtcccggccagtgttggggtgggtatcgatttccccgggggggcggccacttgggcgggcccggttgtaattaagcccggacaatcttaagccgtgatcatcgggtgtacccaaccacgaaacgggcttcaaagtgtgccagttaggacccacggcatgggccattatcaggaaagccggaaaaatattcggtcgtgaggagccaaaacgcgtatccgttccctgcatatatggcgacgcggcggaaagggcgataaagtgcggcacaaatcgtgacaagccgtgcagcaaataaatggcgtcatcgccactggcgcagccaacatggacatgctgaccaaaaacggtcgcctgctgaatgagataaccaaagttttccagcgtgcgttgatagcgttcgttatcgcatacctcctgacgctgccatttctgaaacgggtgcgtgccaccgccgcaaatttccagatgatggtctgtggctgcctgcaatacgactttctgcatcgctgaaaactgcccggcagcctggttgatatcacggcaaacatccgtcgccagctccagcatactttcggtgatatcgtgctttacctctccggccgtgatcttatttttaaccgcgtcaatcagcattgaagagtcctggcttaagtcatagcccggcggattaaccacctgcat

SEQ ID NO: 21562 - DNA, 2800 bp, Homo sapiens
  SIMILAR (1074)..(1229): 611254mologous to Escherichia coli trpB,accession number V00365,Smith-Waterman Score=135.
atgccgaacgttgatgttgtcggagagatggttaacaccatgtcggcgtcacgcagctatcaggccaatgttgaagtgctcaacacggagaaagctatgtccattgcggtaaccaccaccgatccgacaaataccggcgtcagtaccaccagcagtagttcgctcacgggcgagcaacgccgcagatttacaaagcagttttctgactttgctggtggcgcagctgaaaaaccaagacccgaccaatccaatggaaaacaacgagctgacgtcgcaattggcacaaatcagcacgacgctgcgcgcatattaaggaaaggaacaatgacaacattacttaacccctattttggtgagtttggcggcatgtacgtgccacaaatcctgatgcctgctctgcgccagctggaagaagcttttgtcagtgcgcaaaaagatcctgaatttcaggctcagttcaacgacctgctgaaaaactatgccgggcgtccaaccgcgctgaccaaatgccagaacattacagccgggacgaacaccacgctgtatctcaagcgtgaagatttgctgcacggcggcgcgcataaaactaaccaggtgctggggcaggcgttgctggcgaagcggatgggtaaaaccgaaatcatcgccgaaaccggtgccggtcagcatggcgtggcgtcggcccttgccagcgccctgctcggcctgaaatgccgtatttatatgggtgccaaagacgttgaacgccagtcgcctaacgtttttcgtatgcgcttaatgggtgcggaagtgatcccggtgcatagcggttccgcgacgctgaaagatgcctgtaacgaggcgctgcgcgactggtccggtagttacgaaaccgcgcactatatgctgggcaccgcagctggcccgcatccttatccgaccattgtgcgtgagtttcagcggatgattggcgaagaaaccaaagcgcagattctggaaagagaaggtcgcctgccggatgccgttatcgcctgtgttggcggcggttcgaatgccatcggcatgtttgctgatttcatcaatgaaaccaacggtctgtcggcccacaacacgcgtatcttaacagcagtgtacgcgctgattaagtgtctattaccgatgatgaagaccttcaagcgttcaaaactctcacagcgtcatataagactactcccgctgcggcaaaaacctcgctacatgttccgagccatgaatcataaacgcgtgaatgcgtggaatgctgagcgaacggttttacttcgcttgccacaggaggatatgtgtcagacattcggtttaccttcatcggtgaaatatgaatcagatggaggcccaggcatcgcgcggatcatggcttttttgatggggtccagcgaggcgctgaaagatcgctatgattttatgaagttccaggtcttccagtggttgattggcgcaacggacggtcatgcaaaaaacttctccgtatttgttcaggctggcgccagttatcgcctcacgccattttacgacatcatttcagcatttccggtccttgccggtacgggaatacacatcagcgatctcaaactggcaatggggcttaacgcatccaaaggcaaaaaaacggcaatcgataaaatttatccgcgacattttttggcgacagcaaaggtgctgagattcccggaagtgcagatgcatgaaatcctgagtgactttgccagaatgattccagcagcactggataacgtgaagacttcattaccgacagattttccggagaacgtggtgacggcagttgaaagcaatgtgttgaggttgcatggacggttaagccgagaatacggtagatatcgctattctacgcaaggtttttataacttatccgacagtgcctacagtcgaatgagtggttacaccgtcaagccttctaccggagacaccaatgagcagacacaatttattgattattttaatctgttctacaattgtgcccatcacccactaacccgtaatcttgatcataactggcagcaggcactgacaaaaacctccagcgaacgtcgggtggcggtagacattgaactgggcggctggcaggaacaactgattctgaccctcaccagtgaagagggtgtcagcatcacgcatacgctggacgggcagttcgacgaagccaataacgccgaaaaagcaatgaacaatctgaaggatggtctggcaaaactggggcaaaccctctattacgcccgcgatgtgcaaattaatttgccgggggcgctgtttgtaccaaacagtctgttaaaccagttccgccgtgaagctgctgacatgctggatgctgcgcgtcttgccagttaccagcgcggcagccgtaaaccggttgctgatcctgcgccggtttatccgcaaacgcatctgagtttcctcgcgaacgtatacaaccagaaagcgcgtgaattttatcatcgctatggtgtgcagctgattgacgcggcgtatgaagcacatgaagagaagggcgaagtcccgggtgatgatcaccaagcattgtctgcgctttgcctttaatctgtgcccgaaacaggcgaaaggcaatatcaaaagctggaaggcgacgccaatgcaactggttaacggcgatgaagtattaacgctaaagtttgattgccgcccatgcgagatgcacgtcattggcaaaatcaaaaatcacatactgaaaatgccgttaccgggaagcgtagtggcatccgtaagtccggatgagctgctgaaaacattgccgaagcgaaaagggtaa

SEQ ID NO: 21563 - DNA, 1946 bp, Homo sapiens
  SIMILAR (944)..(1165): 941254mologous to Escherichia coli treF,accession number U00039,Smith-Waterman Score=369.
atgtttgatgggaaaactttcaaacttgtagtgggatgccagagtgttttctcacagtgggtgggtcctgtatttaatcaggcaatactgttcaatatctgccgtctcttcctgcggttcaaccaccggttctgcttgttctgcaacttcctgggctacggcaacatcagactcggtaactcacctgcggctgttcagttaccgcggcagcgatcacttcaggatgcgtcgtttcaaccacttccggttgcggttcggcaacctgaacgggggcttctacgacaccggccacttcttcaacaactggcgcgctaacaaccggttcgatagcggcggcgacagggacctcagtcaccatcggctgcacatgtacttcttcctgttcgcgctgctcttcaacctgtacatcttgcggacgtacaattggatagcggatccagactttgccagaggccagttccggagacgcgcacgctacggtcaacggcattggcgactgggttggataacgctcgtcacgatagcgacgacgacgctgaccacttacgcgcaggtgacgaggcgagcggcgagaacgacgcggcatgccaccgttgtcacggttatcagcattgttctcttcttgctgttctggtgcagtttgcgctacgactggcattactgcatcctaatacttagatcgactccatctgttctgtcccagtatcctgtgggcaatgagttaaggaggaggcgcttagtccacctacatttactgtgcacctactctgatgacgactctagagatccccggtaccggcaagaatcccgtacccgtaatggcgtagtgccagtaattgtaaatatcgacgttcatcgttttggtcagacgggtgaccagcatggcgccatgattatcccagttatttttcttctcaatgtcgccatgcacgaacgagctagcggtcacatccccaacggcaaccgcacctattatttgagccgctcgcaaccaccggtttttgcgctgatggtggagttgtttgaagaagatggtgtagcggtcgcccgctatctcgaccaccttaaaatggaatatgccttctggatggacggtgcagaatcgttaatccctaatcaggcctatcgccatgttgtgcggatgccggacggatcgctgctacatgcgatactggtgcgattgccacacttcgtgtgattaatcctggcttgaggacgttgaaaccgcgaaacattctggtcgcccgcccaacgaggtgtaccgcgatttacgcgcgggggcggcctccggttgggattactcttcccgttggctgcgtgatactggtcgtctggcgagcattcgtaccacccagttcatccccatcgatctgaatgccttcctgtttaaactggagagcgccatcgccaacatctcggcgctgaaaggcgagaaagagacagaagcactgttccgccagaaagccagtgcccgtccgatgcgcgagtacgaaaccggtgaacagtgggataaacccaacggctgggcaccgttacaatggatggcgattcagggatttaaaatgtacggcgatgaccttctgggtgatgaaatcgcgcgaagctggctgaagacggtgaatcagttctatctggaacagcacaaactgatcgaaaaataccatattgccgatggtgttccccgcgaaggcggcggtggcgagtatccgttagcaggatgggtttggctggactaacggtgtggtacgccgtttaattggtttgtacggcgaaccataatatttttacagccagccgctaacttcctgctggctgtaaaattatcctcttcaggaggagatatttaacatcattgccgcctgggtgcgatttttcacttccagacggcgatacagggattccagatgcgcttttaccgttccggtactgatattcagcgctctgcc

SEQ ID NO: 21564 - DNA, 2517 bp, Homo sapiens
  SIMILAR (1882)..(2457): 991254mologous to Escherichia coli put. IS30 transposase,accession number X00792,Smith-Waterman Score=991.
atgaaaacgttaattgcccggcataaagctggtgaacatatcggcatatgttcagtctgttctgcccatccgttggttatcgaagcggcgctggcatttgatcgcaacagcacgcgcaaagtgctgattgaagcaacgtcaaaccaggtcaatcaatttggcggttataccggaatgacaccggcagactttcgcgaatttgtttttacgattgccgataaagttgggtttgcacgcgaacgcattattctcggcggcgatcatctggggccaaactgctggcagcaagaaaatgcggatgcggcgatggaaaaatccgtcgagctggcagtggtcattgacctgtggtcacgtgccgttattggctggtcaatgtcgccacgcatgacggcgcaactggcctgcgatgccctgcagatggcgctgtggcggcgtaagaggccccggaacgttatcgttcacacggaccgtggaggccagtactgttcagcagattatcaggcgcaactgaagcggcataatctgcgtggaagtatgagcgcaaaaggttgctgctacgataatgcctgcgtggaaagcttctttcattcgctgaaagtggaatgtatccatggagaacactttatcagccgggaaataatgcgggcaacggtgtttaattatatcgaatgtgattacaatcggtggcggcggcacagttggatcaactctctgctgtcgcagaagcggaacacgcaaggtagaattgaagatggaaggcagcatgacaaatgggtcgcggagcgcaaccgtatagaggatccccgtctggtcaccgtgcgtgaaggtgaagcccgtgaagtggtgctggcaaaaatgcacgaaaaacgcgttgaaaaagcgctagttgccgcactggtggtcgcactgctgattagcggtggtatcctgacctgggccggatttaacgatccgcaggagatcaacggcaccttaagcgccgatgccacacctgctgaagctatctcccccgtagccgatcaggactggcctgcctatggtcgtaatcaggaaggtcaacgcttttcgccgctgaaacaaattaacgccgataacgtccataatctgaaagaagcctgggtgttccgtactggcgatgtgaagcagccgaacgatccgggtgaaatcaccaatgaagtgacgccgattaaagtgggcgacacccctttactgtgtaccgctcaccagcgcctgtttgcgcttgatgccgagatggacggcatcgccacgctgaaagagatcaaagcgttaaacccggcaattccggtgctgattatgactgcgtactccagcgtcgagacggcggtagaggcactgaaaactggggcgctggattatctcatcaagccgctggatttcgataacctacaggcgacgctggaaaaagcgctcgcgcatacgcacagtattgatgctgaaacacctgcggtgactgccagccagttcggtatggtcggtaaaagcccggcgatgcaacacctgctcagtgaaatcgccctcgtcgcgccatcggaagccacggtactgatccacggcgattccggcaccggtaaagagctggtcgccagggcgattcacgccagtagcgcacgtagcgaaaaaccgctggtaacgctcaactgtgcggcactcaacgaatccttgctggaatctgaattgttcggtcacgaaaaaggggcgtttactggagccgataaacgccgggaagggcgctttgttgaggcggacggcggcacgctgtttctcgatgaaattggcgatatctcgccgatgatgcagataatacctttcatcgcaaaggaaaaagcagcttcatctgtccgtgactctagaggatcccctgagcgcgaggagatacgagctggtttgtcagccaaaatgagcattcgtgcgatagctactgcgctgaatcgcagtccttcgacgatctcacgtgaagttcagcgtaatcggggcagacgctattacaaagctgttgatgctaataaccgagccaacagaatggcgaaaaggccaaaaccgtgcttactggatcaaaatttaccattgcgaaagcttgttctggaaaagctggagatgaaatggtctccagagcaaatatcaggatggttaaggcgaacaaaaccacgtcaaaaaacgctgcgaatatcacctgagacaatttataaaacgctgtactttcgtagccgtgaagcgctacaccacctgaatatacagcatctgcgacggtcgcatagccttcgccatggcaggcgtcatacccgcaaaggcgaaagaggtacgattaacatagtgaacggaacaccaattcacgaacgttcccgaaatatcgataacagacgctctctggggcattgggagggcgatttagtctcaggtacaaaaaactctcatatagccacacttgtagacacgaaaatcacgattctacgatccatcgattcgactctaggggcaacagattcctgtctccagtaa

SEQ ID NO: 21565 - DNA, 1530 bp, Homo sapiens; identical to SEQ ID NO: 18281
  SIMILAR (781)..(1527): 991254mologous to Escherichia coli IS30 transposase,accession number U70214,Smith-Waterman Score=1304.

SEQ ID NO: 21566 - DNA, 1866 bp, Homo sapiens
  SIMILAR (1866)..(1030): 1001254mologous to Escherichia coli K12 putative mutase,accession number AE000413,Smith-Waterman Score=1434.
tcatagctgagtgaagaacacctgcacgccgcgttccgccagcaatttcatgttagtgccgtttttctccagcgccgcaacatcagacaccggaatgccgtaaatgcgctccatcaccatcatcccttcactacaatagtcagggtaaacttccgggatgtagagcatcgggctgtcttcaaaattgcgccgaagctgaatggcgttggcagattcccgcagcaaattcagttcatcaatcaatgtcttttcgtactcgcgcaccacttcggttgggcgcagacggcgaccatccggcagcaaacgcggcacccagcgagccagacggtagataagtttcagatccgctttaataaccggcaaaatatccgggcggatgactttaatcaccacctctttaccattcgatttcaatcgcgcggtatgaacctgggcgatagaagcagaagccagcggcttgatttcaaaatcgtcaaaccacgcttctaccggcaagccgcccattgcagcttcaatctgctgcttcgccagcttgccatcaaacggagcaactttgtcctgcaataacgccagctgatcggcaatatgcggtggaaaaagatcgcggcgggttgataacatttgcccgaacttgatccaaaccggccccagttcttgcagggccagtcgtagtcgctcacctaaaagtttgtctttatgccgatttggcatccagaataatgagtatcgccatagccgtagcggcagggtgatacgcattttggggatcagttcatcaagtccgtagctgacactgtctgagcgcgaggagatacgagctggtttgtcagccaaaatgagcattcgtgcgatagctactgcgctgaatcgcagtccttcgacgatctgaatatacagcatctgcgacggtcgcatagccttcgccatggcaggcgtcatacccgcaaaggcgaaagaggtacgattaacatagtgaacggaacaccaattcacgaacgttcccgaaatatcgataacagacgctctcctagcccctacatcagaaagcgtggtgcgcacaccgagctgcgtagcgatcatcccttgctgataaaccagcactggcaccacttcgcgggtatggtggctgtgaccaatggtcggatcgttgccgtgatccgccatcacgaccaggcaatcatctggctgcatcgcctcaacaagccgggcaaggttacggtcaacgacctgcaaacgttcggcataacgtgcgacgtcttctgcatgaccagcgaggtcggtttcctgaatgttggtgcaaataaacgccgtcggatgggtgttaaattcgttgagggtgatatccataatccgctggctatccaccagattttgccagctcacgccataaggattgttgacgatatctgccaccttacccaccagcacggttggcacgcctgcttcatacagtttttgtggcacctgcactttttcatcgacgccatagcccatatgcacgacctggaaaccgttgtcataagcgccagaacgcggcgcattgataccaataaagcgcccttctttgctttctgcggcatcgagaatgcgttgactgtcggttaacaggccaccaaatgtaatgacccgaccgacctgtacctgctcacgcacgatacgaccaattttgattgcgtcgtcaaaagagatcacagagagattggcggtaatgttatagacctggcctaaatccgcctcgagattatcgccaatcgcaaccgcctgattgacccacagaaattgcagatcatcgccacggcgctccacctgccagccagcggaaactaatgcctgctcaacacggtcaatcacatcgcgaaaaggcat

SEQ ID NO: 21567 - DNA, 2155 bp, Homo sapiens
  SIMILAR (445)..(657): 881254mologous to Escherichia coli IS30 transposase,accession number U70214,Smith-Waterman Score=289.
ttatcccagcaaacggtgaatacgttgcaggccggtcaccagacgatccacttcttcatgggtgttatacatggccagcgacgcccgacacatcgcagggacgttgtaataggccatcaatggcattgcgcagtgatgtccggtacgcacagcaatgccgtaattatcgagaaaactgccaacatcataggcgtggtgtttaccgagattaaaagcaataacgccaagcctgttttgtgggccatagagagtaatgccgctgcaaccgatggtgaaatagtttttgatggcgagattttaaaatccgcttgtgaaatcaatgactctgataagaaaattgaagttgctcttggtcactataatgccgaacagtttcgtaatattggcgagcgtagcccaaaaattccattcactattcctttagttaactgcccaatgactggtgaaatagcgaatatcctgggttcaaaacccggaacgatcttcactatgttaagggatactggcggcataaaaccccatgagcgtaagcgggctgtagctcacctgacactgtctgagcgcgaggagatacgagctggtttgtcagccaaaatgagcattcgtgcgataggttactggcgctgaatcgccagtccttctaccttctcacgtgaaagttcagcgtaagggggggcacaggctattacaaagctgttgatgctaatatccgagccaacagaatggcgaaaaggccaaaaccgtgcttactggatcaaaatgtaccattgcgaaagcttgttctggaaaagctggagatgaaatggtctccagagcaaatatcaggatggttaaggcgaacaaaaccacgtcaaaaaacgctgcgaatatcacctgagacaatttataaaacgctgtactttcgtagccgtgaagcgctacaccacctgaatatacagcatctgcgacggtcgcatagccttcgccatggcaggcgtcatacccgcaaaggcgaaagaggtacgattaacatagtgaacggaacaccaattcacgaacgttcccgaaatatcgataacagacgctctctggggcattgggagggcgatttagtctcaggtacaaaaaactctcatatagccacacttgtagaccgaaaatcacgttatacgatcatcgttagactcaggggcaaagattctgtctcagtaaatcaggctcttaccgacaaattcctgagtttaccgtcagaactcagaaaatcactgacatgggacagaggaatggaactggccagacatctagaatttactgtcagcaccggcgttaaagtttacttctgcgatcctcagagtccttggcagcggggaacaaatgagaatacaaatgggctaattcggcagtactttcctaaaaagacatgtcttgcccaatatactcaacatgaactagatctggttgctgctcagctaaacaacagaccgagaaagacactgaagttcaaaacaccgaaagagataattgaaaggggtgttgcattgacagattgaatctacaaccgcgctcttgatgtcagactccctgaacagttctcgataatcgggaaactcagggcgcgttatcctgtggccactctctgccatgtgttcggggttcatcgcagcagctacaaatactggaaaaaccgtcctgaaaagccagacggcagacgggctgtattacgcagtcaggtacttgaactgcatggcatcagccacggctctgccggagcaagaagcatcgccacaatggcaacccagagaggataccagatggggcgctggcttgctggcagactcatgaaagagctggggctggtcagttgccagcagccgactcaccggtataagcgtggcggtcatgagcacgttgctatcccgaatcatcttgagcgacagttcgccgtaacggaacccaaatcaggtgtggtgcggtgatgtgacctatagtgtgcccggagttcagggcgggcatggatgcttaaatgaaccgcgagtctgtctggaatattgaaccggtaactcacgatgagaaacccaacaatcccaccgggtgtgacggtggagaacctgagcgccagtgacctgcggcatgcccgcagggtgatgtaacccgctgacaacggggattgaggcga

SEQ ID NO: 21568 - DNA, 446 bp, Homo sapiens
  SIMILAR (82)..(192): 391254mologous to Nicotiana tabacum protoporphyrinogen oxidase precursor; protox,accession number AF225963,Smith-Waterman Score=61.
catcattacgaattcaatctcgcgacccggagatcctcctatgtcggacccgcatagctgaagcccgcttggaccacgtctccagcttcttcctctgcaaagacagaaacaaagtcactctttaatgcgtttctggtgtagactgcagtcattccctgcacatcttcaaaaccctccacactcaacagttcaaacatgacagacacctttgtatttcttcaaacgtcaccgctcagagcccagcattttgtgccaataacctcaggaacaaccagtgttttctgtaaagcagcattgtgaccacagatgcacgtatttctcccacctagacacggacataggcagtgagtcccaatgattctcagctttaactctggcctaacttcaaatttattaggccttatttgcattggaacagacttgaataaaaaccagcccactctgat

SEQ ID NO: 21569 - DNA, 4086 bp, Homo sapiens
  SIMILAR (3028)..(4077): 911254mologous to Homo sapiens putative p150,accession number U93572,Smith-Waterman Score=1655.
atgacagatttggaatgtgagatgctgatgaagaggatacggtcgcctctcagtgatgagtcgtctcaatgtcacaagctgctcacacttcctggaagggagactcgggcagtgcgccttgagaagggaaggaagcaggatgcttcccagaaccggtcctcagaggcccgggcccaggtggctgcatcatcaacaccttccagaaaccctggcacgctggcactggctgtctggtgtcgcttctcctgcaatgggaaggccacaggttcagacccagcacggccaccacacgagcaggcaacttgcctggaagacgacacgatgaacccacaggactccattgaccttgacgctggcccccgtctgatcttggcagggaagggagggcaccaagaccgccaggggctgagctgccacctggtgtcggtcctggcaatgcctcattatggagaattgatgaagaaaaatggcacgtatgaggatttaaagctctccgtggtcgtacacagcccttctccttattggcctcccatgggtagcacacaggtcttcacgcaaaatcggctgcgtcgccatgagcatggagccggggaaggcgccttttcaaccccgcacgtaaggtgcttcgatgtggcaggagcaatcacagctctaattattgctgacacttgttctgggtattgtgcaaatgacttcaggataatggcaccactgcgatctagaaagacacccacagaacaacagtccctcgctcatccactccgccagtcaccggtgccatccacgcatggtgcctcttgcaggagactcacagacagtgaggaagacatgctgccctcagagctgacggtcccattttttccacgaactccaactccacgcatcagaagcacactagtcgcattctcgagcagctcaaacttcagcatggaatgttgtttcccaggcttttacagtccacagggcctctcatcagccacagatcactccctgcaaacgcccagcagcagctcggtgcaccgctgcccttcctgccggcaccgagcgtggtttatctcccaggctgccgcggggctcccttgcgcctctccggccgcgcgcgccggaggctcactcaagccagctccaaggaggaggcagtgccggagggaagaacagcctgatgccccgaacgagggtcccacgcccatccccacatccacgcacggctgcctgcagctcctactctgtgtttggggcggggagacgccgagggctacagctgtggaaggaagcgcatcccaggccgctgaagaaacactggcctgctggctgctgtcccagcgttgcccccctgcctgggctcaccctgctccaccctcagaggcctttgtgctctcagctggtgctatgcaactggaagcaggtgcctactcattggtcataatcaaagaatcaaaaaataatgttggcgtggacgtgataaaaaggaaacacttctgcactgctggtgggaatgtaaaccagtacaaccactatggaaaacactgcgtcctctcctgctccggccctgcatctggtgcacagccgctctaccgcatggctcaacccccctcccctcccaacatggcggcaggcatccctcctgctgcaaggatttcctccagcatcacctccccactcctgaagccctcgtggctgcacctgctcgcccaccccgtgctccaggcccatctgacggaggagggcctgggccgctcacaccatgttcaacgtggccagtgcctggtcagcaagtctgttttcacgaatgcttgctgggaaatgcaaaacgtgaaaaggtttactgacttcattccattacataaaaacacccgaggtcccgaacctctgtgtagaaggaggaaccaggctccaaatatggcctgcatgcagcagcactggcagcggcggaacatgctggaaagctccgcctcagccaccgaggccgcccacctcgtcttcaccctcacagctccgcctcagccaccgaggccgcccacctcgtcttcaccctcacagctccgcctcagccaccgaggcggcccacctcggtcttcaccctcagagctctgcccgaggcaccagggccgcccacctcgtcttcaccctcagagctccacctcagccacggaggccgcccacctcgtcttcaccctcacacgccgctacagtcacagccaccgaggccgcccacctcgtcttcaccctcacacgtccgcctcagccaccgaagccgcccacctcgtcttcaccctcacagctccgcctcagtcaccgaggccgcccacctcgtcttcaccctcacagctccgcctcagccaccgaggccgcccacctcgtcttcaccctcacagctccgcctcagccaccgaggccgcccacctcgtcttcaccctcacagctccgctacagtcacagccaccgaggccgcccacctcgtcttcacggcagcccagtgcagcacggctccttctctgcggcccttggtgcctctcccattcgcatcctgcatccttacagcaaggcttgtcctggcagctggtgtcatctgcacaccccctgctcccaccttctgctgaagccttgacctttccaagtgtggcccagggaccctcagcctcagcattgcccgttcagaatgcagagtgccaggcccaccctggagctcaggaacggggtctgggtgcagacaggactcagtggctgtggtgcctggaagccagcagcttggctgtgagagcctctgacatcccaggtccatgcccgctggtgccgtcccgtcccactgctcttcccaaaacgctgagctctactcccagctctgtcaaactcgagtccccctggaagctccagccccaagacaactctgagagaattcctgcagctgcctgggctggactaagcatgcctgcccatgccccagtgacccttcactctttagtccatcatggcccgaccctgtctcagaacaattaccccggaatcaccagggtgaggacttcattggtacataataaaatgaaggcagaaataaagatgttctttgaaaccaacgagaacaaagacacaacataccagaatctctgggacacattcaaagcagtgtgtagagggaaatttaccgcactaaatgcccacaaaagaaagcaggaaagatccaaaatcaacaccctaatgtcacaattaaaacaactagaaaagcaagagcgaacacattcaaaagctagcagaaggcaagaaataactaaaatcagagcagaactgaaggaaatagagacacaaaaaacccttcaaaaaattaatgaatccaggagctggttttttgaaaagatcaacaaaatagatagactgctagcaagactaataaagaagaaaagagagaagaatcaaatagatgcaataaaaaaagataaaggggatatcaccaccgatcccacagaaatacaaactaccatcagagaatactacaaacacctctacgtatataaactagaaaatctagaagaaatggataaattcctcaacacatacactgtcccaagactaaaccaggaagaagttgactctctgaatagaccagtaacaggctctgaaattgtggcaataatcaatagcttaccaaccaaaaaaagtccaggaccaaatggattcacagccgaattctaccagaggcacaaggagaagctggtaacattccttctgaaactattccaatcaatagaaaaagatggaatcctcacaaactcattttatgaggccagcatcattctgataccaaagccgggcagagacacaaccgaaaaagagaattttacaccaatatccttgatgagcattgatgcaaaaatcctcaataaaatactggcaaaccgaatccagcagcacatcaaaaagcttatccaccatgatcaagtgggcttcatccctgggatgcaaggatggttcaacatatgcaaatcaataaatgtaatccagcatataaacagaaccaaagacaaaaaccacatgattatctcaatagatgcagaaaaggcctttgacaaaattcaacaaccttcatgctaa

SEQ ID NO: 21570 - DNA, 507 bp, Homo sapiens
ctgattacgagattctatcgtccgtcccgtacatcgttttgtctgggctgaccacggggagaccctgcttattacccctgcgactcaactcgcattcagcttaaataatccgcactgttaccttctgcacatggtccaacttctttaaggaagcaaggtgtcaccctgttcagattcttcctccagagttgcttttctagatgcccaagaaaatatgtcctcctctgtgttacctgtggactgtaaaagcctgggaaacaacattccatgctgaagtttgagctgctcgagaatgcgactagtgtgcttctgatgcgtggagttggagttcgtggaaaaaatgggaccgtcagctctgagggcagcatgtcttcctcactgtctgtgagtctcctgcaagaagcaccatgcgtggatggcaccggtgtctggcggagtgaataagcgaggtacgcagtgtctgtgggcgtccttgtcgatctccgggtcgcgacatggagttgtaga

SEQ ID NO: 21571 - DNA, 1840 bp, Homo sapiens
  SIMILAR (1432)..(1500): 951254mologous to Homo sapiens discs, large (Drosophila) homolog-associated protein 2,accession number AF119818,Smith- Waterman Score=116.
atggtcttcaagatctctgctcgcgtcccgtgctctgccaaaatgctgcatggacatgtttctcacctcatcttcagaaccacccttggcacaaacagcatgatgaccatcctacagataaggaaaccaaggctttcattacttgccccagatcataagagccagagcctggacttgagcaagtcaagcctgcatattacggcagatggaaagctgtgcagtctgcgtgttcaaagagcatttgcaaaaggcagccaagacaggcagctgcagtcagtgactatgatgtccagagatcaccccaggctgactcttgtcctgcaaatagtggggcatgcagggggcatcaaaggggacctggattcagggtggcctgggaaacaacattccatgctgaagtttgagctgctcgagaatgcgactagtgtgcttctgatgcgtggagttggagttcgtggaaaaaatgggaccgtcagctctgagggcagcatgtcttcctcactgtctaggcttcgggccgctccccctgaccccggaggcttcgggccgctccccctgacctcggaggcttcaggctgctcccccgatcccggaggcttccggctgctccccctgatctcagaggctgtttcagaaagcaccttccccggctccatgctcatggcgacgcagccgattttgcgtgaagacctgtgtgctacccatgggaggccaataaggagaagggctgtgtacgaccacggagagctgcgggacatgcatccctggatgagaatgaagcaacggaatgggacagttagagggacggaccccagggaagacccagagacacacctgaacgtgtgtgggagccgcgagggtcctggtgaagtttcccagattctgaacgttggtttaatggtgaaggcttcacattctaatcctcctgtaagcaaaggtgtccatcagctaggaaaacgtcctatcggcaatgaaaagaagatgcagattgcagacgctcatcgtctcgcaggcagctccagctcgagtggtggccgtgctgggtctgtgcccggggccttccccccgcgtgtccatctgcaaagcacacgacagcccctgcggccactgggtgccggcgcccagcctgtcccgagagcctctgacagccaaggattggcccaggtgtggctgatggatgaaacaagactgccactccccacaccactcactgtggctggtgtcgggcagagcctccctgagatccagctgtgtctacactgcctctgcagccaggtagaaaccaaggcagcctggagagtcggcacctggtttcctgggcaaagcctccctgagatccagctgtgtctgcactgcctctgcagccagggaatgactgcagtctacaccagaaacgcattaaagagtgactttgtttctgtctttgcagaggaagaagctggagacttggtccagccgggcatcagctttccggggccggcagaggaggatctagggccctgcgagaggctgccacgacacactttccccgatgctggttcaaatcacgtggaaatttcatttctgagctgccaccagcacagcaaagctggtgccatatttgccatcagtcttttgacatggagctatgcttacaagaacaaggcccaatgcttctgttaaagatgtgaaatgttgaatacatctgacatcaaactgttgaataaaatcaacgtcaaaccacagctgaagacggaagccccatcagtggctctgtctgtggttattctctaacctaaaagaggtttgatgctgtctgtggttattctctaacctaaaagattgtcagcctctttgtcca

SEQ ID NO: 21572 - DNA, 929 bp, Homo sapiens
  SIMILAR (457)..(678): 351254mologous to Human adenovirus type 5 mRNA 5 second reading frame (part 1),accession number X02996,Smith-Waterman Score =80.
atctaacacttgggtggggggggtgggggcaaatgtgagatgtgcctcaaagcctgtccatgaatattggaaacccacatatgtgtgtgaatacatgcctagagtctgaacatgcaatcatatttatatttggggcatatatgccaaaatggtgacaaagatgtgtgtacgcacatgtgtcatcattctgataccccataaataacatgtttacatgcacatgtaacgtggtgccaaattctcccttatctgatgctccctgcccccctcctcaggccactccccacaccactcactgtggctggtgtcgggcagagcctccctgagatccagctgagtgtgacactgcctctgcagccaggtagaaaccaaggcagcctggagagtcggcacctggtttcctgggcagagcctccctgagatccagctgtgtgtgcactgcctctgcagccaggtataaaccataggcagcctggagagtcggcacctggtttcctgggcagagcctccctgagatccagctgtgtctgcactgcctctgcagcctggtagaaaccaaggcagcctggagagtcggcacctggtttcctgggcagagcctccctgagatccagctgtgtctgcactgcctctgcagcctggtagaaaccaaggcagcctggagagtcggcacctggtttcctgggcagagcccactgggaggagagctacgggatgatgctcagtccagctcctcagggaccagttaaatcaagtgacaagcttgtctgtctccccagttccctgttgccccacacatggagggaagacagtgctcagtgaccccaagaccttttacagccacatgctgatgtcattctaagaaagtgatgtctgcttttgtgttagcacagatcgaccaatggagaatcaatgccagtgccttgggt

SEQ ID NO: 21573 - DNA, 1170 bp, Homo sapiens
  SIMILAR (534)..(554): 1001254mologous to Escherichia coli K12 putative regulator,accession number AE000420,Smith-Waterman Score=41.
atgccatggctttccacaggcgctgctgcgttaatcacggccttagccgtagtggaactaaacgacgatgatgatcatcatcatcgcaacaattctccactcccaccgacaccccctgatgatgaatcagacgacactccagttcccccaactcctggcggagatgagataataccggacgatccggatgatacgcctacacctcccaaaccggtttcgtttaataatgacgttattctcgataaaacagaaaaaacgttaactattcgcgattcagtttttacttataccgagaatgctgacgggactatatctctgcaagatagcaatggtcgtaaggcaacgattaatctttggcagattgatgaagcgaataacactgttgcccttgaagggggcaacacctcagcctgcaggcaggcactgaagataccaaagggtagttcagattacacggtcacctggaaagggggccattttactttttatcgccgctggcggtgcaaagttcacaaagttgtcttcgaaggttcaccacccgttaccatctgccggtatgtacttaaccgcaagaatagctggcatgtcgcgcatatttttcgtcgccatgcgaagccggaagaacaggctcccatttattcccatatccatttcaccagcgatctcgacgaagtactaaacgatcccgatgttaagctggttgttgtctgcacccacgcggacagccatttcgagtacgcgaaacgcgcgctggaagccgggaaaaatgtgctggtcgaaaaaccgttcactccgacacttgcgcaggcgaaagagctgtttgcgttggcgaaaagcaaagggctgaccgtcacgccgtatcagaatcgtcgctttgactcctgcttcctgacagcgaaaaaagcgattgaaagtggcaagttgggagagattgttgaagtggaaagccattttgactattaccgcccggtggcagaaaccaaacctgggctgccgcaggatggcgcgttttatggccttggcgcactgtttaccaaccagcagggcttttttaaatcatctttgctgtcgatatttgcggattccagcagcagcgttgccggacgatccccacacaatctggtgaaaaagcgcggtgggattgtcgcgataagcgccttcgcaggttag

SEQ ID NO: 21574 - DNA, 1118 bp, Homo sapiens
  SIMILAR (627)..(1061): 971254mologous to Escherichia coli dicarboxylate membrane transporter protein,accession number X79886,Smith-Waterman Score= 696.
atgccgggcgaaccgggattcgcagcggatgattcggtcggtgtgctggagtatgtcaatgacgagggcgtgacggtcagagaagagatgaagccggagatgggcgattacgggcgcgtttatgatgcgttgtatcaaaccatcacccacggtgcgccaaattacgtcaaggaatctgaagttcttaccaatctggaaatccttgaacgcggatttgagcaagcctctccctccacagtaactctcgctaagcagatcgggtccacactaagcccatcgaaatcattcagggggcgaatacaaatgatctacttacgcaaagcaaatgaacgtggtcatgcaaatcatggctggctggactcctggcatactttctcttttgccaactattacgatccgaactttatgggcttctccgcgctgcgcgtgattaacgacgacgtgattgaagcagggcagggcttcggcactcacccgcataaagatatggaaattttgacctacgtgctggaaggtactgttgagcatcaggacagcatgggcaataaagagcaggttccggcgggtgagttccagattatgagtgcggtcggctatcgtcctcaagtaaaccaggcgaccggcgttgcttgttcattcgaaagggtggtatcgcgctgggtttattaggcggtatcggtctggtcattctggtcttcgtcttccaccttcagccaggtaaaccaccagttgatgtcatgctggttatcattgcggtggtggcggcatcggcgaccttgcaagcttcgggcggtcttgatgtcatgctgcaaattgccgagaagctgctgcgccgcaacccgaaatatgtctcaattgtcgcgccgtttgtgacctgtacactgaccattctttgcggtacgggtcatgtggtttacaccattctgccgatcatctacgacgtcgccattaagaacaacatccgtccggaacgtccgatggcggcaagttctatcggtgcacagatggggattatcgccagtccggtgtcggttgcggtcgtgtctctggttgcgatgctggccagggagttcttgtcagagctatcagctctgatttctaagcagaagtttctgtag

SEQ ID NO: 21575 - DNA, 1519 bp, Homo sapiens
  SIMILAR (873)..(1304): 921254mologous to Escherichia coli K12 putative regulator,accession number AE000420,Smith-Waterman Score=668.
atgcgtgtatatatggacgggcggttaattgtttcgacccgacaacgcaaagtgctggctgctggtccgatgttgtatgctgctacacgtgcacctgcgtttaccatgtctggtgacaacctagtacgtagccatgctagcatatacatgacatcgtgccacacgctgctgggtgagcaggctggttatgctgtatttggtgcgctacttcctgctatcactctgctacacttgaactctgcttgctgcatcgtgtacgtatcgtgcttgctggctgatgctggtcatcgagactcacttcaacaggctggcgataaatggaccacaacggactcttattctagcagctgtacttcagagacgctcgggagtgcttgtgttcgttatgcgcactccagtaggaaccacgtccgctttgcgctaagcgatctcgacgaagtactaaacgatcccgatgttaagctggttgttgtctgcacccacgcggacagccatttcgagtacgcgaaacgcgcgctggaagccgggaaaaatgtgctggtcgaaaaaccgttcactccgacacttgcgcaggcgaaagagctgtttgcgttggcgaaaagcaaagggctgaccgtcacgccgtatcagaatcgtcgctttgactcctgcttcctgacagcgaaaaaagcgattgaaagtggcaagttgggagagattgttgaagtggaaagccattttgactattaccgcccggtggcagaaaccaaacctgggctgccgcaggatggcgcgttttatggccttggtgtgcatacgatggaccagattatttctctgttcggtcgcccggatcacgttcgtttatgacatcccggagccctgcgtaataaaagcccaatctggacgaacccctttgaagcgcaactggttttatggggaacctgaaagccatcgtcaaaaccagccatctggtgaaaatcgattatccgaaatttatcgttcacggtaagaaaggttcgtttattaaatacggtatcgaccagcaggaaaccagcctgaaggctaatattatgccgggcgaaccgggattcgcagcggatgattcggtcggtgtgctggagtatgtcaatgacgagggcgtgacggtcagagaagagatgaagccggagatgggcgattacgggcgcgtttatgatgcgttgtatcaaaccatcacccacggtgcgccaaattacgtcaaggaatctgaagttcttaccaatctggaaatccttgaacgcggatttgagcaagcctctccctccacagtaactctcgctaagtaagtttgatggcccctcgaatagttcaatttttttgaacagaggggtcaattttcaccctctatcatcccaggcagatcgggtccacactaagcccatcgaaatcattcagggggcgaatacaaatgatctacttacgcaaagcaaatgaacgtggtcatgcaaatcatggctggctggactcctggcatactttctcttttgccaactattac

SEQ ID NO: 21576 - DNA, 706 bp, Homo sapiens
  SIMILAR (642)..(4): 1001254mologous to Escherichia coli genF peptide,accession number M27058,Smith-Waterman Score=1081.
ttataagaacccgtacatcgcggcgaagatccagccgaagacgcacgatacgctcacaccaatcaaccccggcagaataaagctgtggttgatgacgaagcgaccgatgtgggtggtgccggaacggtcaaactgaatcgctgccagatcgctcggataagtcggcaggatgtaataaccgtagcaagccggtgctgaagccacgatgtatgccggatcaacgccgatcgccagcgcgaccggaacaatcgccgccagcgccgcagcctgagagtttacaaacttggaaaccagcagcagaacaatggcataggcccacggatactctttcaccatttcacccagtacgccctgaatttcagacatatgcgcaccgaacatggtttctgccatccatgcgataccgtacaccgccacgatggcgatcataccggaacggaagacttcgttttttgagatagacgcgggattggttttggtcaggataataatcagcgccccggtcagcagcataaacatctgaataaccagtaccatcgacagcggtttgccgccgaaggatggacgcaggtccgaatcagcaccaagaagggcgactacagcgattgccccgaggaaaatccacattgccagccagttgctggtcgttatcattattcgctcgttggtcgggtgtcgaatgcgacgctggcgcgtcttatccgac

SEQ ID NO: 21577 - DNA, 1335 bp, Homo sapiens
  SIMILAR (360)..(136): 771254mologous to Escherichia coli 5,10-methylene- tetrahydrofolate dehydrogenase/5,10-methenyl-tetrahydrofolate cyclohydrolase,accession number D10588,Smith-Waterman Score=300.
ctaccaataagccagcaccggcagcgtgatatgccacagataatcggtgattatctgataccacggcagcgaatcaaaggactctagcggatccagggtaccgagcgagatcaacaggatgagtaacatggcgacattttccagacggttgatgccgacatcaatcacaattgcgccttctttgatccagtcaccgggaataaagcctggcttgccaacggcaacgatcaatagatcggcattttctacgtgatgacgcagatttttagtgaagcggtgagtcactgtagtggtgcaacccggtagcgtttcttcatcaccgccgccggtccacacgcgctggccgacgatgatcgcgtgcggtatgctggcaggtcgggacacgcctttgggcgattttcggagtttcttaagaattgcagcgccacgtacttgtcgttttcgctggcttctggatcgtgaagaatagccgcaacctgtttctggtgtgccgggcggagcataaaagaagcgtcgtgaaaggcttgctgcgccagcagggcgcagggcttctggttccactttcatgatggtttcgccgtcgaagtcggcaacgatcgcggcgaagatccagccgaagacgcacgatacgctcacaccaatcaaccccggcagaataaagctgtggttgatgacgaagcgaccgatgtgggtggtgccggaacggtcaaactgaatcgctgccagatcgctcggataagtcggcaggatgtaataacggcggaagcatggacctgcggcgatcatattaataatagtattcatcagatccaaagatgactctagagatccacggctaccgatctgcatttcctccctgtaggtcctatccagtctcactttgtttatggtcatgcgggtaagagtgcggcacagtttccgtttcgccgcagattcaggaactatatatgcatcccactcaacgtaagctgatgaagagaataattctgtttctgtcattactgttttgcatcgcctgtccagccattgctggacagatattgaccttgttgccaatgtaaaaaacagcacctggctgcacgtttcggcaaatctggtttcatcaacaaagaaggtacccgtcctgcggtggttatcccaaccaacgaagaactggttatcgcgcaagacgcgagccgcctgactgcctgatttgccgaaacgtgcagccaggttgcgttcatgatcaacttcaaagccaagcacgcccagtttgcccagagacagttcacgaaccattgcggcattttcaccgataccaccagtgaatacaacagcgtccagacgaccatccat

SEQ ID NO: 21578 - DNA, 516 bp, Homo sapiens
  SIMILAR (130)..(342): 751254mologous to Escherichia coli peptide chain release factor 1,accession number M11519,Smith-Waterman Score=255.
ttaggtaatcgtcacctccacaaagagcgactcgctgtataccgttggcatgctagctttatctgttcgggcaatacgatgcccattgtacttgttgtctttcacgccgtgtgctgctttgattttacgcagcaggtcagacgcgtcacggccaatgccttcagcggtaacttcgattgcctggatcctcccaacttcccgcaggggcgcgttaccgatcaccgcatcaacctgacgctctaccgcctggatgaagtgatggaaggtaagctggatatgctgattgaaccgattatccaggaacatcaggccgaccaactggcggcgttgtccgagcaggaataatggaatatcaacacgtgcaggcgataggtgagcaactgtttttatcctgaccagttcatccggcatttccccagctggaggccctggccccaggaactgtacctggcccaggacaggtaggacatcggagtccgagaacgaccagaaaatgtagggggttgcaaaggccat

SEQ ID NO: 21579 - DNA, 1293 bp, Homo sapiens; identical to SEQ ID NO: 18066
  SIMILAR (583)..(1239): 991254mologous to Escherichia coli K12 alkyl hydroperoxide reductase, F52a subunit; detoxification of hydroperoxides,accession number AE000166,Smith-Waterman Score=1111.

SEQ ID NO: 21580 - DNA, 1371 bp, Homo sapiens; identical to SEQ ID NO: 13716
  SIMILAR (778)..(1368): 941254mologous to Escherichia coli similar to phosphotransferase system enzyme II,accession number U00006,Smith- Waterman Score=927.

SEQ ID NO: 21581 - DNA, 1116 bp, Homo sapiens
  SIMILAR (64)..(354): 1001254mologous to Escherichia coli proton- glutamate,accession number M84805,Smith-Waterman Score=471.
ttagcaaagatggccgcatttcatcgcgcaagttgtatgcattgaccgggccatctggcaggaatcattctggtgctgacgctgatggtgacctcgaaagggattgctggcgtgcctggcgtgtcgtttgtggtgttgctggcaacgctgggtagcgtaggtattccgctggaaggtctggcgtttattgctggtgttgaccgtatcctcgacatggcgcgtactgcgctgaacgtggtgggtaatgcgctggcggtgctggtgattgccaagtgggaacacaaatttgaccgtaagaaagcgctggcttatgagcgtgaagtgctgggcaaatttgataaaactgcggatcaataattgaagattgccggggatatccacccggcaatgtgtgaatgcctgatgcgacgcttgccgcgtcttatcaggcgccgcatccgacatcaacgcctgatgcgacgcttgccgcgtcttatcaggcctacgccagacagcgcaatagcctgatttagcgtgattttgtaggtcggataaggcgtttatgccgcatccgacatcaacgcctgatgcgacgcgtaacgcatctattatgagaccctgattcatggaaggaacagcttgacgcagatgcatactttccgtggtgatcggcagttcgccgcaaatgtggctgaatctgcaaaacgcctggagtctggcagaggcagaaaaaacagtggatgtgtcgcgattacgccgtccgtgacggcgctgaagacgcacaagacgatctggtgccgtcaatccaggacgatggctgcgaaagcggcgcatgtaagatctgatattgagatgccggatgcggcgtaaacgccttatccggcctacggctcggtttgtaggcctgataagacgcgccagcgtcgcatcaggctccgggccggatgcagcgaccttatccggcctacggctcggatttagcataagacgcgccagcgtcatcagacaggatgcggcgtaaaatgccttatccgcattaaactcccacaggacacactcggcatataccacgtgacgatcagcaaaacattcgaagcgatcgacgctcttttctggcgtccgagaagtatccggcat

SEQ ID NO: 21582 - DNA, 2186 bp, Homo sapiens; identical to SEQ ID NO: 13186
  SIMILAR (1242)..(679): 981254mologous to Escherichia coli genF peptide,accession number M27058,Smith-Waterman Score=935.

SEQ ID NO: 21583 - DNA, 1851 bp, Homo sapiens
  SIMILAR (1851)..(1045): 1001254mologous to Escherichia coli ATP sulfurylase (ATP:sulfate adenyltransferase),accession number U29579,Smith- Waterman Score=1438.
tcaagaaccacccagttccctttcagcaacgtcaacgccgtcgaggtaatctttaaccagacgaaccgggttagacagtttgtctttcaggtagttaacaaccggcagcagagagaattcttcgttgtactcgccttcggtaggacgacccaggtgggaagttaccatcacttttgcgccttgtttcagggccagttcgatggtcggcagagaagcacggatacgcgcgtcgctggttactttcccgtcttttactggtacgttcagatccgcacggataaatacacgtttcccagcaagatccagatcggtcatcttaattacagacatggtgaatcctctcgttgattctaaaagttttgcagacgctgcttgcgtcttaccttgtgctgctttttgcagcaacaggttgacttcattggcttttacaggtttcttcaccgtcacgcttaaatcgattgccgtcacatttatggttggcacacgtaccgcaatcgcttcaaagcgatcgttaaattgcggaaaaaatcgtgtgataccggcggccagtttagtatcgaccggaatgatcgactggctggctgcccggttgcgacgcaggtcaggatggtatgcatcaataacctgttgatcgtgcatggcggagtgaattgtggtcacagtgccggactcaataccgtacgcatcatctaacaatttgatgacgggaattatgcaattcgtggtacaggaagcgttagaaacgatgcggtgttccgcacgaagttgatcctgattgacgccgtaaacaacggtcgcgtcgagatcgttactgccaggatgtgaaaagagcacttttttggccccggcggcaatatgcgcttcgccatgctcgcgggagccatatacgccggtgcagtcgaggactacatcaacgccaagttcacgccaggggagcgattgcagtgaacgttcatgcaatacgcggatggcgtcatcaccaacaaaaagttgatcgcgttcctgtcgtacttcccatgcaaatcggccatgggtcgtgtcagatccctgacgttttttcagctccatagaccccgcctggtcgcggtcaatcacgcggccctgacgttcactggtggtggaaaccagcatctcttcgatgatttccggcagtgtttgtgcatttgactccaccgcaccggtcagcggccagcagcccagcgtacggaaacgcaccatccgttttttaatcacttcgcccggttgcaggtcgatacggttgtcatcaatcatcatcaacataccgtcgcgttccagaaccggacgttccgcagcgagatatagcggaacaatgtcgatattttccagccagatgtattgccagatatcctgctcggtccagttagagagcgggaagacgcggatgctttcgcctttgttaatttgcccgttgtagttgtgccacagctccgggcgctgatttttcggatcccagcgatggaagcggtcacggaaagagtaaattcgctctttagcgcgggatttctcttcgtcacggcgcgcaccaccgaaggcggcatcaaaaccgtatttgttcagcgcctgtttcaggccttcagttttcataatatcggtatgtttcgcgctgccgtgcacgaatggattaatccccatcgccacgccttccgggtttttatgcaccagcagttcgcagccgtaggctttagcagtacgatcgcggaactcatacatctcgcggaatttccagccggtatcgacatgcagcaacgggaaaggcagcgtacctggataaaacgccttgcgcgccagatgcagcatgacgctggaatctttaccgatagagtagagcat

SEQ ID NO: 21584 - DNA, 3496 bp, Homo sapiens
  SIMILAR (1594)..(2442): 921254mologous to Escherichia coli porphobilinogen synthase,accession number D85613,Smith-Waterman Score=1315.
atgctggcggcttacgtcttcccaggcagaaatttatcgttaacagtagacgcagacccacaggcggaaattagcagcaaagaaacgctggcggagaatctgacatcattaacactttccaatggtgccagggttattctggcaaaatccgcgggtgaagagcaaaagctacaaattattgccgtatcgaataaaggcgatttaagtttccctgcgcagcaaaaatcacttatcgcgctggcaaataaagcagttagcggaagcggcgttggcgaactctcctcttccagcctgaaacgctggagtgcggaaaattcggtaaccatgagcagtaaagtcagtggcatgaatacgttgctctccgttagcgcgcggactaataaccctgaacctggttttcagttgattaaccagcgaatcacccacagcacgattaacgataatatttgggcatcgctacaaaatgctcaaattcaggcgttgaaaacgctcgaccagcgtccagcggagaaattcgcccagcagatgtatgagacgcgctatgctgatgaccgcacgaaattactgcaagaaaatcagattgcacagtttactgccgcagaggaaagcacaatggaagcattaggaatgatcgaaacccggggcctggttgcactgattgaggcttctgacgcgatggtgaaagctgcgcgcgtcaagctggttggtgttaagcagattggcggcggcctgtgtactgccatggttcgtggtgatgttgcagcctgtaaagccgcgaccgatgcaggtgccgcagcggcacagcgtatcggcgagctggtatctgtacacgttatcccgcgtccgcacggcgacctggaagaagtcttcccgatcggcctgaaaggcgatagcagcaacctggggagcttttacctgaaatacgccacggaggcgggtatgaaactggcagtcgtcactggacaaattgtttgtaccgtacgccatcacggactggcgcatgacaaattgctgatggtggaaatgattgatccacaaggtaatcctgacgggcaatgcgccgtcgccatcgacaatattggcgcgggaaccggggagtgggtgttactggtgagtggcagttccgcccgccaggcgcataaaagcgaaacgtcaccggtcgatctgtgcgtgattggcattgtcgatgaggtggtgtctggcggtcaggatattgaacaggtggtgaaagcggtactgctgaaaatgcaaagcagtgacacgccgtccgccgccgttcatgagatgggcgttttcgcgtccctggatgacgccgttgcggcagccaaagtcgcccagcaagggttaaaaagcgtggcaatgcgccagttagccattgctgccattcgtgaagcaggcgaaaaacacgccagagatttagcggaacttgccgtcagtgaaaccggcatggggcgcgttgaagataaatttgcaaaaaacgtcgctcaggcgcgcggcacaccaggcgttgagtgcctctctccgcaagtgctgactggcgacaacggcctgaccctaattgaaaacgcaccgtggggcgtggtggcttcggtgacgccttccactaacccggcggcaaccgtaattaacaacggtaccgagctacagaattcgtatcattgcgaatacatgccaggcgtgatgcgcattccagagaaacatctggcacgcgaaattgaacgcatcgccaacgccggtattcgttccgtgatgacttttggcatctctcaccataccgatgaaaccggcagcgatgcctggcgggaagatggactggtggcgcgtatgtcgcgcatctgcaagcagaccgtgccagaaatgatcgttatgtcagacacctgcttctgtgaatacacttctcacggtcactgcggtgtgctgtgcgagcatggcgtcgacaacgacgcgactctggaaaatttaggcaagcaagccgtggttgcagctgctgcaggtgcagacttcatcgccccttccgccgcgatggacggccaggtacaggcgattcgtcaggcgctggacgctgcgggatttaaagatacggcgattatgtcgtattcgaccaagttcgcctcctccttttatggcccgttccgtgaagctgccggaagcgcattaaaaggcgaccgcaaaagctatcagatgaacccaatgaaccgtcgtgaggcgattcgtgaatcactgctggatgaagcccagggcgcagactgcctgatggttaaacctgctggagcgtacctcgacatcgtgcgtgagctgcgtgaacgtactgaattgccgattggcgcgtatcaggtgagcggtgagtatgcgatgattaagttcgccgcgctggcgggtgctatagatgaagagaaagtcgtgctcgaaagcttaggttcgattaagcgtgcggggggcgaggggaccgtccactctcgtattaccccgcccgataaaacggtttatccccaaggatcgtcgcccgatgcattatccgtcgctgtggcagtcttcagacaatatgcgctacgcggtaaaaccgctgctcgcctgtttgatctgttacaccttttacagcggcgtggactgggaaggcattcacacctgtatgctgacatgcgtgatcgtcgctaacccaaatgtggggttgccgtacctagaacatggccgctgcgtttcgacggggccttttgcggagcgactctggcgctgcaatttacgctactggacatgccctggctggacaatattgtcgaattgctgtttgtgctggcaccgattttcctgttgggcgcatggattgccaccagctctgaacgctcttcttatatcggcacacagatggtggtcaccttcgcgctcgccacgctcgaaaacgtttttggcccagtgtacgacctggtggaaattcgcgatcgcgccctgggtatcatcattggtaccgtggtgtccgcggtgatttacacctttgtctggcctgaaagtgaagcgcgcacactgccgcaaaaactggctggcacgctgggtatgttaagtaaagtaatgcggatcccacgccagcaggaagtcacggctctgcgcacttatctgcaaattcgtatcggtctgcatgcggcgtttaatgcctgtgaagagatgtgccaacgcgtggcgctggagcgtcaactggacagcgaagaacgcgcattactgattgaacgttcgcaaacggttattcgtcagggccgcgatcttcttcacgcctgggattgccacctggaactcggcgcaggcgctgataaggtaccgagcagaattgtatcactatatggtgccggtgaaagaactgacgggaacggtcactttccgccatttgctgcgcttctcgcaaaaagggcaattcgttctgcctcctgctcgttatgtgcgttcctatgcacctgcgcagcaaagtgttgcggcagggagtgcatggaccgggatgcaggtgaaataa

SEQ ID NO: 21585 - DNA, 3202 bp, Homo sapiens
  SIMILAR (1804)..(1199): 971254mologous to Escherichia coli Alkyl hydroperoxide reductase F52a protein (EC 1.6.4.-) ,accession number D90701,Smith- Waterman Score=1013.
ttatatgtctttcttccgctctctgggcgagtctgaaaaggtaaatgtcgaagtactgacagaattctctttatgaatggcgtactcttccggcacatcgtggatcaatgctttacccagcaatgccatatcgcgcgcggtgctgaactgccccggcgcatccaggccgtgcaccgtctggaaggtagtgttggtcagacccagttttttggcataaccattcatcagaccaataaatgactcctggctcccggcaacgtaatcagccagcgcaatacaggcgtcattaccggactggataatcacacctttgttcaagtctgccaccgaaacctgatcgcccggtttgaggaacattaccgatgaaccacgcagtgccggatttcccgtcgcccaggcatctttaccgaccgtcaccatatcggtgagtttaatcttatcggccttaagcgcctgcccaaccacatagctggtcatgattttagtcaggctcgcgggatccagtttctcatccgcattgccttctgccagcactttaccgctggcgtaatccattaaaatccatgcacgcgcatccacgctcggcgcttcaacggtttgttccgccgcgaatgccgttggggcaaaaaggactacaaatgcagaacccgctttcaaaaaccaggcattcaaaaacggcgaattcatcgaaatcaccgaaaaagataccgaaggccgctggagcgtcttcttcttctacccggctgactttactttcgtatgcccgaccgaactgggtgacgttgctgaccactacgaagaactgcagaaactgggcgtagacgtatacgcagtatctaccgatactcacttcacccacaaagcatggcacagcagctctgaaaccatcgctaaaatcaaatatgcgatgatcggcgacccgactggcgccctgacccgtaacttcgacaacatgcgtgaagatgaaggtctggctgaccgtgcgaccttcgttgttgacccgcagggtatcatccaggcaatcgaagttaccgctgaaggcattggccgtgacgcgtctgacctgctgcgtaaaatcaaagcagcacagtacgtagcttctcacccaggtgaagtttgcccggctaaatggaaagaaggtgaagcaactctggctccgtctctggacctggttggtaaaatctaaatttccttcgtcttcgccagtggcgatgatgatctgcttgtacggaaccgtcgtacagtcacccgctgcgaacacgcctttcacgttggtttcgcatttcgcatcaatgataatctcgcccatgcggttacgttcgactgcgccttcgagccagttggtgttcggcagcagaccaatctggacgaaaataccggccagttcgatgttgtgaatatcgccgctgacacgatctcgatattccagaccaacgactttgctgccgtcgcctttcacttccgtggtttgcgcattcagaataatgtcgacgtttttcaggctgcgcagtttgtcctgcagaacctggtcggctttcatttctggcgcaaattccagcagcgttacgtgctcaacgatacccgccaggtcaattgccgcttccacgccggagttaccgccgccgataaccgctacgcgtttacctttaaacagcgggccgtcgcagtgcgggcagtaggtcacgcctttggtgcgatactgatcttcgcccggaacgttcatgttgcgccattttgcaccggtcgccacgataatgctgcgtgctttcagtaccgcgccagaagctgacttttcttcacttaaatcataggtcattgcatgccccccgattgtgaaaacgcctgggatattaatctcatcagctacagaatggataagatcactttcggggtataaatttatatcaaccaaaccttgcggatctacatttatgaccggattcaacggatactgataaaaattccatccccccttcagtccaatcggatcctgagtgatataccgccccagcagcgggtcataatagcggtggcggttgtaatacaggccggactcctcatcatactgctgacccggcaggcgaatgagctgctgcagatgatgcgggttctcatcactcagcaggttgccccattcatcatattctgcgcaccacgctgttgccccttccgtgctgatgagcgccagcggcaggccgcgatggtcgcagtggtacaggtggatttttcgcgccggcgtgtacaccgggtccatctggtttatcatctgctccacggtcaggccgcacgatgccagccagcggcggctttcctcactcacccggtcagccaggatttcactttccagccggtcgagcatctgcaccgtgccggcgggaatcccccactggtggtcctcatcagacaggagcgtaaagttaagcagctctttttccgcaaaacgggagagtttttcgggtttatcggtgctgatacccagcacatcaacgcccgcttttttcaactcatccatgttatcgcgtaagccgcaggcctgtacggtacagccgggggtcatggctttcgggtagaaataaaccagaacacgctgtccctggaagtcggtcaaattaacttgttctccgtcttgatccggcaagttaactccatcctgttcatcatgttgggaataattgacgacgttaatactgccttgtgcattgagttctgtacatagggctttgaacgcttgctcaatatttgctgcgtccgcagatgcggggctgtgggcggttatctgaatatgcaactgcgcagcccgttcattttcagcaggttgcgtgcgcgacaccagctccgcaatgttcatatgatgcgcgtcgaaaagtgctgtgaagcgttcaattaaatgcggggagtctgccacatcgacctgaacccagacagatgctggcattggcggacgcggacgcgccgtcgtgcgcttcatcacgattaaaagatccagttcggcacctttcaacggtaacgttgattcaatcagagtaatggcattccatgaaccggaaagcagcataataaagcgtgactcttctcccagcatatcgcccgctgtggtggagcacactgggccagtcactgatgaagcacggagaatggcaggaagcatcgctcgccttccgcgcagcgctgaaacaacgtccggacgcctacgattacgcat

SEQ ID NO: 21586 - DNA, 2964 bp, Homo sapiens
  SIMILAR (430)..(1017): 981254mologous to Escherichia coli lipopolysaccharide core biosynthesis protein,accession number M80599,Smith-Waterman Score= 1012.
atgcacgatcaacaggttattgatgcataccatcctgacctgcgtcgcacccgggcagccagccagtcgatcattccggtcgatactaaactggccgccggtatcacacgattttttccgcaatttaacgatcgctttgaagcgattgcggtacgtgtgccaaccataaatgtgacggcaatcgatttaagcgtgacggtgaagaaacctgtaaaaaccgatgtgggtggtgccggaacggtcaaactgaatcgctgccagatcgctcggataagtcggcaggatgtaataaccccacctggctgcgttttcgagaaggcgctgacgttattgatcgccagcggaagaaatgatacactagcacgtcaaaacaatcacacaaaagagtcgctagtggaaaagccatttcgaaaaatcctggtcataaagatgcgatatcatggggatatgttattaactactcctgtcatcagtacgctcaagcagaattatcctgatgcaaaaatcgatatgctgctttatcaggacaccatccctattttgtctgaaaacccggaaattaatgcgctctatgggataagcaataaaggtgcgggaactttcgataaaattaaaaatgtgctttcgttgataaaaactctgcgtgcgaataattatgacctggtcattaatcttacggatcagtggatggtggcgctgctggtacgttgtttacctgcacggatgaaaatatcgcaactttatggtcatcggcagcatggtatttggaaaaaaagcttcacacacttagcgccaatacacggtacacatattgttgagcgtaatttatcggtccttgagccattaggtattaccgatttctacaccgacacaacaatgagttacgccgaagattgctggaagaagatgcgccgggaattagatgccctgggcgtaaaagatcattatgtggtcatccaaccgacagcgcgtcagatatttaagtgtcgggataacgacataatttctaaggttatctgtatgatcagaggatcccctaccgaaggccgctggagcgtcttcttcttctacccggctgactttactttcgtatgcccgaccgaactgggtgacgttgctgaccactacgaagaactgcagaaactgggcgtagacgtatacgcagtatctaccgatactcacttcacccacaaagcatggcacagcagctctgaaaccatcgctaaaatcaaatatgcgatgatcggcgacccgactggcgccctgacccgtaacttcgacaacatgcgtgaagatgaaggtctggctgaccgtgcgaccttcgttgttgacccgcagggtatcatccaggcaatcgaagttaccgctgaaggcattggccgtgacgcgtctgacctgctgcgtaaaatcaaagcagcacagtacgtagcttctcacccaggtgaagtttgcccggctaaatggaaagaaggtgaagcaactctggctccgtctctggacctggtagccgcagaggccgcttgcatgatgatgtttaaagcccaggagataaacatgctcgacacaaatatgaaaactcaactcaaggcttaccttgagaaattgaccaagcctgttgagttaattgccacgctggatgacagcgctaaatcggacgaatccacggacctgctgggaattgtggcgcgcctgtgcgggttaagcgtctggatcctgattcgtattctgaaagatgagctgattctggcgtactccactgccagctctgaaagcgtgctgccgcgaattattgagaagatggaagcctacggagcaccggtgtcgatcaccagtttcgtggtgccgaccggttactcttttaaccttgatggttcgacgctgtatcaaagtattgccgctatcttcatcgcgcagttgtatggcattgacctgtccatctggcaggaaatcattctggtgctgacgctgatggtgacctcgaaagggattgctggcgtgcctggcgtgtcgtttgtggtgttgctggcaacgctgggtagcgtaggtattccgctggaaggtctggcgtttattgctggtgttgaccgtatcctcgacatggcgcgtactgcgctgaacgtggtgggtaatgcgctggcggtgctggtgattgccaagtgggaacacaaatttgaccgtcggataaggcgtttacgccgcatccgacatcaacgcctatgcacgctcccctttctttcggttgcggatcgcgcgccagcaccagcatatacgggtactctttcgcaccggttttttgtccgagattttactgcacgctactgcgatgcgtggcatgaagagcataaaagctggccgttaagtgaggaactgtacggtgttccttcaccgtgcattatttcaactaccgaagatgccgtatactggcaaccccagccgtttaccggggaacaaaatgtaaacgcggttgaacgcgcttttgatattgtgatacaacccacaattcataccttttatacgactcagtttgccggggatatgcacgcgcagtttggcgatatcaaactgacattgctgcaaacctggagtgaagacgacttccgtcgggtgcaggaaaatctgattggtcatctggtgactcagaaaaggctaaaactgccgcccacactatttatcgcgacgctggaagaagagttagaggtcatctcgggtaatattgtcgaattgctgtttgtgctggcaccgattttcctgttgggcgcatggattgccaccagctctgaacgctcttcttatatcggcacacagatggtggtcaccttcgcgctcgccacgctcgaaaacgtttttggcccagtgtacgacctggtggaaattcgcgatcgcgccctgggtatcatcatttatagagcagcggcgttaacggataacgtctggcggtggcaagcagtagctgcacgacaataa

SEQ ID NO: 21587 - DNA, 1272 bp, Homo sapiens; identical to SEQ ID NO: 20184
  SIMILAR (85)..(1086): 1001254mologous to Homo sapiens lactate dehydrogenase B (AA 1 - 334),accession number Y00711,Smith-Waterman Score=1702.

SEQ ID NO: 21588 - DNA, 1116 bp, Homo sapiens
  SIMILAR (420)..(548): 811254mologous to Cloning vector pEX100T levansucrase,accession number U17500,Smith-Waterman Score=175.
atgaacatgaacatcaaaaaaattgtaaaacaagccacagttctgacttttacgactgcacttctggcaggaggagcgactcaagccttcgcgaaggaaaatacccaaaaggcatccaaagaaccctggccgctgctaaacgctgtcggaacagtatctgaatactacggctatcacgttgtgtatgctcttgcgggaagcccgaaagacgctgatgtcacatcattctacatgttttatcaaaaggtcggcgacaactcaatcgacagctggaaaaacgcgggccgtgtctttaaagacagcgataagttcgacgccaacgatccgatcctgaaagatcagacgcaagaatggtccggttctgcaacctttacatctgacggaaaaatccgtttattctacactgactattccggtaaacattacggcaaacaaagcctgacaacagcgcagacaaaggccataaataccttgtattcgaagccaacacgggaacagaaaacggataccaaggcgaagaatctttatttaacaaagcgtactacggcggccggcacgaacttcttccgtaaagaaagccagaagcttcagcagagcgctaaaaaacgcgatgctgagttagcgaacggcgccctcggtatcatagagttaaataatgattacacattgaaaaaagtaatgaagccgctgatcacttcaaacacggtaactgatgaaatcgagcgcgcgaatgttttcaaaatgaacggcaaatggtacttgttcactgattcacgcggttcaaaaatgacgatcgatggtattaactcaaacgatatttacatgcttggttatgtatcaaactctttaaccggcccttacaagccgctgaacaaaacagggcttgtgctgcaaatgggtcttgatccaaacgatgtgacattcacttactctcacttcgcagtgccgcaagccaaaggcaacaatgtggttatcacaagctacatgacaaacagaggcttcttcgaggataaaaaggcaacatttgcgccaagcttcttaatgaacatcaaaggcaataaaacatccgttgtcaaaaacagcatcctggagcaaggacagctgacagtcaactaa

SEQ ID NO: 21589 - DNA, 927 bp, Homo sapiens; identical to SEQ ID NO: 19164
  SIMILAR (840)..(926): 1001254mologous to Methylomonas aminofaciens transposase,accession number AB026428,Smith-Waterman Score=155.

SEQ ID NO: 21590 - DNA, 2079 bp, Homo sapiens
  SIMILAR (235)..(1350): 941254mologous to Cloning vector pBACe3.6 levansucrase,accession number U80929,Smith-Waterman Score=1860.
atgaacatgaacatcaaaaaaattgtaaaacaagccacagttctgacttttacgactgcacttctggcaggaggagcgactcaagccttcgcgaaagaaaataaccaaaaagcatacaaagaaacatccctaaacagcagcaaaacgaaaaataccaagtgcctcaattcgatcaatcaacgattaaaaatattgagtctgcaaaaggacttgatgtgtgggacagctggcgctgaaaacgctgacggaacagtagctgaatacaacggctatcacgttgtgtttgctcttgcgggaacccgaaagacgctgatgacacatcaatctacatgttttatcaaaagctggaaaaacgcgggccgtgtctttaaagacagcgataagttcgacgccaacgatccgatcctgaaagatcagacgcaagaatggtccggttctgcaacctttacatctgacggaaaaatccgtttattctacactgactattccggtaaacattacggcaaacaaagcctgacaacagcgcaggtaaatgtgtcaaaatctgatgacacactcaaaatcaacggagtggaagatcacaaaacgatttttgacggagacggaaaaacatatcagaacgttcagcagtttatcgatgaaggcaattatacatccggcgacaaccatacgctgagagaccctcactacgttgaagacaaaggccataaataccttgtattcgaagccaacacgggaacagaaaacggataccaaggcgaagaatctttatttaacaaagcgtactacggcggcggcacgaacttcttccgtaaagaaagccagaagcttcagcagagcgctaaaaaacgcgatgctgagttagcgaacggcgccctcggtatcatagagttaaataatgattacacattgaaaaaagtaatgaagccgctgatcacttcaaacacggtaactgatgaaatcgagcgcgcgaatgttttcaaaatgaacggcaaatggtacttgttcactgattcacgcggttcaaaaatgacgatcgatggtattaactcaaacgatatttacatgcttggttatgtatcaaactctttaaccggcccttacaagccgctgaacaaaacagggcttgtgctgcaaatgggtcttgatccaaacgatgtgacattcacttactctcacttcgcagtgccgcaagccaaaggcaacaatgtggttatcacaagctacatgacaaacagaggcttcttcgaggataaaaaggcaacatttgcgccaagcttcttaatgaacatcaaaggcaataaaacatccgttgtcaaaaacagcatcctggagcaaggacagctgacatggctccaagtagcgaagcgagcaggactgggcggcggccaaagcggtcggacagtgctccgagaacgggtgcgcatagaaattgcatcaacgcatatagcgctagctgtggaatgtgtgtcagttagggtgtggaaagtccccaggctccccagcaggcagaagtatgcaaagcatgcatctcaattagtcagcaaccagaaatcggaggaagaagaatatatgaaaacatttaacatttctcaacaagatctagaattagtagaagtagcgacagagaagattacaatgctttatgaggataataaacatcatgtgggagcggcaattcgtacgaaaacaggagaaatcatttcggcagtacatattgaagcgtatataggacgagtaactgtttgtgcagaagccattgcgattggtagtgcagtttcgaatggacaaaaggattttgacacgattgtagctgttagacacccttattctgacgaagtagatagaagtattcgagtgattccaacctatggaactgatgaatgggagcagtggtggaatgcctttaatgaggaaaacctgttttgctcagaagaaatgccatctagtgatgatgaggctactgctgactctcaacattctactcctccaaaaaagaagagaaagtacatctacgtattagtcatcgctattaccatggtgatgcggttttggcagtacatcaatgggcgtggatag

SEQ ID NO: 21591 - DNA, 3963 bp, Homo sapiens
  SIMILAR (400)..(1023): 841254mologous to Cloning vector pBACe3.6 levansucrase,accession number U80929,Smith-Waterman Score=919.
tactctatagctacggttctggcagcggaggaaaagctagatcccagaagagatgaggcaaaacgcctgaggccgcagcgcaacttcaatatcacattcacccacgggacggtttttcgccctttgacgttggagtccacgttctttaatagtgcactcttgttcaccaccatcaaacaggaccttcccccactgcccaagaccatcatcactaacgcatttcaccgatttcggaaccaccatcaaacaggatttaagctgtctgcggcaaaccagcgtggaccgcttgctgcaactctctcagggccaggcggtgaaggacaatcagctgttgcccgtctcactggtgaaaagaaaaaccaccctggcgcccaatacgcaaaccgcctctccccgcgcgttggccgattcattaatgcagctggaacgacaggtttcccgactggaaagcgcgcaaggagcgactcaagcctcgcgaaagaaaataaccaaaaagcatacaaagaaacgtacggcgtctctcatattacacgccatgatatgctgcagatccctaaacagcagcaaaacgaaaaataccaagtgcctcaattcgatcaatcaacgattaaaaatattgagtctgcaaaaggacttgatgtgtgggacagctggccgctgcaaaacgctgacggaacagtagctgaatacaacggctatcacgttgtgtttgctcttgcgggaagcccgaaagacgctgatgacacatcaatctacatgttttatcaaaaggtcggcgacaactcaatcgacagctggaaaaacgcgggccgtgtctttaaagacagcgataagttcgacgccaacgatccgatcctgaaagatcagacgcaagaatggtccggttctgcaacctttacatctgacggaaaaatccgtttattctacactgactattccggtaaacattacggcaaacaaagcctgacaacagcgcaggtacacaataagccttccgaagatctccaaacttgttccctcaatcttggacacattctgcccattatcaagtttaatgatgacagcccggaagcgaggaaaataacccggcgctggagaataggtgaagcagcggatttagttggggtttcttctcaggctatcagagatgccgagaaagcagggcgactaccgcacccggatatggaaattcgaggacgggttgagcaacgtgttggttatacaattgaacaaattaatcatatgcgtgatgtgtttggtacgcgattgcgacgtgctgaagacgtatttccaccgtttaatgatgacagcccggaagcgaggaaaataacccgccgctggagaataggtgaagcagcggatttagttggggtttcttctcaggctatcagagatgccgagaaagcagggcgatctaccgccacccggatattggaaattcgaggacgggttgagcaacgtgttggttatacaattgaacaaattaatcatatgcgtgatgtgtttggtacgcgattgcgacgtgctgaagacgtatttccaccggtgatcggggttgctgcccataaggagttaaataatgattacacatcgaaaaaagtaatgaagccgctgatcacttcaaacacggtaactgatgaaatcgagcgcgcgaatgttctcaaaatgaacggcaaatggtacttgttcactgattcacgcggttcaaaaatgacgatcgatggtattaactcaaacgatatttacatgcttggttatgtatcaaactctttaaccggcccttacaagccgctgaacaaaacagggcttgtgctgcaaatggctcttgatccaaacgatgtgacattcacttactctcacttcgcagtgccgcagaccaaaggcaacaatgtggttatcacaagctacatgacaaacagaggcttcttcgaggataaaaaggcaacatttgcgccaagcttcttaatgaacatcaaaggcaataaaacatccgttgtcaaaaacagcatcctggagcaaggacagctgacatggctccaagtagcgaagcgagcaggactgggcggcggccaaagcggtcggacagtgctccgagaacgggtgcgcatagaaattgcatcaacgcatatagcgctagcagcacgccatagtgactggcgatgctgtcggaatggacgatatcccgcaagaggcccggcggtagcatgccagttccctgagaaaaacgactttcgcttctctggttttctgtctacgaagagtgactgccacatagtaggccctcaaccaatatttgctgaacataatcaagcagagggatgtagacttgaacacttttgctccacccccacccttgtgtccatgctcaattttcttggacgcaggacaaagaagccaggtactagttcagagaacaagaaactgctacattacggtgcattggcaaaactacaaccatatttcggtgcaggaagaagggatcatcagaagggtggacgcggatctgtcaacatgggtaaaggagaccccaacaagccgcggggcaaaatgtcctcgtacgccttcttcgtgcagacctgccgggaagagcacaagaagaaacacccggactcttccgtcaatttcgcggaattctccaagaagtgttcggagagatggaaggtattggagaaaagtaaatcccaaatgtcagtggacaatttttctctagttggaagactcctttgcaatcctagaagtaggtatggacagagggcactgggaatgccagtagggccaggcggtgaagggcaatcagctgttgcccgtctcactggtgaaaagaaaaaccaccctggcgcccaatacgcaaaccgcctctccccgcgcgttggccgattcattaatgcagctggcacgacaggtttcccgactggaaaagcgggcagtgagcgcaacgcaattaatggccaaggcggtgaaagggcaatcaagtcttttgcccgtttcattggtgaaaaagaaaaaccaccctggcgccctaatacgcaaaccgcctctccccgcgcgttggccgattctattaattcagctggcacgacaggtttcccgactggaaaccggtcagtgagcccaacgcaattaatgtttgtgtggaattggggagcggataaccaatttcacacaggaatcggctatgaccatgtttacgaatttcgagctcggtacccattcttatttggtctaagacaaggattttgccgatttcggaaccaccatcaaacaggattttcgcctgctggggcaaaccagcgtggaccgcttgctgcaactctctcagggccaggcggtgaagggcaatcagctgttgcccgtctcactggtgaaaagaaaaaccaccctggcgcccaatacgcaaaccgcctctccccgcgcgttggccgattcattaatgcagctggcacgacaggtttcccgactggaaagcgggcagtgagcgcaacgcaattaatggattttgccgatttcggaaccaccatcaaacaggattttcgcctgctggggcaaaccagcgtggaccgcttgctgcaactctctcagggccaggcggtgaagggcaatcagctgttgcccgtctcactggtgaaaagaaaaaccaccctggcgcccaatacgcaaaccgcctctccccgcgcgttggccgattcattaatgcagctggcacgacaggtttcccgactggaaagcgggcaacgacgggatttagtaccgcctggggccaaacaccagcttgggcagcaaaacaaaggcgcctccattccagaagagctgccgggctgcaagaaaactactctgggccctcagtgcgacggtcccctttgtttcgtgtcccggtcgcagaggagaaggaagagggaagactgcgcgggagagacgcaggcagcggggggatcctctagagtcgacctgcaggcatgcaagtaa

SEQ ID NO: 21592 - DNA, 1611 bp, Homo sapiens; identical to SEQ ID NO: 2241
  SIMILAR (475)..(1608): 1001254mologous to Methylomonas aminofaciens transposase,accession number AB026428,Smith-Waterman Score=1980.

SEQ ID NO: 21593 - DNA, 3288 bp, Homo sapiens
  SIMILAR (1870)..(3285): 991254mologous to Cloning vector pBACe3.6 levansucrase,accession number U80929,Smith-Waterman Score=2463.
atggggcgggggccgcccgcagggccgggcggggctgtgctgccatctggagccgctgccgccggcggccactgtcagggcgcgagcggctggagcgcacgcagggctggagcgagtgcagccgccgccgccgccgacaccgcggcacatgggccggccccgccgctgccgtcgcccctagccccagcagccctggtctcgcagcctcctgcggctctggtcgcccgaccagccatgtctctcggcggagcctccgagcgcagcgtcccggccaccaagattgaaattaccgtgtcctgccggaacctgctagaccttgataccttctccaagtccgaccccatggtggtgctttacacgcagagccgggccagccatgagtggcgggagttcggacggaccgaggtgattgataacacgctgaacccagacttcgtgcgcaaattcgtcctcgactatttctttgaggaaaagcaaaatctgcgcttcgatgtgtacaacgtggactccaaaaccaacatctccaaaccggctttgcagaactttcagcggtataccggcatacagcatgtgcatcgcataggaatggcggaacgtatgtggtgtgaccggaacagagaacgtcacaccgtcagcagcagcggcggcaaccgcctccccaatccagaacattttgaggcatttcagtcagttgctcaatgtacctataaccagaccgttcagctggatattacggcctttttaaagaccgtaaagaaaaataagcacaagttttatccggcctttattcacattcttgcccgcctgatgaatgctcatccggagttccgtatggcaatgaaagacgtttctacacaatatattcgcaagaatgtgggcgtggtacgggtgaaaaacctggcctatttccctaaagggtttattgagaatatgtttttcgtctcagccaatccctgggttgagcgcattgagaagagatgtctggagctgtttggccgagactactgtttcagcgtgattccaaacacgaatggggatatctgtggccactatccccggcacatcgtgttcctggagtatgagagttctgagaaggagaaagacacgacacagctgaacttcacagtagccattgacttcacggcttccaatggtgagacacggatgagtgaaaaagtcggagggaatcctctgcagcctacctccctgcactacatgagtccctaccagctcagcgtctatgccatggccctcaaggcaaacaacaatgatgaggaccccaactgtgcgggcatcgagggtgtgctggagagctatttccagagcctgcgcacagtgcagctctatgggcccacctactttgctcctgtcatcaaccaagtggccagcaattcctggagctctgtgactctaggtactgactcagagcctgctgtggaggtgcctcaatatgtgggcatccggctcctggtagagggcttcaccatcaagaagcccatggcgatgtgtcatcggcggatgggggtccgcccagcagtccctctgctgacccagcgaggctctggggaaggcaaggactcggggacccctacccacagcctccacaccaaggcccagctgccttctccccatgtactccgacaccagggccaggtcctcagacgacagcacagcaagctggtgggcactaaggccctgtcgaccacaggcaaggccttgaggactctacccacggctaaggtcttcatttccctcccaccgaaccttgatttcaaggtggcacccagcatcctgaagccaagaaagtcaattcgggaggatcgaaacggcagatcgcaaaaaacagtacatacagaaggagacatgaacatgaacatcaaaaaaattgtaaaacaagccacagttctgacttttacgactgcacttctggcaggaggagcgactcaagccttcgcgaaagaaaataaccaaaaagcatacaaagaaacgtacggcgtctctcatattacacgccatgatatgctgcagatccctaaacagcagcaaaacgaaaaataccaagtgcctcaattcgatcaatcaacgattaaaaatattgagtctgcaaaaggacttgatgtgtgggacagctggccgctgcaaaacgctgacggaacagtagctgaatacaacggctatcacgttgtgtttgctcttgcgggaagcccgaaagacgctgatgacacatcaatctacatgttttatcaaaaggtcggcgacaactcaatcgacagctggaaaaacgcgggccgtgtctttaaagacagcgataagttcgacgccaacgatccgatcctgaaagatcagacgcaagaatggtccggttctgcaacctttacatctgacggaaaaatccgtttattctacactgactattccggtaaacattacggcaaacaaagcctgacaacagcgcaggtaaatgtgtcaaaatctgatgacacactcaaaatcaaccgagtggaagatcacaaaacgatttttgacggagacggaaaaacatatcagaacgttcagcagtttatcgatgaaggcaattatacatccggcgacaaccatacgctgagagaccctcactacgttgaagacaaaggccataaataccttgtattcgaagccaacacgggaacagaaaacggataccaaggcgaagaatctttatttaacaaagcgtactacggcggcggcacgaacttcttccgtaaagaaagccagaagcttcagcagagcgctaaaaaacgcgatgctgagttagcgaacggcgccctcggtatcatagagttaaataatgattacacattgaaaaaagtaatgaagccgctgatcacttcaaacacggtaactgatgaaatcgagcgcgcgaatgttttcaaaatgaacggcaaatggtacttgttcactgattcacgcggttcaaaaatgacgatcgatggtattaactcaaacgatatttacatgcttggttatgtatcaaactctttaaccggcccttacaagccgctgaacaaaacagggcttgtgctgcaaatgggtcttgatccaaacgatgtgacattcacttactctcacttcgcagtgccgcaagccaaaggcaacaatgtggttatcacaagctacatgacaaacagaggcttcttcgaggataaaaaggcaacatttgcgccaagcttcttaatgaacatcaaaggcaataaaacatccgttgtcaaaaacagcatcctggagccaggacagttggcagtcaactaa

SEQ ID NO: 21594 - DNA, 1477 bp, Homo sapiens
  SIMILAR (230)..(1195): 741254mologous to Cloning vector pSacBII SacB,accession number U09128,Smith-Waterman Score=1249.
  misc_feature (1)...(1477): n = a,t,c or g
acaggaagctacagacgtagaaaccaaggcagtgagtgaagtctgtctggtggcagaggaggaggaaggaggcagcccgaaagacgctgatgacacatcaatctacatgttttatcaaaaggtcggcgacaactcaatcgacagctggaaaaacgcgggccgtgtctttaaagacagcgataagttcgacgccaacgatccggggctgaaagatcagacgcaagaatggtccggttctgcaacctttacatctgacggaaaaatccgtttattctacactgactattccggtaaacattacggcaaacaaagcctgacaacagcgcaggaggctaggcagaaaatacttgacccaatcttggctaaatctctgattgggactctagaggatccccggccgctgcaaaacgctgacggaacagtagctgaatacaacggctatcacgttgtgtttgctcttgcgggaagcccgaaagacgctgatgacacatcaatctacatgttttatcaaaaggtcggcgacaactcaatcgacagctggaaaaacgcgggccgtgtctttaaagacagcgataagttcgacgccaacgatccgatcctgaaagatcagacgcaagaatggtccggttctgcaacctttacatctgacggaaaaatccgtttattctacactgactattccggtaaacattacggcaaacaaagcctgacaacagcgcaggtaaatgtgtcaaaatctgatgacacactcaaaatcaacggagtggaagatcacaaaacgatttttgacggagacggaaaaacatatcagaacgttcagcagtttatcgatgaaggcaattatacatccggcgacaaccatacgctgagagaccctcactacgttgaagacaaaggccataaataccttgtattcgaagccaacacgggaacagaaaacggataccaaggcgaagaatctttatttaacaaagcgtactacggcggcggcacgaacttcttccgtaaagaaagccagaagcttcagcagagcgctanaaaacgcgatgctgagttagcgaacggcgccctcggtatcatagagttaaatatgattaccattgaaaaagtatttattcgcgataagctcatggagcggcgtaaccgtcgcacaggaaggacagagaaagcgcggatctgggaagtgacggacagaacggtcaggacctggattggggaggcggttgccgccgctgctgctgacggtgtgacgttctctgttccggtcacaccacatacgttccgccattcctatgcgatgcacatgctgtatgccggtataccgctgaaagttctgcaaagcctgatgggacataagtccatcagttcaacggaagtctacacgaaggtttttgcgctggatgtggctgcccggcaccgggtgcagtttgcgatgccggagtctgatgcggttgcgatgctgaaacaattatcctga

SEQ ID NO: 21595 - DNA, 1266 bp, Homo sapiens
  SIMILAR (196)..(1263): 781254mologous to Cloning vector pBACe3.6 levansucrase,accession number U80929,Smith-Waterman Score=1368.
  misc_feature (1)...(1266): n = a,t,c or g
atgaacatcaaaaaatttgtaaacgcagccccagttctgatttnacgactgcacttcgggcagaaggagcgactcaagcccttcgggaaagaaaatacccaaaaagcagacaaagaaacgtacggcgtctctcaaataacacgccatgataggcagcagacccctaaacagcagcaaaacgaaaaacaccaagacggcgacaactcaatcgacagctggaaaaacgcgggccgtgtctttaaagacagcgataagttcgacgccaacgatccgatcctgaaagatcagacgcaagaatggtccggttctgcccccttacatctgacggaaaaatccgtttattctacactgactattccgaaccggtttacgcagtttcggcttagtgaaacaaaagaaatccccaatccgtatgccatgcgtttatacgaatccctgtgtcagtatcgtaagccggatggctcaggcatcgtctctctgaaaatcgactggatcatagagcgttaccagctgcctcaaagttaccagcgtatgcctgacttccgccgccgcttcctgcagttctncgccaaccatacgctgagagaccctcactacgttgaagacaaaggccataaatactttgtattcgaagccaacacgggaacagaaaacggataccaaggcgaagaatctttatttaacaaagcgtactacggcggcggcacgaacttcttccgtaaagaaagccagaagcttcagcagagcgctaaaaaacgcgatgctgagttagcgaacggcgccctcggtatcatagagttaaataatgattacacattgaaaaaagtaatgaagccgctgatcacttcaaacacggtaactgatgaaatcgagcgcgcgaatgttttcaaaatgaacggcaaatggtacttgttcactgattcacgcggttcaaaaatgacgatcgatggtattaactcaaacgatatttacatgcttggttatgtatcaaactctttaaccggcccttacaagccgctgaacaaaacagggcttgtgctgcaaatgggtcttgatccaaacgatgtgacattcacttactctcacttcgcagtgccgcaagccaaaggcaacaatgtggttatcacaagctacatgacaaacagaggcttcttcgaggataaaaaggcaacatttgcgccaagcttcttaatgaacatcaaaggcaataaaacatccgttgtcaaaaacagcatcctggagcaaggacagctgacagtcaactaa

SEQ ID NO: 21596 - DNA, 1690 bp, Homo sapiens
  SIMILAR (272)..(1687): 991254mologous to Cloning vector pBACe3.6 levansucrase,accession number U80929,Smith-Waterman Score=2463.
cctccacaccaaggcccagctgccttctccccatgtactccgacaccagggccaggtcctcagacgacagcacagcaagctggtgggcactaaggccctgtcgaccacaggcaaggccttgaggactctacccacggctaaggtcttcatttccctcccaccgaaccttgatttcaaggtggcacccagcatcctgaagccaagaaagtcaattcgggaggatcgaaacggcagatcgcaaaaaacagtacatacagaaggagacatgaacatgaacatcaaaaaaattgtaaaacaagccacagttctgacttttacgactgcacttctggcaggaggagcgactcaagccttcgcgaaagaaaataaccaaaaagcatacaaagaaacgtacggcgtctctcatattacacgccatgatatgctgcagatccctaaacagcagcaaaacgaaaaataccaagtgcctcaattcgatcaatcaacgattaaaaatattgagtctgcaaaaggacttgatgtgtgggacagctggccgctgcaaaacgctgacggaacagtagctgaatacaacggctatcacgttgtgtttgctcttgcgggaagcccgaaagacgctgatgacacatcaatctacatgttttatcaaaaggtcggcgacaactcaatcgacagctggaaaaacgcgggccgtgtctttaaagacagcgataagttcgacgccaacgatccgatcctgaaagatcagacgcaagaatggtccggttctgcaacctttacatctgacggaaaaatccgtttattctacactgactattccggtaaacattacggcaaacaaagcctgacaacagcgcaggtaaatgtgtcaaaatctgatgacacactcaaaatcaaccgagtggaagatcacaaaacgatttttgacggagacggaaaaacatatcagaacgttcagcagtttatcgatgaaggcaattatacatccggcgacaaccatacgctgagagaccctcactacgttgaagacaaaggccataaataccttgtattcgaagccaacacgggaacagaaaacggataccaaggcgaagaatctttatttaacaaagcgtactacggcggcggcacgaacttcttccgtaaagaaagccagaagcttcagcagagcgctaaaaaacgcgatgctgagttagcgaacggcgccctcggtatcatagagttaaataatgattacacattgaaaaaagtaatgaagccgctgatcacttcaaacacggtaactgatgaaatcgagcgcgcgaatgttttcaaaatgaacggcaaatggtacttgttcactgattcacgcggttcaaaaatgacgatcgatggtattaactcaaacgatatttacatgcttggttatgtatcaaactctttaaccggcccttacaagccgctgaacaaaacagggcttgtgctgcaaatgggtcttgatccaaacgatgtgacattcacttactctcacttcgcagtgccgcaagccaaaggcaacaatgtggttatcacaagctacatgacaaacagaggcttcttcgaggataaaaaggcaacatttgcgccaagcttcttaatgaacatcaaaggcaataaaacatccgttgtcaaaaacagcatcctggagccaggacagttggcagtcaactaa

SEQ ID NO: 21597 - DNA, 3267 bp, Homo sapiens
  SIMILAR (1380)..(4): 981254mologous to Cloning vector pBACe3.6 levansucrase,accession number U80929,Smith-Waterman Score=2401.
ttagttgactgtcagctgtccttgctccaggatgctgtttttgacaacggatgttttattgcctttgatgttcattaagaagcttggcgcaaatgttgcctttttatcctcgaagaagcctctgtttgtcatgtagcttgtgataaccacattgttgcctttggcttgcggcactgcgaagtgagagtaagtgaatgtcacatcgtttggatcaagacccatttgcagcacaagccctgttttgttcagcggcttgtaagggccggttaaagagtttgatacataaccaagcatgtaaatatcgtttgagttaataccatcgatcgtcatttttgaaccgcgtgaatcagtgaacaagtaccatttgccgttcattttgaaaacattcgcgcgctcgatttcatcagttaccgtgtttgaagtgatcagcggcttcattacttttttcaatgtgtaatcattatttaactctatgataccgagggcgccgttcgctaactcagcatcgcgttttttagcgctctgctgaagcttctggctttctttacggaagaagttcgtgccgccgccgtagtacgctttgttaaataaagattcttcgccttggtatccgttttctgttcccgtgttggcttcgaatacaaggtatttatggcctttgtcttcaacgtagtgagggtctctcagcgtatggttgtcgccggatgtataattgccttcatcgataaactgctgaacgttctgatatgtttttccgtctccgtcaaaaatcgttttgtgatcttccactccgttgattttgagtgtgtcatcagattttgacacatttacctgcgctgttgtcaggctttgtttgccgtaatgtttaccggaatagtcagtgtagaataaacggatttttccgtcagatgtaaaggttgcagaaccggaccattcttgcgtctgatctttcaggatcggatcgttggcgtcgaacttatcgctgtctttaaagacacggcccgcgtttttccagctgtcgattgagttgtcgccgaccttttgataaaacatgtagattgatgtgtcatcagcgtctttcgggcttcccgcaagagcaaacacaacgtgatagccgttgtattcagctactgttccgtcagcgttttgcagcggccagctgtcccacacatcaagtccttttgcagactcaatatttttaatcgttgattgatcgaattgaggcacttggtatttttcgttttgctgctgtttagggatctgcagcatatcatggcgtgtaatatgagagacgccgtacgtttctttgtatgctttttggttattttctttcgcgaaggcttgagtcgctcctcctgtgatgattgccaatgtgacagtggcattgagctgctgttcctgcagatggatatggcaggtgtaggtcccagcctgggcctggctcacatcctctagtcgaagggtaaagtcgccattgtctccagtcaccaggaggtcagggcctcccccaggaggagtccacttggcagtgaggaaagaccgggtccccacaccagcaggcaggcggcagggcagccccaccctggaacctgctccagcgtacactgtcaagggagttgggggctccagacccagaacagtgaggttatacatgatggagacgttgaagccatctctgtaggtgaggatgcagccccagggcccagagtccatggggctgacttggggcaggaagaggaagctttccgctaagtggtgatggggggactcccggacagggactcggccctggccccggttccggaaccaatgcacagaggctgggcggtcagggcggctgaaggagcagttcaaaatgacccagtcggaggctctgagagatcctggggggctggcagtcactcccagcccttctcccatcgtcccgccccacatactcgaggcctggcccaggcgcagacggaggcggcaggagagggcgcggtccctgaggtgcaccgcggcgcggtactcgccggcgtccgcgcgccgggctgggcgcagccatagcgagaagtccccgcgctgccggccgcgctcatccagctggacgcggggctgcaggggcagcctcccgctgcgcaggcctccgggacccacgctcagcaccgtgtagcggcggggcctgggcccccaggaggagggcgccgccgggtgagggccgggggccaggggatggccgggggcggcagcgggcgggccactgggcgggaaagagaatggagttgagaagctccaggggtaggaagcccgggaggatgcaggcagccacccgttgaggatgagaaagcccgccccaagagttctcttgaccaccaaccgtcccctcacgcccgacccctctgttggactggccgcatccacttctgtctggctgatgctgccaagtgacccctgctcttcgcagaaggctgagatcgccgatgccccattttctgtcttctgccgtttgggatccgcttcatcctcctcttcggcagctctcttcagcgcgggcccttcatcatcctcttcttcttcttcctcatcttcttcttccccttcatcttcctcctctccatcctcggcagtttcttcttcttcctcctcagccccgttctcctcctcctccaccacttctttctttcgctctttccggcttgccttctcctccaccttctccttcttctccttcaggtccttggcgctcaactcggccgctgcctccacgcttttctccgacatggtgccggggccggggccggggctggcggggagccggggtcccggggccgagacggaggggccctggacggcggagggtggccgcggccggaacctggcgcggtggcggcggcggcggcgacagcggcagcggcggccgctcggcaagctgggtctctggaagaggcggcagaggcgcgcggggtggggcgggggtgggtctggagcggagacccgcagggctgcggccgtccggagggcgggcggaagggcggtgcaggcggtggccggcgcgctcggccgcggtagctcgatcccgggctcgccgcccccgcaccagcagagtgccgccgaccagccgtgccgcccccgggaagggaacccgcttataaggcggcgccttccataagggacctggcctcccacttctctaactgggaccaccagggttagcgtgggctgtgggccggactgtgggctgggcctcagggctggccggatcatgattgagtgtgttacctccat

SEQ ID NO: 21598 - DNA, 918 bp, Homo sapiens
  SIMILAR (918)..(61): 891254mologous to Plasmid R100 transposase of Tn10,accession number AP000342,Smith-Waterman Score=1313.
cttcattctgcggaggaggaaactgaggatcagagagaaaatgtgtttgcctgagcctcgatgtccaataagcaaaagagccaggactccctttctaatctttgattcctggtccagctcagtgaccaaaacactgtgtccttttttagagatcattaaagccacggtgtttcgatttctgactgtgttagcctggaagtgcttgtcccaaccttgtttctgagcatgaacgcccgcaagccaacatgttagttgaagcatcagggcgattagcagcatgatatcaaaacgctctgagctgctcgttcggctatggcgtaggcctagtccgtaggcaggacttttcaagtctcggaaggtttcttcaatctgcattcgcttcgaatagatattaacaagttgtttgggtgttcgaatttcaacaggtaagttagttgctagaatccatggctcctttgccgacgctgagtagattttatgtgacgggtggtgacaatgagtccgtgtcgagcgctgattttttcggcctttagagcgagatttatacaatagaatttggcatgagattggattgcttttagtcagcctcttatagcctaaagtctttgagtgactagatgacatatcatgtaagttgctgataggtttccagttttccgctcctaggtctgcatattgtacttttcctcttactcgacttaaccagtaccaacccagcttctcaacggatttataccatggcactttaaagccagcatcactgacaatgagcggtgtggtgttactcggtagaatgctcgcaaggtcggctagaaattggtcatgagctttctttgaacattgctctgaaagcgggaacgctttctcataaagagtaacagaacgaccgtgtagtgcgactgaagctcgcaataccat

SEQ ID NO: 21599 - DNA, 1174 bp, Homo sapiens; identical to SEQ ID NO: 19167
  SIMILAR (1)..(1032): 991254mologous to Methylomonas aminofaciens transposase,accession number AB026428,Smith-Waterman Score=1806.

SEQ ID NO: 21600 - DNA, 1284 bp, Homo sapiens
  SIMILAR (253)..(1281): 981254mologous to Cloning vector pBACe3.6 levansucrase,accession number U80929,Smith-Waterman Score=1765.
  misc_feature (1)...(1284): n = a,t,c or g
atgaggacaccactggaggagacagggctgcacatggtggcactgatgacagtcacggctgtggctgatcagaactttcagcggtataccggcatacagcatgtgcatcgcataggaatggcggaacgtatgtggtgtgaccggaacagagaacgtcacaccgtcagcagcagcggcgcaaccgcctccccaatccaggtcctgaccgttctgtccgtcacttcccagatccgcgctttctctgtccttcctgtcggcgacaactcaatcgacagctggaaaaacgcgggccgtgtctttaaagacagcgataagttcgacgccaacgatccgatcctgaaagatcagacgcaagaatggtccggttctgcaacctttacatctgacgtaaaaatccgtttattctacactgactattccggtaaacattactgcaaacaaagcctgacaacagcgcaggtaaatgtgtcaaaatctgatgacacactcaaaatcaacggagtggaagatcacaaaacgatttttgacggagacggaaaaacatatcagaacgttcagcagtttatcgatgaaggcaattatacatccggcgacaaccatacgctgagagaccctcactnacacaaaggccataaataccttgtattcgaagccaacacgggaacagaaaacggataccaaggcgaagaatctttatttaacaaagcgtactacggcggcggcacgaacttcttccgtaaagaaagccagaagcttcagcagagcgctaaaaaacgcgatgctgagttagcgaacggcgccctcggtatcatagagttaaataatgattacacattgaaaaaagtaatgaagccgctgatcacttcaaacacggtaactgatgaaatcgagcgcgcgaatgttttcaaaatgaacggcaaatggtacttgttcactgattcacgcggttcaaaaatgacgatcgatggtattaactcaaacgatatttacatgcttggttatgtatcaaactctttaaccggcccttacaagccgctgaacaaaacagggcttgtgctgcaaatgggtcttgatccaaacgatgtgacattcacttactctcacttcgcagtgccgcaagccaaaggcaacaatgtggttatcacaagctacatgacaaacagaggcttcttcgaggataaaaaggcaacatttgcgccaagcttcttaatgaacatcaaaggcaataaaacatccgttgtcaaaaacagcatcctggagcaaggacagctgacagtcaactaa

SEQ ID NO: 21601 - DNA, 1827 bp, Homo sapiens; identical to SEQ ID NO: 20310
  SIMILAR (7)..(1116): 931254mologous to Cloning vector pSacBII SacB,accession number U09128,Smith-Waterman Score=1799.
  misc_feature (1)...(1827): n = a,t,c or g

SEQ ID NO: 21602 - DNA, 1329 bp, Homo sapiens
  SIMILAR (580)..(1290): 971254mologous to Cloning vector pSacBII SacB,accession number U09128,Smith-Waterman Score=1240.
atgggcaaatttgatgaaggtaaactgcccaccgatccacacctgattcttcgactggccattgaaactgttgctcatgactatgatgtcatagttattgacagcgcgcctaacctgggtatcggcacgattaatgtcgtatgtgctgctgatgtgctgattgttcccacgcctgctgagttgtttgactacacctccgcactgcagtttttcgatatgcttcgtgatctgctcaagaacgttgatcttaaagggttcgagcctgatgtacgtattttgcttaccaaatacagcaatagtaatggctctcagtccccgtggatggaggagcaaattcgggatgcctggggaagcatggttctaaaaaatgttgtacgtgaaacggatgaagttggtaaaggtcagatccggatgagaactgtttttgaacaggccattgatcaacgctcttcaactgaaagcattatccctaatgatggtaagaaattgtcattttctgtgtcaggaaaaatgaggaaagggcactacttttcgtctgaagagagtcatgttagaacagacatcctggcggatacaaaaatgcaatctgcaaacggacttgatgtgtgggacagctggccgctgcaaaacgctgacggaacagtagctgaatacaacggctatcacgttgtgtttgctcttgcgggaagcccgaaagacgctgatgacacatcaatctacatgttttatcaaatggtcggcgacaactcaatcgacagctggaaaaacgcgggccgtgtctttaaagacagcgataagttcgacgcccacgatccgatcctgaaagatcagacgcaagaatggtccggttctgcaacctttacatctgacggaaaaatccgtttattctacactgactattccggtaaacattacggcaaacaaagcctgacaacagcgcaggtaaatgtgtcaaaatctgatgacacactcaaaatcaacggagtggaagatcacaaaacgatttttgacggagacggaaaaacatatcagaacgttcagcagtttatcgatgaaggcaattatacatccggcgacaaccatacgctgagagaccctcactacgttgaagacaaaggccataaataccttgtattcgaagccaacacgggaacagaaaacggataccaaagcgaagaatctttatttaacaaagcgtactacggcggcggcacgaacttcttccgtaaagaaagccagaagcttcagcagagcgctaaaaaacgcgatgctgaattaacgaacggcgccccttcgtatcatagagttaaattattgattacccattga

SEQ ID NO: 21603 - DNA, 1974 bp, Homo sapiens
  SIMILAR (796)..(1962): 981254mologous to Cloning vector pBACe3.6 levansucrase,accession number U80929,Smith-Waterman Score=2030.
atgcgctgggattgcaggcctccagcggccccgcccgccgcctccgccctcccgctcctgagctgccaatccagcgggttctgccggtcctcggccgtgcgtctggggtctggattcccggctccactcgccgtgagcgcgcgtgtcagccgactcgccccggaccgcatggtgcagctcccgcagggccgcagccgcgggtcgtcgctgattgccagctccgcgcccactgcaccgctgcgcggccgcctagggctcattgcgcggaagtcggcctgttgcgcccataacgggccatgtttaaaggttatcttattcccttccccggcatcgggcgtggatccaatcaaggttcaaaacgcccagctccccgggggtgggaaaattttttttccttacggaaaattctttaaattttcacggcgcaaccaaagtttccgcctgcaatcggagaacttcaagcttgggggttacgtccttctggacatcctcgccagccgaaatttaatgcgctttgtgaaaaggccttgtgaagtgcgtcaacctgtccgggtcaacaacgcacccgcggataaagcacgtgccacgtcgtcgacaggacctgaatgtggtgatggggatggaaaagcagaggtcaatgggacaggtggtatgcaagccagtgccaggggatatgggtgtggctcctttaatcacgtggggaagcccactcaggtcttcaccacgcggctggaaggatccgcgctggcgcaaggcgaggatatcaccgaccgccttacactataccgtccgatcatggacacctcgcatcgctggccgctgcaaaacgctgacggaacagtagctgaatacaacggctatcacgttgtgtttgctcttgcgggaagcccgaaagacgctgatgacacatcaatctacatgttttatcaaaaggtcggcgacaactcaatcgacagctggaaaaacgcgggccgtgtctttaaagacagcgataagttcgacgccaacgatccgatcctgaaagatcagacgcaagaatggtccggttctgcaacctttacatctgacggaaaaatccgtttattctacactgactattccggtaaacattacggcaaacaaagcctgacaacagcgcaggtaaatgtgtcaaaatctgatgacacactcaaaatcaacggagtggaagatcacaaaacgatttttgacggagacggaaaaacatatcagaacgttcagcagtttatcgatgaaggcaattatacatccggcgacaaccatacgctgagagaccctcactacgttgaagacaaaggccataaataccttgtattcgaagccaacacgggaacagaaaacggataccaaggcgaagaatctttatttaacaaagcgtactacggcggcggcacgaacttcttccgtaaagaaagccagaagcttcagcagagcgctaaaaaacgcgatgctgagttagcgaacggcgccctcggtatcatagagttaaataatgattacacattgaaaaaagtaatgaagccgctgatcacttcaaacacggtaactgatgaaatcgagcgcgcgaatgttttcaaaatgaacggcaaatggtacttgttcactgattcacgcggttcaaaaatgacgatcgatggtattaactcaaacgatatttacatgcttggttatgtatcaaactctttaaccggcccttacaagccgctgaacaaaacagggcttgtgctgcaaatgggtcttgatccaaacgatgtgacattcacttactctcacttcgcagtgccgcaagccaaaggcaacaatgtggttatcacaagctacatgacaaacagaggcttcttcgaggataaaaaggcaacatttgcgccaagcttcttaatgaacatcaaaggcaataaaacatccgttgtcaaaaacagcatcctggagcaaggacagctgacgtcttcaaaatag

SEQ ID NO: 21604 - DNA, 1629 bp, Homo sapiens
  SIMILAR (262)..(1626): 951254mologous to Cloning vector pBACe3.6 levansucrase,accession number U80929,Smith-Waterman Score=2276.
atgattccgttccaggaaacctttataatcaaacgcgggggaataactgggtttctggttagctttatggtggacgcgagagggggctccatgagaggaagccgtcatcacgggatgagaatcatcattcctccacgcaagtgtacggcccccactcgaatcacctgccgtttggtaaagagacataaactggccaacccaccccccatggtggaaggagagggattagccagtaggctggtagaaatgggtcctgcaggggcacaatttttagggaggagcgactcaagccttcgcgaaagaaaatatccaaaagcgatcaaagaaacgtacggggtctctcatattacacgccatgatatgctgcagatccgtaaacagcagcaaaacgaaaaataccaagtgcctcaattcgatcaatcaacgattaaaaatattgagtctgcaaaaggacttgatgtgtgggacagctggccgctgcaaaacgctgacggaacagtagctgaatacacgtgctatcacgttgtgtttgctcatgcgggaagcccgaaagacgctgatgacacatcaatctacatgttttatcaaaaggtcggcgacaactcaatcgacagctggaaaaacgcgggccgtgtctttaaagacagcgataagttcgacgccaacgatccgatcctgaaagatcagacgcaagaatggtccggttctgcaacctttacatctgacggaaaaatccgtttattatacactgactattccggtaaacattacggcaaacaaagcctgacaacagcgcaggtaaatgtgtcaaaatctgatgacacactcaaaatcaacggagtggaagatcacaaaacgatttttgacggagacggaaaaacatatcagaacgttcagcagtttatcgatgaaggcaattatacatccggcgacaaccatacgctgagagaccctcactacgttgaagacaaaggccataaataccttgtattcgaagccaacacgggaacagaaaacggataccaaggcgaagaatctttatttaacaaagcgtactacggcggcggcacgaacttcttccgtaaagaaagccagaagcttcagcagagcgctaaaaaacgcgatgctgagttagcgaacggcgccctcggtatcatagagttaaataatgattacacattgaaaaaagtaatgaagccgctgatcacttcaaacacggtaactgatgaaatcgagcgcgcgaatgttttcaaaatgaacggcaaatggtacttgttcactgattcacgcggttcaaaaatgacgatcgatggtattaactcaaacgatatttacatgcttggttatgtatcaaactctttaaccggcccttacaagccgctgaacaaaacagggcttgtgctgcaaatgggtcttgatccaaacgatgtgacattcacttactctcacttcgcagtgccgcaagccaaaggcaacaatgtggttatcacaagctacatgacaaacagaggcttcttcgaggataaaaaggcaacatttgcgccaagcttcttaatgaacatcaaaggcaataaaacatccgttgtcaaaaacagcatcctggagcaaggacagctgacagtcaactaa

SEQ ID NO: 21605 - DNA, 1810 bp, Homo sapiens
  SIMILAR (7)..(1065): 1001254mologous to Cloning vector pSacBII SacB,accession number U09128,Smith-Waterman Score=1866.
atgaacatgaacatcaaaaaaattgtaaaacaagccacagttctgacttttacgactgcacttctggcaggaggagcgactcaagccttcgcgaaagaaaataaccaaaaagcatacaaagaaacgtacggcgtctctcatattacacgccatgatatgctgcagatccctaaacagcagcaaaacgaaaaataccaagtgcctcaattcgatcaatcaacgattaaaaatattgagtctgcaaaaggacttgatgtgtgggacagctggccgctgcaaaacgctgacggaacagtagctgaatacaacggctatcacgttgtgtttgctcttgcgggaagcccgaaagacgctgatgacacatcaatctacatgttttatcaaaaggtcggcgacaactcaatcgacagctggaaaaacgcgggccgtgtctttaaagacagcgataagttcgacgccaacgatccgatcctgaaagatcagacgcaagaatggtccggttctgcaacctttacatctgacggaaaaatccgtttattctacactgactattccggtaaacattacggcaaacaaagcctgacaacagcgcaggtaaatgtgtcaaaatctgatgacacactcaaaatcaacggagtggaagatcacaaaacgatttttgacggagacggaaaaacatatcagaacgttcagcagtttatcgatgaaggcaattatacatccggcgacaaccatacgctgagagaccctcactacgttgaagacaaaggccataaataccttgtattcgaagccaacacgggaacagaaaacggataccaaggcgaagaatctttatttaacaaagcgtactacggcggcggcacgaacttcttccgtaaagaaagccagaagcttcagcagagcgctaaaaaacgcgatgctgagttagcgaacggcgccctcggtatcatagagttaaataatgattacacattgaaaaaagtaatgaagccgctgatcacttcaaacacggtaactgatgaaatcgagcgcgcgaatgttttcaaaatgaacggcaaatggcagtacccccttagacccaaggctcaacaaggactccaaaagattgttaaggacctaaaagcccaaggcctagtgaaatcatgcaatagcccctgcaatactccaattttaggagtacagaaacccagcagacagtggaggttagtgcaagaactcaggattatcaatgaggccgttgtccctctagacccagctgtacctaaccctcatactctgctttcccaaataccagaggaagcagtgtggtttacagtcctggaccttaaggatgcctttttcagcatccctgtacatcctgactctcaattcttgtttgcctttgaagatccttcaaacccaacgtctcaactcacctggactgttttaccccaagggttcagggatagcccccatctatttggccaggcattagcccaagacttgagccaattctcatacctggacactcttgtccttcggtacatggatgatttacttttagctgccagttcagaaaccttgtgccatcaagccacccaagcgctcttaaatttccttgctacctgtggctacaaggtttccaaaccaaacgctcagcactgctcacagcaggttaaatacttagggctaaaattatccaaaggtaccaaggcccttggtgaggaacgtatccagcctatactggcttaccctcatcccaaaaccctaaagcaactaagagggttccttggcataacaggtttctgccaaatatggatattcccag

SEQ ID NO: 21606 - DNA, 2415 bp, Homo sapiens; identical to SEQ ID NO: 19168
  SIMILAR (948)..(4): 981254mologous to Escherichia coli, LBB84, plasmid pXT107, IS10L/R-1, Peptide PlasmidTransposonInsertionMutant, 402 aa transposase,accession number S67119,Smith-Waterman Score=1604.

SEQ ID NO: 21607 - DNA, 1938 bp, Homo sapiens
  SIMILAR (1881)..(1937): 521254mologous to Escherichia coli MtrC protein,accession number D90725,Smith-Waterman Score=40.
atgaaaaacaccgaactggaacaactgattaacggaaaactgaacagcgcggcgattagtgattacgcgccgaatggttctgtaattgcgccagttgtccgtctcgttctgctgctcgaggcttgtctttctcgcttaatggcactgccgccaacagacggtaactttgcatgcgcacgatcccgctttgttgatcgcatgggcgctgcctggaacgccttgcaccagccagccagaaaccgccatccctgccagtccaatagcagtagaaagcaacacaataagcgcaacctgattaaccagggtgagcggagagagacaacgtttaagcatctttctttactggatcgtgtttaccagacggcacctcccgaagaaggtgccgaagaaaaaacgattcgatgcactcgtagattccccagagcggaatcatttgtgaatgaagctggagctagtaggcctagcctcgtagccacgacttttcaagtctcggaaggcttcttcaatctgcattcgcttcgaatagatattaacaagttcgtctgggagttcgaatttcaacaggtcacaacacagccaagacgccaaagcaaaaccacaacaaggaccggagacacacaagagaagcagcgaggaaaggaacgaaagagaagacgccaaagggcccaaaggcaccgcagccaggaaggcacgagcgcacggaaagcgaacaaagccgcaacccagcgacgacacaaaccacgcacagcccggcccaaccgagccaccaaaaggaaggcgacccacggagcagcaaaaggaggaagaagacaccccccaaagagcaacagaacgacgcacaaagacaacacaacggagaccgcgcacccagaaagacagcacccaaaagggaagaacacgcaacagaaagaggaaacgagaggcgagaagcccagaacaagggacccaggggaagaacggaaagccagggccagaaaaggcacacgcgagaaccaagggccagaccagggcagggaaccaaaggcccgaggaagggcaccagaaagggaggggacaaacccggaccgcccagcaaagacaaggggacccaaaaaacaccaggggccacaaaacagagctcccgagccgttagatgccggcgaattaagctggcgcactgacgatcatatcagtattgcgccgggtaaaatgttttctaccggtgaaaactggtcacgttttttccgttttaataccgcgtggcagtggggagagcgtgaagaacaggcgataaaccgggagggcgactggataatatcgcctggccgggatacatcgaacgcggacaaacttgataacaatacggctggggctgaaaaccagattaaggaggtcgaagcaacgctgatggagctacgtgcgcagcggcagcaggcggaagcggagctgaaactggcgcgggtgacgtattcccgtcagcaacgtctggcacaaacgaaggctgtttcacagcaggatctcgacaccgccgcgacggagatggctgtgaaacaggcgcaaattggcaccattgacgcgcaaatcaagcgcaatcaggcttctctcgatacggctaaaaccaatctcgattacactcgcatcgttgccccgatggccggggaagtcacgcaaatcaccactctgcaaggccagacggtgattgccgcacaacaagcaccgaacattctgacgctggcagatatgagcgccatgctggtaaaagcgcaggtttctgaagcggatgtaatccacctgaagccggggcaaaaagcctggtttacggtgcttggcgatccactgacgcgctacgatgggcaaatcaaggatgtactaccgacgccggaaaaggttaacgacgctattttctattacgcccgttttgaagtccccaaccccaatgtttgctgcggctggatatga

SEQ ID NO: 21608 - DNA, 1435 bp, Homo sapiens; identical to SEQ ID NO: 19170
  SIMILAR (1435)..(233): 991254mologous to Methylomonas aminofaciens transposase,accession number AB026428,Smith-Waterman Score=2080.

SEQ ID NO: 21609 - DNA, 1177 bp, Homo sapiens; identical to SEQ ID NO: 19171
  SIMILAR (1)..(1026): 1001254mologous to Escherichia coli, LBB84, plasmid pXT107, IS10L/R-1, Peptide PlasmidTransposonInsertionMutant, 402 aa transposase,accession number S67119,Smith-Waterman Score=1805.

SEQ ID NO: 21610 - DNA, 456 bp, Homo sapiens; identical to SEQ ID NO: 19172
  SIMILAR (160)..(390): 941254mologous to Escherichia coli valyl tRNA synthetase,accession number J03497,Smith-Waterman Score=347.

SEQ ID NO: 21611 - DNA, 1218 bp, Homo sapiens; identical to SEQ ID NO: 19174
  SIMILAR (1218)..(148): 1001254mologous to Methylomonas aminofaciens transposase,accession number AB026428,Smith-Waterman Score=1893.

SEQ ID NO: 21612 - DNA, 2217 bp, Homo sapiens; identical to SEQ ID NO: 19175
  SIMILAR (1162)..(2214): 991254mologous to Methylomonas aminofaciens transposase,accession number AB026428,Smith-Waterman Score=1834.

SEQ ID NO: 21613 - DNA, 1210 bp, Homo sapiens; identical to SEQ ID NO: 19177
  SIMILAR (1210)..(182): 1001254mologous to Methylomonas aminofaciens transposase,accession number AB026428,Smith-Waterman Score=1811.

SEQ ID NO: 21614 - DNA, 1089 bp, Homo sapiens; identical to SEQ ID NO: 19178
  SIMILAR (1)..(801): 1001254mologous to Tn10 delivery vector pHV1248 transposase,accession number AF307747,Smith-Waterman Score=1406.

SEQ ID NO: 21615 - DNA, 1135 bp, Homo sapiens
  SIMILAR (1)..(858): 951254mologous to Leishmania major probable levansucrase precursor,accession number AL160371,Smith-Waterman Score=1438.
atgaacatgaacatcaaaaaaattgtaaaacaagccacagttctgacttttacgactgcacttctggcaggaggagcgactcaagccttcgcgaaagaaaataaccaaaaagcatacaaagaaacgtacggcgtctctcatattacacgccatgatatgctgcagatccctaaacagcagcaaaacgaaaaataccaagtgcctcaattcgatcaatcaacgattaaaaatattgagtctgcaaaaggacttgatgtgtgggacagctggccgctgcaaaacgctgacggaacagtagctgaatacacgggctatcacgttgtgtttgctcttgcgggaagccggaaagacgctgatgacacatcaatctacatgttttatcaaaaggtcggcgacaactcaatcgacagctggaaaaacgcgggccgtgtctttaaagacagcgataagttcgacgccaacgatccgatcctgaaagatcagacgcaagaatggtccggttctgcaacctttacatctgacggaaaaatccgtttattctacactgactattccggtaaacattacggcaaacaaagcctgacaacagcgcaggtaaatgtgtcaaaatctgatgacacactcaaaatcaacggagtggaagatcacaaaacgatttttgacggagacggaaaaacatatcagaacgttcagcagtttatcgatgaaggcaattatacatccggcgacaaccatacgctgagagaccctcactacgttgaagacaaaggccataaataccttgtattcgaagcccaacacggggaacagaaaacggattcccaaggcgaagaatctttatttaacaaagcaagttttcttattgtcctcttggcatatgcttctggaataatattcaccatggttttggatgaccttccaaacttagaagacatctatacttccttgtgttcatcaacaatggaagactcagagatggattttgactctggactagaagatgatgacacaaaaagtgatagtattttggaggattccacaatttttgtggccttcaaaggaaatatagatgataaagacttcaaatggaaattagatgcaatattgaaaaacgtgcccaatttgttacacatgg

SEQ ID NO: 21616 - DNA, 1200 bp, Homo sapiens; identical to SEQ ID NO: 19180
  SIMILAR (1)..(1026): 1001254mologous to Escherichia coli, LBB84, plasmid pXT107, IS10L/R-1, Peptide PlasmidTransposonInsertionMutant, 402 aa transposase,accession number S67119,Smith-Waterman Score=1805.

SEQ ID NO: 21617 - DNA, 888 bp, Homo sapiens; identical to SEQ ID NO: 19181
  SIMILAR (1)..(459): 981254mologous to Methylomonas aminofaciens transposase,accession number AB026428,Smith-Waterman Score=794.

SEQ ID NO: 21618 - DNA, 1527 bp, Homo sapiens; identical to SEQ ID NO: 19182
  SIMILAR (1359)..(904): 991254mologous to Methylomonas aminofaciens transposase,accession number AB026428,Smith-Waterman Score=787.

SEQ ID NO: 21619 - DNA, 1295 bp, Homo sapiens; identical to SEQ ID NO: 19169
  SIMILAR (1295)..(225): 1001254mologous to Methylomonas aminofaciens transposase,accession number AB026428,Smith-Waterman Score=1893.

SEQ ID NO: 21620 - DNA, 1488 bp, Homo sapiens
  SIMILAR (894)..(493): 971254mologous to Tn10 delivery vector pHV1248 transposase,accession number AF307747,Smith-Waterman Score=683.
ctaataacagccatgccggaagcatgacgatacagagcagcggtacaatgtggtattgggtacaacgactgccgccataaaaagacttaaccagccatcgcgtgttaccaccagcacgatgccgagaatagcgcaagaaacggttattgccgctggtacggcgggaacgtgctcatgcagcatcaaccctaatgccacgccgacaaacactgccaggaagattcgcccaccgcgaaaaccacgccagcaaaaagtaatcgctggtgctgaaacctgatttgccaccatctgctgcatctcatccagccctttaaacagcgaaactggtccaccaataacccccagaataccgagaataaatccgccaatacccagcacgagcaccggatttcccatttgatgcatcatcgcgtgcatacgtggtaagcaccatacggcgaccatccctgctgcgatggcaatcgccgcgacaattgcaccgctgagaatatcggtcatttccatgtttcgatttctgactgtgttagcctggaagtgcttgtcccaaccttgtttctgagcatgaacgcccgcaagccaacatgttagttgaagcatcagggcgattagcagcatgatatcaaaacgctctgagctgctcgttcggctatggcgtaggcctagtccgtaggcaggacttttcaagtctcggaaggtttcttcaatctgcattcgcttcgaatagatattaacaagttgtttgggtgttcgaatttcaacaggtaagttagttgctagaacccatggctcctttgccgacgctgagtagattttaggtgacgggtggtgacaatgagtccgtgtcgagcgctgattttttcggcctttagagcgagatttatacaataggattttggcctgcccccttattaacacgtagcccactccggttgtgcggctgaaaccctgaactgtgtggtccatgggtcccgttgtggggacaccagcccgtccaatccgtacgtctggtgcgtgttggtggtgctggtaggttacggtgttattggctttgttgatgattatcgcaaagtggtgcgtaaagacaccaaagggttgatcgctcgttggaagtatttctggatgtcggtcattgcgctgggtgtcgccttcgccctgtaccttgccggcaaagacacgcccgcaacgcagctggtggtcccattctttaaagatgtgatgccgcagctggggctgttctacattctgctggcttacttcgtcattgtgggtactggcaacgcggtaaaaagctttcgtgcctgcaggtccatgacagatatcatcaccttcgccacgcaccatcatgttgccttcgtaagcctgaaggaatttcgtacgggctttttgcaacgtggaatcgtcatccagcatggcatcgttttgcgcgtcataacaggtttttagccacgcgccgccactttcaggtaacaccagcaatggcgcggacat

SEQ ID NO: 21621 - DNA, 735 bp, Homo sapiens; identical to SEQ ID NO: 19184
  SIMILAR (399)..(268): 931254mologous to Arabidopsis thaliana bacterial IS- element,accession number AC068901,Smith-Waterman Score=209.

SEQ ID NO: 21622 - DNA, 2187 bp, Homo sapiens; identical to SEQ ID NO: 19188
  SIMILAR (559)..(1671): 841254mologous to Salmonella typhi putative IS10 transposase,accession number AF223162,Smith-Waterman Score=1600.

SEQ ID NO: 21623 - DNA, 780 bp, Homo sapiens; identical to SEQ ID NO: 19189
  SIMILAR (696)..(271): 751254mologous to Plasmid R100 transposase of Tn10,accession number AP000342,Smith-Waterman Score=526.

SEQ ID NO: 21624 - DNA, 1459 bp, Homo sapiens
  SIMILAR (421)..(1389): 941254mologous to Cloning vector pBACe3.6 levansucrase,accession number U80929,Smith-Waterman Score=1629.
atgtctggtgcttggctgccagttaggtggagcgatgaaggctattgggctgagtgtctcctgtcatccatcagagagggagtctgcacggggtcccacacatcccctgagactcaagcaggggcaggacagcaccattttgagagcctagccttcaccaggctacatcctgcccagaggcccaacagcacctgcatctccatatttccggagccccataacattctcctgtatctacctgtcaggacccttagctgcaggtctgttggagtttgcctgggtatcagtggtggaggctgcagaactgtgaatattgctgaacaggaaatgttgctgtctgatcattcctctggaggtttcgtctcagaggggggagtgaacgtttctgtcttgctggcattcctagtgcctctggggtatgaaatataccaagtgcctcaattcgatcaatcaacgattaaaaatattgagtctgcaaaaggacttgatgtgtgggacagctggccgctgcaaaacgctgacggaacagtagctgaatacaacggctatcacgttgtgtttgctcttgcgggaagcccgaaagacgctgatgacacatcaatctacatgttttatcaaaaggtcggcgacaactcaatcgacagctggaaaaacgcgggccgtgtctttaaagacagcgataagttcgacgccaacgatccgatcctgaaagatcagacgcaagaatggtccggttctgcaacctttacatctgacggaaaaatccgtttattctacactgactattccggtaaacattacggcaaacaaagcctgacaacagcgcaggtaaatgtgtcaaaatctgatgacacactcaaaatcaacggagtggaagatcacaaaacgatttttgacggagacggaaaaacatatcagaacgttcagcagtttatcgatgaaggcaattatacatccggcgacaaccatacgctgagagaccctcactacgttgaagacaaaggccataaataccttgtattcgaagccaacacgggaacagaaaacggataccaaggcgaagaatctttatttaacaaagcgtactacggcggcggcacgaacttcttccgtaaagaaagccagaagcttcagcagagcgctaaaaaacgcgatgctgagttagcgaacggcgccctcggtatcatagagttaaataatgattacacattgaaaaaagtaatgaagccgctgatcacttcaaacacggtaactgatgaaatcgagcgcgcgaatgttttcaaaatgaacggcaaatggtacttgttcactgattcacgcggttcaaaaatgacgatcgatgccaagtccacacttcttgaatcaacagaagggagtatgactcctccaatgacagccacagagccttttctcaggttcctcaaaggggagattgcccaacccaagccacatccccttg

SEQ ID NO: 21625 - DNA, 3003 bp, Homo sapiens
  SIMILAR (859)..(1980): 961254mologous to Cloning vector pBACe3.6 levansucrase,accession number U80929,Smith-Waterman Score=1904.
atgaatgaaatgaagcgtgaagagaagtttagagaaaaaagaagagaaagaaacgaacaaatcctccaagaaatacgggactatgtgaaaagatcaaatctacatctaattggtgtatctaaaagtgatggggagaatggaaccgagttggaaaacactctgcaggatattatccaggagaacttccccaatctagcaaggcaggccaacattcaaattcaggaaatacagagaatgctacaaagatactcctcgagaagaacaactccaagacacataattgtcagattcaccaaagttgaaatgaaggaaaaaatgttaagggcagccagagagaaaggtcgggttacccacaaagggaagcccatcagactaacagctgatctctcggcagaaactctacaagccacaaaagagtggaggccaatattcaacattcttaaagaaaagaattttcaacccagaatttcatatccagccaaactaagcttcataagtgaaggagaaacaaaatactttacagacaagcaaatgctgagagattttgtcaccaccaggcctgccctaaaagagctcctgaaggaagcactaaacatggaaaggaacaaccggttggttaaatccctcgcttgggcaagccagaacggcttccggtccccggccttgttgccactgtccctaatgctttgtgctcccctacaagaggcagatggaacaaatctgggatggctggctcactgtggcctgctgtgcactggtgaccaccctagtggccttggcaaacctggccggcacggcgctgaccgtcaccatccagagggactggatcgtgagctgacgggtgacaacagaggccagctggttggaggagcgactcaagccttcgcgaaagaaaataaccaaaaagcatacaaagaaacgtacggcgtctctcatattacacgccatgatatgctgcagatccctaaacagcagcaaaacgaaaaataccaagtgcctcaattcgatcaatcaacgattaaaaatattgagtctgcaaaaggacttgatgtgtgggacagctggccgctgcaaaacgctgacggaacagtagctgaatacaacggctatcacgttgtgtttgctcttgcgggaagcccgaaagacgctgatgacacatcaatctacatgttttatcaaaaggtcggcgacaactcaatcgacagctggaaaaacgcgggccgtgtctttaaagacagcgataagttcgacgccaacgatccgatcctgaaagatcagacgcaagaatggtccggttctgcaacctttacatctgacggaaaaatccgtttattctacactgactattccggtaaacattacggcaaacaaagcctgacaacagcgcaggtaaatgtgtcaaaatctgatgacacactcaaaatcaacggagtggaagatcacaaaacgatttttgacggagacggaaaaacatatcagaacgttcagcagtttatcgatgaaggcaattatacatccggcgacaaccatacgctgagagaccctcactacgttgaagacaaaggccataaataccttgtattcgaagccaacacgggaacagaaaacggataccaaggcgaagaatctttatttaacaaagcgtactacggcggcggcacgaacttcttccgtaaagaaagccagaagcttcagcagagcgctaaaaaacgcgatgctgagttagcgaacggcgccctcggtatcatagagttaaataatgattacacattgaaaaaagtaatgaagccgctgatcacttcaaacacggtaactgatgaaatcgagcgcgcgaatgttttcaaaatgaacggcaaatggtacttgttcactgattcacgcggttcaaaaatgacgatcgatggtattaactcaaacgttattcacatgaatggttatgtatcaggatcaactaagttaccgctgatggccactggggtcagtccttctggggaccttatgagagactgtgtaggacatacttcagaactgtcccaccaaggcccaaggaaactaggatgtttatccagcaactcttgtctgtccttggttgagagctgttctcagggcaacttacagcccacccctcatgttcctatggctggagagggatcttcaggcaaagagacacagtgccctcccttttcggccgcggcgcgtgactggtgtgacaatctaaaaacttgtcacacttcacatggatctgtcatggcggaaacagcggttatcaatcacaagaaacgtaaaaatagcccgcgaatcgtccagtcaaacgacctcactgaggcggcatatagtctctcccgggatcaaaaacgtatgctgtatctgttcgttgaccagatcagaaaatctgatggcaccctacaggaacatgacggtatctgcgagatccatgttgctaaatatgctgaaatattcggattgacctctgcggaagccagtaaggatatacggcaggcattgaagagtttcgcggggaaggaagtggttttttatcgccctgaagaggatgccggcgatgaaaaaggctatgaatcttttccttggtttatcaaacgtgcgcacagtccatccagagggctttacagtgtacatatcaacccatatctcattcccttctttatcgggttacagaaccggtttacgcagtttcggcttagtgaaacaaaagaaatcaccaatccgtatgccatgcgtttatacgaatccctgtgtcagtatcgtaagccggatggctcaggcatcgtctctctgaaaatcgactggatcatagagcgttaccagctgcctcaaagttaccagcgtatgcctgacttccgccgccgcttcctgcaggtctgtgttaatgagatcaacagcagaactccaatgcgcctctcatacattgagaaaaagaaaggccgccagacgactcatatcgtattttccttccgcgatatcacttccatgacgacaggatag

SEQ ID NO: 21626 - DNA, 1083 bp, Homo sapiens
  SIMILAR (10)..(648): 991254mologous to Tn10 delivery vector pHV1248 transposase,accession number AF307747,Smith-Waterman Score=1119.
atggcagaggtttcagagcaatgttcaaagaaagctcatgaccaatttctagccgaccttgcgagcattctaccgagtaacaccacaccgctcattgtcagtgatgctggctttaaagtgccatggtataaatccgttgagaagctgggttggtactggttaagtcgagtaagaggaaaagtacaatatgcagacctaggagcggaaaactggaaacctatcagcaacttacatgatatgtcatctagtcactcaaagactttaggctataagaggctgactaaaagcaatccaatctcatgccaaattctattgtataaatctcgctctaaaggccgaaaaaatcagcgctcgacacggactcattgtcaccacccgtcacctaaaatctactcagcgtcggcaaaggagccatgggttctagcaactaacttacctgttgaaattcgaacacccaaacaacttgttaatatctattcgaagcgaatgcagattgaagaaaccttccgagacttgaaaagtcctgcctacggactaggcctacgccatagccgaacgagcagctcagagcgttttgatatcatgctgctaatcgccctgatgcttcaactaacatgttggcttgcgggcgttcatgctcagaaacaagagcaccctttgtggtcgctggcgctggttaggaggagatcccctgcccagagccctcatgtggggacaggatcttccggcagcactgggtgttcaagtcaggcaccgtgtatgaaatctaacaatgcgctcatcgtcatcctcggcaccgtcaccctggatgctgtaggcataggcttggttatgccggtactgccgggcctcttgcgggatatcgtccattccgacagcatcgccagtcactatggcgtgctgctagcgctatatgcgttgatgcaatttctatgcgcacccgttctcggagcactgtccgaccgctttggccgccgcccagtcctgctcgcttcgctacttggagccactatcgactacgcgatcatggcgaccacacccgtcctgtggatctacccactagtcaattcaccatcttgttga

SEQ ID NO: 21627 - DNA, 2361 bp, Homo sapiens
  SIMILAR (1126)..(2358): 991254mologous to Cloning vector pBACe3.6 levansucrase,accession number U80929,Smith-Waterman Score=2160.
atgtgcgaactcgatattttacacgactctctttaccaattctgccccgaattacacttaaaacgactcaacagcttaacgttggcttgccacgcattacttgactgtaaaactctcactcttaccgaacttggccgtaacctgccaaccaaagcgagaacaaaacataacatcaaacgaatcgaccgattgttaggtaatcgtcacctccacaaagagcgactcgctgtataccgttggcatgctagctttatctgttcgggcaatacgatgcccattgtacttgttgactggtctgatattcgtgagcaaaaacgacttatggtattgcgagcttcagtcgcactacacggtcgttctgttactctttatgagaaagcgttcccgctttcagagcaatgttcaaagaaagctcatgaccaatttctagccgaccttgcgagcattctaccgagtaacaccacaccgctcattgtcagtgatgctggctttaaagtgccatggtataaatccgttgagaagctgggttggtactggttaagtcgagtaagaggaaaagtacaatatgcagacctaggagcggaaaactggaaacctatcagcaacttacatgatatgtcatctagtcactcaaagactttaggctataagaggctgactaaaagcaatccaatctcatgccaaattctattgtataaatctcgctctaaaggccgaaaaaatcagcgctcgacacggactcattgtcaccacccgtcacctaaaatctactcagcgtcggcaaaggagccatgggttctagcaactaacttacctgttgaaattcgaacacccaaacaacttgttaatatctattcgaagcgaatgcagattgaagaaaccttccgagacttgaaaagtcctgcctacggactaggcctacgccatagccgaacgagcagctcagagcgttttgatatcatgctgctaatcgccctgatgcttcaactaacatgttggcttgcgggcgttcatgctcagaaacaaggttgggacaagcacttccaggctaacacagtcagaaatcgaaacctcaaaatttattcacacatggttacgctttggggaaattatgaggggatctctcagtaccaagtgcctcaattcgatcaatcaacgattaaaaatattgagtctgcaaaaggacttgatgtgtgggacagctggccgctgcaaaacgctgacggaacagtagctgaatacaacggctatcacgttgtgtttgctcttgcgggaagcccgaaagacgctgatgacacatcaatctacatgttttatcaaaaggtcggcgacaactcaatcgacagctggaaaaacgcgggccgtgtctttaaagacagcgataagttcgacgccaacgatccgatcctgaaagatcagacgcaagaatggtccggttctgcaacctttacatctgacggaaaaatccgtttattctacactgactattccggtaaacattacggcaaacaaagcctggcagcagcgcaggtaaatgtgtcaaaatctgatgacacactcaaaatcaacggagtggaagatcacaaaacgatttttgacggagacggaaaaacatatcagaacgttcagcagtttatcgatgaaggcaattatacatccggcgacaaccatacgctgagagaccctcactacgttgaagacaaaggccataaataccttgtattcgaagccaacacgggaacagaaaacggataccaaggcgaagaatctttatttaacaaagcgtactacggcggcggcacgaacttcttccgtaaagaaagccagaagcttcagcagagcgctaaaaaacgcgatgctgagttagcgaacggcgccctcggtatcatagagttaaataatgattacacattgaaaaaagtaatgaagccgctgatcacttcaaacacggtaactgatgaaatcgagcgcgcgaatgttttcaaaatgaacggcaaatggtacttgttcactgattcacgcggttcaaaaatgacgatcgatggtattaactcaaacgatatttacatgcttggttatgtatcaaactctttaaccggcccttacaagccgctgaacaaaacagggcttgtgctgcaaatgggtcttgatccaaacgatgtgacattcacttactctcacttcgcagtgccgcaagccaaaggcaacaatgtggttatcacaagctacatgacaaacagaggcttcttcgaggataaaaaggcaacatttgcgccaagcttcttaatgaacatcaaaggcaataaaacatccgttgtcaaaaacagcatcctggagcaaggacagctgacagtcaactaa

SEQ ID NO: 21628 - DNA, 731 bp, Homo sapiens
  SIMILAR (258)..(302): 661254mologous to Plasmid R100 transposase of Tn10,accession number AP000342,Smith-Waterman Score=50.
atgggagtgaatgacttgtggcaaattttggagcctgttaagcaacacatccccttgcgtaatcttggtgggaaaaccattgcagttgatctgagtctctgggtgtgtgaggcacacccagtcaaaaaaatgatgggcagcgtcatgaagaaacacctcagggattttgccgatttcggaaccaccatcaaacaggattttcgcctgctggggcaaaccagcgtggaccgcttgctgcaactctctcagggccaggcggcctaccccatacccgacgaccaggttcagagcgttttgatatccatgctgctaatcgccctgatgcttcacctaacatgtgggcttgcgggcgttcatgctcagaaacaaggttgggacaagcacttccaggctaacacagtcagaaatcgaaacgtactctcaacagttcgcttaggcatggaagttttgcggcattctggctacacaataacaagggaagactcactcgtggctgcaaccctgcttactcaaaatctattcacacatggttacgttttggggaaattatgaggggatctctcagtgctaagcctccacattctagaatactgagttctaattacctagaaaagaataaaactgtccaggtgaggtgacacttttgaggaatcccaggaagaggtgtcggcactgtgttacctcaggtgggaatggcctctgaactgatctccctgacagctctgtgaaaa

SEQ ID NO: 21629 - DNA, 1314 bp, Homo sapiens; identical to SEQ ID NO: 19190
  SIMILAR (1314)..(289): 1001254mologous to Escherichia coli, LBB84, plasmid pXT107, IS10L/R-1, Peptide PlasmidTransposonInsertionMutant, 402 aa transposase,accession number S67119,Smith-Waterman Score=1805.

SEQ ID NO: 21630 - DNA, 1017 bp, Homo sapiens
  SIMILAR (552)..(16): 981254mologous to Escherichia coli malY,accession number M60722,Smith-Waterman Score=931.
tcatgggttgcgggtcatgatagcgactttttcatgttcgataagtgctttttgcaacgcgttgtcgtcaatattcaacggacgtaaatcaagccatgccagataagtggattgtgggatctgccagttgagttcaggaaacgcggcgttcattttatctgcgatatacgtcaggttatctttcagatagatgcgtaaggcatccagccacggcgcgccttgctgataggcggcgatatgggcagttaacgccagtaccgaaggggaagaaagcccatcacggcctttcagtgccgataaataggcatcgcggctactgctattttctataatcccgtaagcaccggtcagggcgggaatattgaaacttttcgagcccgacgttagcaacgcccagtctccgcgagccacattactccagggaatatgcggctgctcgccccaaaccatatccatatggatttcatcggaaataacccgcacaccatgacgctcgcacaggtcagccatgatctccagctcatcgcacgtccacactttcccggtaagattgtttcgatttctgactgtgttagcctggaagtgcttgtcccaaccttgtttctgagcatgaacgcccgcaagccaacatgttagttgaagcatcagggcgattagcagcatgatatcaaaacgctctgagctgctcgttcggctatggcgtaggcctagtccgtaggcaggacttttcaagtctcggaaggtttcttcaatctgcattcgcttcgaatagatattaacaagttgtttgggtgttcgaattttcaacaggtaaggtagttgctgctcccagtccgctttggggattggctccagatatttttccagctggcggaagtcatgattaatcgctttatcgcgacgcaagcggcgacgacttttctccaggtcaagaaaaccagcttctgcattaccttctgttttcacatagatatggcgaacataacaacagccatgctgacgattaatgctatgcat

SEQ ID NO: 21631 - DNA, 2475 bp, Homo sapiens
  SIMILAR (817)..(1848): 791254mologous to Leishmania major probable levansucrase precursor,accession number AL160371,Smith-Waterman Score=1393.
  misc_feature (1)...(2475): n = a,t,c or g
atgagactgggatttgaatcaaggggtgagatagcaaaagatcaagctaaacttgatctagcagggcaaaaagaaagggataaccaaagctcaacattgggggaagcagaaaccccattgattatttgctggtcgactctagaggatccccactatgatgtcatagttattgacagcgcgcctaacctgggtatcggcacgattaatgtcgtatgtgctgctgatgtgctgattgttcccacgcctgctgagttgtttgactacacctccgcactgcagtttttcgatatgcttcgtgatctgctcaagaacgttgatcttaaagggttcgagcctgatgtacgtattttgcttaccaaatacagcaatagtaatggctctcagtccccgtggatggaggagcaaattcgggatgcctggggaagcatggttctaaaaaatgttgtacgtgaaacggatgaagttggtaaaggtcagatccggatgagaactgtttttgaacaggccattgatcaacgctcttcaactgatacttcgttatcgacaccagctgccccgatggtggattcgttaattgcgcgcgtaggagtaatggctcgcggtaatgccattactttgcctgtatgtggtcgggatgtgaagtttactcttgaagtgctccggggtgatagtgttgagaagacctctcgggtatggtcaggtaatgaacgtgaccaggagctgcttactgaggacgcactggatgatctcatcccttcttttctactgactggtcaacagacaccggcgttcggtcgaagagtttccttgtaccctctggcaggaggagcgactcaagccttcgcgaaagaaaataaccaaaaagcatacaaagaaacgtacggcgtctctcatattacacgccatgatatgctgcagatccctaaacagcagcaaaacgaaaaataccaagtgcctcaattcgatcaatcaacgattaaaaatattgagtctgcaaaaggacttgatgtgtgggacagctggccgctgcaaaacgctgacggaacagtagctgaatacaacggctatcacgttgtgtttgctcttgcgggaagcccgaaagacgctgatgacacatcaatctacatgttttatcaaaaggtcggcgacaactcaatcgacagctggaaaaacgcgggccgtgtctttaaagacagcgataagttcgacgccaacgatccgatcctgaaagatcagacgcaagaatggtccggttctgcaacctttacatctgacggaaaaatccgtttattctacactgactattccggtaaacattacggcaaacaaagcctgacaacagcgcaggtaaatgtgtcaaaatctgatgacacactcaaaatcaacggagtggaagatcacaaaacgatttttgacggagacggaaaaacatatcagaacgttcagcagtttatcgatgaaggcaattatacatccggcgacaaccatacgctgagagaccctcactacgttgaagacaaaggccataaataccttgtattcgaagccaacacgggaacagaaaacggataccaaggcgaagaatctttatttaccnagcgtgggcacactttgtcaactcgcgggtcactttgggagaactcaaaggtcggcgacaactcaatcgacagttggaaaaacgcgggccgcgtctttaaagacagcgataagttcgacgccaacgatccgatcctgaaagatcagacgcaagaatggtccggttctgcaacctttacatctgacggaaaaatccgtttattctacactgactattccggaaacattacgtctataaagcctgacaacagcgcagtggaagatcacaaaacgatttttgacggagacggaaaaacatatcagaacgttcagcagtttatcgatgaaggcaattatacatccggcgacaaccatacgctgagagaccctcactacgttgaagacaaaggccataaataccttgtattcgaagccaacacgggaacagaaaacggataccaaggcgaagaatctttatttaacaaagcgtactacggcggcggcacgaacttcttccgtaaagaaagccagaagcttcagcagagcgctaaaaaacgcgatgctgagttagcgaacggcgccctcggtatcatagagttaaataatgattacacattgaaaaaagtaatgaagccgctgatcacttcaaacacggtaactgatgaaatcgagcgcgcgaatgttttcaaaatgaacggcaaatggtacttgttcactgattcacgcggttcaaaaatgacgatcgatggtattaactcaaacgatatttacatgcttggttatgtatcaaactctttaaccggcccttacaagccgctgaacaaaacagggcttgggctgcanatgggcaacttggtatctgcgggctacttagagtatccctggcgtgcattggtgtga

SEQ ID NO: 21632 - DNA, 1983 bp, Homo sapiens
  SIMILAR (1)..(1035): 991254mologous to Methylomonas aminofaciens transposase,accession number AB026428,Smith-Waterman Score=1812.
atgtgcgaactcgatattttacacgactctctttaccaattctgccccgaattacacttaaaacgactcaacagcttaacgttggcttgccacgcattacttgactgtaaaactctcactcttaccgaacttggccgtaacctgccaaccaaagcgagaacaaaacataacatcaaacgaatcgaccgattgttaggtaatcgtcacctccacaaagagcgactcgctgtataccgttggcatgctagctttatctgttcgggcaatacgatgcccattgtacttgttgactggtctgatattcgtgagcaaaaacgacttatggtattgcgagcttcagtcgcactacacggtcgttctgttactctttatgagaaagcgttcccgctttcagagcaatgttcaaagaaagctcatgaccaatttctagccgaccttgcgagcattctaccgagtaacaccacaccgctcattgtcagtgatgctggctttaaagtgccatggtataaatccgttgagaagctgggttggtactggttaagtcgagtaagaggaaaagtacaatatgcagacctaggagcggaaaactggaaacctatcagcaacttacatgatatgtcatctagtcactcaaagactttaggctataagaggctgactaaaagcaatccaatctcatgccaaattctattgtataaatctcgcactaaaggccgaaaaaatcagcgctcgacacggacacattgtcaccacccgtcacctaaaatctactcagcgtcggcaaaggagccatgggttctagcaactaacttacctgttgaaattcgaacacccaaacaacttgttaatatctattcgaagcgaatgcagattgaagaaaccttccgagacttgaaaagtcctgcctacggactaggcctacgccatagccgaacgagcagctcagagcgttttgatatcatgctgctaatcgccctgatgcttcaactaacatgttggcttgcgggcgttcatgctcagaaacaaggacttgatgtgtgggacagctggccgctgcaaaacgctgacggaacagtagctgaatacaacggctatcacgttgtgtttgctcttgcgggaagcccgaaagacgctgatgacacatcaatctacatgttttatcaaaagatcagacgcaagaatggtccaggttctgcaacctttacatctgacggaaaaatccgtttattctacactgactattccggtaaacattacggcaaacaaagcctgacaacagcgcaggtaaatgtgtcaaaatctgatgacacactcaaaatcaacggagtggaagatcacaaaacgatttttgacggagacggaaaaacatatcagaacgttcagcagtttatcgatgaaggcaattatacatccggcgacaaccatacgctgagagaccctcactacgttgaagacaaaggccataaataccttgtattcgaagccaacacgggaacagaaaacggataccatgagttaaataatgattacacattgaaaaaagtaatgaagccgctgatcacttcaaacacggtaactgatgaaatcgagcgcgcgaatgttttcaaaatgaacggcaaatggtacttgttcactgattcacgcggttcaaaaatgacgatcgatggtattaactcaaacgatatttacatgcttggttatgtatcaaactctttaaccggcccttacaagccgctgaacaaaacagggcttgtgctgcaaatgggtcttgatccaaacgatgtgacattcacttactctcacttcgcagtgccgcaagccaaaggcaacaatgtggttatcacaagctacatgacaaacagaggcttcttcgaggataaaaaggcaacatttgcgccaagcttcttaatgaacatcaaaggcaataaaacatccgttgtcaaaaacagcatcctggagcaaggacagctgacagtcaactaa

SEQ ID NO: 21633 - DNA, 2133 bp, Homo sapiens
  SIMILAR (564)..(4): 1001254mologous to Cloning vector pBACe3.6 levansucrase,accession number U80929,Smith-Waterman Score=962.
ttagttgactgtcagctgtccttgctccaggatgctgtttttgacaacggatgttttattgcctttgatgttcattaagaagcttggcgcaaatgttgcctttttatcctcgaagaagcctctgtttgtcatgtagcttgtgataaccacattgttgcctttggcttgcggcactgcgaagtgagagtaagtgaatgtcacatcgtttggatcaagacccatttgcagcacaagccctgttttgttcagcggcttgtaagggccggttaaagagtttgatacataaccaagcatgtaaatatcgtttgagttaataccatcgatcgtcatttttgaaccgcgtgaatcagtgaacaagtaccatttgccgttcattttgaaaacattcgcgcgctcgatttcatcagttaccgtgtttgaagtgatcagcggcttcattacttttttcaatgtgtaatcattatttaactctatgataccgagggcgccgttcgctaactcagcatcgcgttttttagcgctctgctgaagcttctggctttctttacggaagaagttcgtgccggccgccgtagtacgctttgttaaataaagattcttcgccttggtatccgttttctgttcccgtgttggcttcgaatacaaggtatttatggcctttgtctgcgctgttgtcaggctttgtttgccgtaatgtttaccggaatagtcagtgtagaataaacggatttttccgtcagatgtaaaggttgcagaaccggaccattcttgcgtctgatctttcaggatcggatcgttggcgtcgaacttatcgctgtctttaaagacacggcccgcgtttttccagctgtcgattgagttgtcgccgaccttttgataaaacatgtagattgatgtgtcatcagcgtctttcgggcttcccgcaagagcaaacacaacgtgatagccgttgtattcagctactgttccgtcagcgttttgcagcggccagctgtcccacacatcaagtccttttgcagactcaatatttttaatcgttgattgatcgaattgaggcacttggtatttttcgttttgctgctgtttactgagagatcccctcataatttccccaaagcgtaaccatgtgtgaataaattttgagctagtagggttgcagccacgagtaagtcttccgtttcgatttctgactgtgttagcctggaagtgcttgtcccaaccttgtttctgagcatgaacgcccgcaagccaacatgttagttgaagcatcagggcgattagcagcatgatatcaaaacgctctgagctgctcgttcggctatggcgtaggcctagtccgtaggcaggacttttcaagtctcggaaggtttcttcaatctgcattcgcttcgaatagatattaacaagttgtttgggtgttcgaatttcaacaggtaagttagttgctagaacccatggctcctttgccgacgctgagtagattttaggtgacgggtggtgacaatgagtccgtgtcgagcgctgattttttcggcctttagagcgagatttatacaatagaatttggcatgagattggattgcttttagtcagcctcttatagcctaaagtctttgagtgactagatgacatatcatgtaagttgctgataggtttccagttttccgctcctaggtctgcatattgtacttttcctcttactcgacttaaccagtaccaacccagcttctcaacggatttataccatggcactttaaagccagcatcactgacaatgagcggtgtggtgttactcggtagaatgctcgcaaggtcggctagaaattggtcatgagctttctttgaacattgctctgaaagcgggaacgctttctcataaagagtaacagaacgaccgtgtagtgcgactgaagctcgcaataccataagtcgttttggctcacgaatatcagaccagtcaacaagtacaatgggcatcgtattgcccgaacagataaagctagcatgccaccggtatacagccgagtcgctctttgtggaggtgacgattaccctaagatcccctgcttggagtgggacagtggtcaagacatatacaaccacaaacacccaaacattaacatcaacaagcat

SEQ ID NO: 21634 - DNA, 1872 bp, Homo sapiens
  SIMILAR (406)..(1443): 1001254mologous to Cloning vector pSacBII SacB,accession number U09128,Smith-Waterman Score=1841.
atggccgtcctgcagggagccctggcccgatgcctgcggaggttggagctgtgtctgcaggggatgccttggagatgcctgtgtaggagaagggctcaggcaaggttgcctgctaaaggccagtgccacattggtacaaggtgtgccttgaggaaggacgaggaaaagcagcggaagatagggactgggctgtttgcccatgaacaaggctgccgatggaccagcatcgtggtggtggtgggctctcagctcttccttcacctggctgagttcactattgtgtctgagcccgggaccatgggaggctctgatgccagtttcctgaggctgggacccaaccgaagcctccacttagggatcaatcagggagggcttcctgtaggagttgatgccagagtgggccctggaggagcgactcaagccttcgcgaaagaaaataaccaaaaagcatacaaagaaacgtacggcgtctctcatattacacgccatgatatgctgcagatccctaaacagcagcaaaacgaaaaataccaagtgcctcaattcgatcaatcaacgattaaaaatattgagtctgcaaaaggacttgatgtgtgggacagctggccgctgcaaaacgctgacggaacagtagctgaatacaacggctatcacgttgtgtttgctcttgcgggaagcccgaaagacgctgatgacacatcaatctacatgttttatcaaaaggtcggcgacaactcaatcgacagctggaaaaacgcgggccgtgtctttaaagacagcgataagttcgacgccaacgatccgatcctgaaagatcagacgcaagaatggtccggttctgcaacctttacatctgacggaaaaatccgtttattctacactgactattccggtaaacattacggcaaacaaagcctgacaacagcgcaggtaaatgtgtcaaaatctgatgacacactcaaaatcaacggagtggaagatcacaaaacgatttttgacggagacggaaaaacatatcagaacgttcagcagtttatcgatgaaggcaattatacatccggcgacaaccatacgctgagagaccctcactacgttgaagacaaaggccataaataccttgtattcgaagccaacacgggaacagaaaacggataccaaggcgaagaatctttatttaacaaagcgtactacggcggcggcacgaacttcttccgtaaagaaagccagaagcttcagcagagcgctaaaaaacgcgatgctgagttagcgaacggcgccctcggtatcatagagttaaataatgattacacattgaaaaaagtaatgaagccgctgatcacttcaaacacggtaactgatgaaatcgagcgcgcgaatgttttcaaaatgaacggcaaatggtacttgttcactgattcacgcggttcaaaaatgacgatcgatgagggagggagagagggggaccagccggtccagccccctgcgccagccccgtgggggaaagaggccgcagatgacctcatggaagcaacggtggtgaatcatggcccagaccacattcacatttccccgggggtgggcaagcgtgttgatcaccggaggggcagcttcaacacccagagagatggggggcagggccaggtgattcagaaactgatcgcatgccagagaaccaacgacccactgcccttcagcctcttcacaggggcatttgcaagagaaggagtttttcttttcaccagcgtcattcggaattgccaggacaaggctggtggctggccactactggaagacttccaggcgctctcccctctccagtccctgaaacattttggaagaagggagaggccgggaactttgggtccaacatga

SEQ ID NO: 21635 - DNA, 1516 bp, Homo sapiens; identical to SEQ ID NO: 19193
  SIMILAR (1012)..(137): 951254mologous to Methylomonas aminofaciens transposase,accession number AB026428,Smith-Waterman Score=1468.

SEQ ID NO: 21636 - DNA, 3084 bp, Homo sapiens
  SIMILAR (946)..(2355): 1001254mologous to Cloning vector pBACe3.6 levansucrase,accession number U80929,Smith-Waterman Score=2472.
atgaacatgaacatcaaaaaaattgtaaaacaagccacagttctgacttttacgactgcacttctggcaggaggagcgactcaagccttcgcgaaagaaaataaccaaaaagcatacaaagaaacgtacggcgtctctcatattacacgccatgatatgctgcagatccctaaacagcagcaaaacgaaaaataccaactgcatggtcttctctctccacaacacgcagacactattagaggtaaaagccacgtgtcctcaagagggcaaggcaaagcatcttcagatgtctctgcccttaaagcacacgcgttctgctctgcgacgaagcaggacaaggaggacagggacctgcacctccggaggcccgcacctacgaagatagcgggctcgggaccttcggtggaccggcagggttccagaggcccgcgcgccgccgccccgccctcattgctgagcctgccagcaccggaagtgacgcgttacgtgcccgcgtattcctaccggcgtattcccgccctgcttttcgcccgccgttccgtggcgggaactgaggcgactgtggggacatcagtgatccatccacccaacccaccagtatcaccaggaaaaactgtaaatgatgtcaacagcaataataacatgtcttacagaaatgcaggcacagtgagacagatgctggagtccaaaagaaatgtaagcgagagtgcaccaccatcctttcaaactcctgtgaatacagtatcttcaaccaatcttgtcactcctccagcagttgtcagtagtcaacctaaattgcagactccagtgacttcgggttccctcacagcaacgtcagttcttcctgcacccaatacagctactgtagttgctactactcagtcaattcgggaggatcgaaacggcagatcgcaaaaaacagtacatacagaaggagacatgaacatgaacatcaaaaaaattgtaaaacaagccacagttctgacttttacgactgcacttctggcaggaggagcgactcaagccttcgcgaaagaaaataaccaaaaagcatacaaagaaacgtacggcgtctctcatattacacgccatgatatgctgcagatccctaaacagcagcaaaacgaaaaataccaagtgcctcaattcgatcaatcaacgattaaaaatattgagtctgcaaaaggacttgatgtgtgggacagctggccgctgcaaaacgctgacggaacagtagctgaatacaacggctatcacgttgtgtttgctcttgcgggaagcccgaaagacgctgatgacacatcaatctacatgttttatcaaaaggtcggcgacaactcaatcgacagctggaaaaacgcgggccgtgtctttaaagacagcgataagttcgacgccaacgatccgatcctgaaagatcagacgcaagaatggtccggttctgcaacctttacatctgacggaaaaatccgtttattctacactgactattccggtaaacattacggcaaacaaagcctgacaacagcgcaggtaaatgtgtcaaaatctgatgacacactcaaaatcaacggagtggaagatcacaaaacgatttttgacggagacggaaaaacatatcagaacgttcagcagtttatcgatgaaggcaattatacatccggcgacaaccatacgctgagagaccctcactacgttgaagacaaaggccataaataccttgtattcgaagccaacacgggaacagaaaacggataccaaggcgaagaatctttatttaacaaagcgtactacggcggcggcacgaacttcttccgtaaagaaagccagaagcttcagcagagcgctaaaaaacgcgatgctgagttagcgaacggcgccctcggtatcatagagttaaataatgattacacattgaaaaaagtaatgaagccgctgatcacttcaaacacggtaactgatgaaatcgagcgcgcgaatgttttcaaaatgaacggcaaatggtacttgttcactgattcacgcggttcaaaaatgacgatcgatggtattaactcaaacgatatttacatgcttggttatgtatcaaactctttaaccggcccttacaagccgctgaacaaaacagggcttgtgctgcaaatgggtcttgatccaaacgatgtgacattcacttactctcacttcgcagtgccgcaagccaaaggcaacaatgtggttatcacaagctacatgacaaacagaggcttcttcgaggataaaaaggcaacatttgcgccaagcttcttaatgaacatcaaaggcaataaaacatccgttgtcaaaaacagcatcctggagcaaggacagctgacatggctccaagtagcgaagcgagcaggactgggcggcggccaaagcggtcggacagtgctccgagaacgggtgcgcatagaaattgcatcaacgcatatagcgctagctgtggaatgtgtgtcagttagggtgtggaaagtccccaggctccccagcaggcagaagtatgcaaagcatgcatctcaattagtcagcaaccagaaatcggaggaagaagaatatatgaaaacatttaacatttctcaacaagatctagaattagtagaagtagcgacagagaagattacaatgctttatgaggataataaacatcatgtgggagcggcaattcgtacgaaaacaggagaaatcatttcggcagtacatattgaagcgtatataggacgagtaactgtttgtgcagaagccattgcgattggtagtgcagtttcgaatggacaaaaggattttgacacgattgtagctgttagacacccttattctgacgaagtagatagaagtattcgagtgattccaacctatggaactgatgaatgggagcagtggtggaatgcctttaatgaggaaaacctgttttgctcagaagaaatgccatctagtgatgatgaggctactgctgactctcaacattctactcctccaaaaaagaagagaaagtacatctacgtattagtcatcgctattaccatggtgatgcggttttggcagtacatcaatgggcgtggatag

SEQ ID NO: 21637 - DNA, 1353 bp, Homo sapiens
  SIMILAR (1353)..(169): 991254mologous to Methylomonas aminofaciens transposase,accession number AB026428,Smith-Waterman Score=2074.
ctcccttcctgcctcctttaggagtccgcagtatctattgtttctatctccatgttcatgagtacccagtgtgccagtctcacttatacgtgagaaaatgcggtatttgattttccgtttccccattaattcatttaggataatggcctccagttgcatccatgtttcatgtgtgaataaattttgagctagtagggttccagccacgagtaagtcttcccttgttattgtgtagccagaatgccgcaaaacttccatgcctaagcgaactgttgagagtacgtttcgatttctgactgtgttagcctggaagtgcttgtcccaaccttgtttctgagcatgaacgcccgcaagccaacatgttagttgaagcatcagggcgattagcagcatgatatcaaaacgctctgagctgctcgttcggctatggcgtaggcctagtccgtaggcaggacttttcaagtctcggaaggtttcttcaatctgcattcgcttcgaatagatattaacaagttgtttgggtgttcgaatttcaacaggtaagttagttgctagaacccatggctcctttgccgacgctgagtagattttaggtgacgggtggtgacaatgagtccgtgtcgagcgctgattttttcggcctttagagcgagatttatacaatagaatttggcatgagattggattgcttttagtcagcctcttatagcctaaagtctttgagtgactagatgacatatcatgtaagttgctgataggtttccagttttccgctcctaggtctgcatattgtacttttcctcttactcgacttaaccagtaccaacccagcttctcaacggatttataccatggcactttaaagccagcatcactgacaatgagcggtgtggtgttactcggtagaatgctcgcaaggtcggctagaaattggtcatgagctttctttgaacattgctctgaaagcgggaacgctttctcataaagagtaacagaacgaccgtgtagtgcgactgaagctcgcaataccataagtcgtttttgctcacgaatatcagaccagtcaacaagtacaatgggcatcgtattgcccgaacagataaagctagcatgccaacggtatacagcgagtcgctctttgtggaggtgacgattacctaacaatcggtcgattcgtttgatgttatgttttgttctcgctttggttggcaggttacggccaagttcggtaagagtgagagttttacagtcaagtaatgcgtggcaagccaacgttaagctgttgagtcgttttaagtgtaattcggggcagaattggtaaagagagtcgtgtaaaatatcgagttcgcacat

SEQ ID NO: 21638 - DNA, 2044 bp, Homo sapiens
  SIMILAR (626)..(2041): 1001254mologous to Cloning vector pSacBII SacB,accession number U09128,Smith-Waterman Score=2484.
atggaagccacagggtatacagagatacaagaaggcatcaaagatggatctttgcagaacctctgcctgaaggagacagaaggggcatctggaaagaaaggaggagacctcagaacacagttgccttggctacagcagcagcagttcctttcgatcatagcactcttacgccagtgtggcattgctgacaacttcaccacctgcccctacacttctacaccagcagagacacaccttcctctcccctcagcagcacagaaagccaaagccacagccctctgccatttctgtgactccccaaagcactgggtggaaagaacactatgtaggcattattctgaggtcacacgtgtttaccttaaccccagaatttgtgcagatctttctgcctttgctgatttgcctggtgtgacctggggcacaacccactctcatccgaagtcataccagggctctacggcggtcaccatgactgtagaaactacccctcaagagcatccacttccacacacactgtcacctaaatgtcgacggccaggcggccgccaggcctacccactagtcaattcgggaggatcgaaacggcagatcgcaaaaaacagtacatacagaaggagacatgaacatgaacatcaaaaaaattgtaaaacaagccacagttctgacttttacgactgcacttctggcaggaggagcgactcaagccttcgcgaaagaaaataaccaaaaagcatacaaagaaacgtacggcgtctctcatattacacgccatgatatgctgcagatccctaaacagcagcaaaacgaaaaataccaagtgcctcaattcgatcaatcaacgattaaaaatattgagtctgcaaaaggacttgatgtgtgggacagctggccgctgcaaaacgctgacggaacagtagctgaatacaacggctatcacgttgtgtttgctcttgcgggaagcccgaaagacgctgatgacacatcaatctacatgttttatcaaaaggtcggcgacaactcaatcgacagctggaaaaacgcgggccgtgtctttaaagacagcgataagttcgacgccaacgatccgatcctgaaagatcagacgcaagaatggtccggttctgcaacctttacatctgacggaaaaatccgtttattctacactgactattccggtaaacattacggcaaacaaagcctgacaacagcgcaggtaaatgtgtcaaaatctgatgacacactcaaaatcaacggagtggaagatcacaaaacgatttttgacggagacggaaaaacatatcagaacgttcagcagtttatcgatgaaggcaattatacatccggcgacaaccatacgctgagagaccctcactacgttgaagacaaaggccataaataccttgtattcgaagccaacacgggaacagaaaacggataccaaggcgaagaatctttatttaacaaagcgtactacggcggcggcacgaacttcttccgtaaagaaagccagaagcttcagcagagcgctaaaaaacgcgatgctgagttagcgaacggcgccctcggtatcatagagttaaataatgattacacattgaaaaaagtaatgaagccgctgatcacttcaaacacggtaactgatgaaatcgagcgcgcgaatgttttcaaaatgaacggcaaatggtacttgttcactgattcacgcggttcaaaaatgacgatcgatggtattaactcaaacgatatttacatgcttggttatgtatcacactctttaaccggcccttacaagccgctgaacaaaacagggcttgtgctgcaaatgggtcttgatccaaacgatgtgacattcacttactctcacttcgcagtgccgcaagccaaaggcaacaatgtggttatcacaagctacatgacaaacagaggcttcttcgaggataaaaaggcaacatttgcgccaagcttcttaatgaacatcaaaggcaataaaacatccgttgtcaaaaacagcatcctggagcaaggacagctgacagtcaactaa

SEQ ID NO: 21639 - DNA, 2814 bp, Homo sapiens
  SIMILAR (7)..(1050): 971254mologous to Cloning vector pSacBII SacB,accession number U09128,Smith-Waterman Score=1781.
atgaacatgaacatcaaaaaaattgtaaaacaagccacagttctgacttttacgactgcacttctggcaggaggagcgactcaagccttcgcgaaagaaaataaccaaaaagcatacaaagaaacgtacggcgtctctcatattacacgccatgatatgctgcagatccctaaacagcagcaaaacgaaaaataccaagtgcctcaattcgatcaatcaacgattaaaaatattgagtctgcaaaaggacttgatgtgtgggacagctggccgctgcaaaacgctgacggaacagtagctgaatacaacggctatcacgttgtgtttgctcttgcgggaagcccgaaagacgctgatgacacatcaatctacatgttttatcaaaaggtcggcgacaactcaatcgacagctggaaaaacgcgggccgtgtctttaaagacagcgataagttcgacgccaacgatccgatcctgaaagatcagacgcaagaatggtccggttctgcaacctttacatctgacggaaaaatccgtttattctacactgactattccggtaaacattacggcaaacaaagcctgacaacagcgcaggtaaatgtgtcaaaatctgatgacacactcaaaatcaacggagtggaagatcacaaaacgatttttgacggagacggaaaaacatatcagaacgttcagcagtttatcgatgaaggcaattatacatccggcgacaaccatacgctgagagaccctcactacgttgaagacaaaggccataaataccttgtattcgaagccaacacgggaacagaaaacggataccaaggcgaagaatctttatttaacaaagcgtactacggcggcggcacgaacttcttccgtaaagaaagccagaagcttcagcagagcgctaaaaaacgcgatgctgagttagcgaacggcgccctcggtatcatagagttaaataatgattacacattgaaaaaagtaatgaagccgctgatcacttcaaacacggtatttattcgcgataagctcatggagcggcgtaaccgtcgcacaggaaggacagagaaagcgcggatctgggaagtgacggacagaacggtcaggacctggattggggaggcggttgccgccgctgctgctgacggtgtgacgttctctgttccggtcacaccacatacgttccgccattcctatgcgatgcacatgctgtatgccggtataccgctgaaagttctgcaaagcctgatgggacataagtccatcagttcaacggaagtctacacgaaggtttttgcgctggatgtggctgcccggcaccggtgtgacaatctaaaaacttgtcacacttcacatggatctgtcatggcggaaacagcggttatcaatcacaagaaacgtaaaaatagcccgcgaatcgtccagtcaaacgacctcactgaggcggcatatagtctctcccgggatcaaaaacgtatgctgtatctgttcgttgaccagatcagaaaatctgatggcaccctacaggaacatgacggtatctgcgagatccatgttgctaaatatgctgaaatattcggattgacctctgcggaagccagtaaggatatacggcaggcattgaagagtttcgcggggaaggaagtggttttttatcgccctgaagaggatgccggcgatgaaaaaggctatgaatcttttccttggtttatcaaacgtgcgcacagtccatccagagggctttacagtgtacatatcaacccatatctcattcccttctttatcgggttacagaaccggtttacgcagtttcggcttagtgaaacaaaagaaatcaccaatccgtatgccatgcgtttatacgaatccctgtgtcagtatcaaacgtacggcgtctctcaaatatacaaaaatgatatactgcagatccctaaacagcagcaaaacgaaaaataccaagtgcctcaattcgatcaatcaacgattaaaaatattgagtctgcaaaaggacttgatgtgtgggacagctggccgctgcaaaacgctgacggaacagtagctgaatacaacggctatcacgttgtgtttgctcttgcgggaagcccgaaagacgctgatgacacatcaatctacatgttttatcaaaaggtcggcgacaactcaatcgacagctggaaaaacgcgggccgtgtctttaaagacagcgataagttcgacgccaacgatccgatcctgaaagatcagacgcaagaatggtccggttctgcaacctttacatctgacggaaaaatccgtttattctacactgactattccggtaaacattacggcaaacaaagcctgacaacagcgcaggtaaatgtgtcaaaatctgatgacacactcaaaatcaacggagtggaagatcacaaaacgatttttgacggagacggaaaaacatatcagaacgttcagcagtttatcgatgaaggcaattatacatccggcgacaaccatacgctgagagaccctcactacgttgaagacaaaggccataaataccttgtattcgaagccaacacgggaacagaaaacggataccaaggcgaagaatctttatttaacaaagcgtactacggcggcggcacgaacttcttcctgccgcaagccaaaggcaacaatgtggttatcacaagctacatgacaaacagaggcttcttcgaggataaaaaggcaacatttgcgccaagcttcttaatgaacatcaaaggcaataaaacatccgttgtcaaaaacagcatcctggagcaaggacagctgacagtcaactaa

SEQ ID NO: 21640 - DNA, 2499 bp, Homo sapiens
  SIMILAR (622)..(1611): 971254mologous to Methylomonas aminofaciens transposase,accession number AB026428,Smith-Waterman Score=1670.
atgagccgcctgctctggaggaaggtggccggcgccaccgtcgggccagggccggttccagctccggggcgctgggtctccagctccgtccccgcgtccgaccccagcgacgggcagcggcggcggcagcagcagcagcagcagcagcagcagcagcaacagcagcctcagcagccgcaagtgctatcctcggagggcgggcagctgcggcacaacccattggacatccagatgctctcgagagggctgcacgagcaaatcttcgggcaaggaggggagatgcctggcgaggccgcggtgcgccgcagcgtcgagcacctgcagaagcacgggctctgggggcagccagccgtgcccttgcccgacgtggagctgcgcctgccgcccctctacggggacaacctggaccagcacttccgcctcctggcccagaagcagagcctgccctacctggaggcggccaacttgctgttgcaggcccagctgcccccgaagcccccggcttgggcctgggcggagggctggacccggtacggccccgagggggaggccgtacccgtggccatccccgaggagcgggccctggtgttcgacgtggaggtctgcttggcagagggaacttgccccacattggcggtggccatatccccctcggcctgcttaacgttggcttgccacgcattacttgactgtaaaactctcactcttaccgaacttggccgtaacctgccaaccaaagcgagaacaaaacataacatcaaacgaatcgaccgattgttaggtaatcgtcacctccacaaagagcgactcgctgtataccgttggcatgctagctttatctgttcgggcaatacgatgcccattgtacttgttgactggtctgatatccgtgagcaaaaacggcttatggtattgcgagcttcagtcgcactacacggtcgttctgttactctttatgagaaagcgttcccgctttcagagcaatgttcaaagaaagctcatgaccaatttctagccgaccttgcgagcattctaccgagtaacaccacaccgctcattgtcagtgatgctggctttaaagtgccatggtataaatccgttgagaagctgggttggtactggttaagtcgagtaagaggaaaagtacaatatgcagacctaggagcggaaaactggaaacctatcagcaacttacatgatatgtcatctagtcactcaaagactttaggctataagaggctgactaaaagcaatccaatctcatgccaaattctattgtataaatctcgctctaaaggccgaaaaaatcagcgctcgacacggactcattgtcaccacccgtcacctaaaatctactcagcgtcggcaaaggagccatgggttctagcaactaacttacctgttgaaattcgaacacccaaacaacttgttaatatctattcgaagcgaatgcagattgaagaaaccttccgagacttgaaaagtcctgcctacggactaggcctacgccatagccgaacgagcagctcagagcgttttgatatcatgctgctaatcgccctgatgcttcaactaacatgttggcttgcgggcgttcatgctcagaaacaagtggtacagacctgcgcccctgtgctccaggaagcgccttctgaggctgagtttggaggaagtgaagccacctcagaactgaacccctcctcagtggagcccccgggggtgaccccagcgcttccttctgcagcctgtggcttatgcatgagtgtgacagaagctccttctgcttcttgccaccagatgaacttcctgctgagtaattggagctggagaaatggtgcatccatccagctgctgcgcttggagactttgattaagggtcagcaggttaacttgttgccattcagcatgcaggcgggctcctcatcctgtcctgaggagtccctggccaccaccctgggttcagcaggagcagggcacaccactgtagcactatttcaagacttcctgttccgaggagagattttaattatccctggagacatgtctgaattacaaacccccacgggcccatggcacacactgtttatgttcttccaaagggatgttgtttgtgatctggagcgtgggctcaagaggcttgctgctttctcgtttgccatcttggggcactgttgtgaggctgccatgcaagtccagctactgcagggtgagaagcctcgaggaggaggaggacagagccttccccggccaacagcctgcaccacctgccgaacagtggagaagggagtttcattctccatcaccatcaccatcaacaacatcatcatcatcatcaccatcaccatcatcattaccatcattattatcaacatcatcctcaccatcatcattatcatcatcaccatcattaccatcaccatcatcatcttaaccattgttatcatcatcactgtcatcaccatcattatcatcatcaccatcactatcatttgcttctga

SEQ ID NO: 21641 - DNA, 3723 bp, Homo sapiens
  SIMILAR (250)..(1053): 991254mologous to Cloning vector pBACe3.6 levansucrase,accession number U80929,Smith-Waterman Score=1415.
  misc_feature (1)...(3723): n = a,t,c or g
atgccaccactcggccaagaaggcgtgtttggctacgacagcccagagtccagagccacggcacttccggttgctgtccacgcggcttctgctgacaatccaggcctgctctgcaacaagaatagattcttctggaatgttttccccatggctcaccctcatggaagcacaaaggccatcccacagaggggcacaaaggaaacagctatgacgagcaaggccaacacaacacaaaacaacacccacaagtaccacagctggccgctgcaaaacgctgacggaacagtagctgaatacaacggctatcacgttgtgtttgctcttgcgggaagcccgaaagacgctgatgacacatcaatctacatgttttatcaaaaggtcggcgacaactcaatcgacagctggaaaaacgcgggccgtgtctttaaagacagcgataagttcgacgccaacgatccgatcctgaaagatcagacgcaagaatggtccggttctgcaacctttacatctgacggaaaaatccgtttattctacactgactattccggtaaacattacggcaaacaaagcctgacaacagcgcaggtaaatgtgtcaaaatctgatgacacactcaaaatcaacggagtggaagatcacaaaacgatttttgacggagacggaaaaacatatcagaacgttcagcagtttatcgatgaaggcaattatacatccggcgacaaccatacgctgagagaccctcactacgttgaagacaaaggccataaataccttgtattcgaagccaacacgggaacagaaaacggataccaaggcgaagaatctttatttaacaaagcgtactacggcggcggcacgaacttcttccgtaaagaaagccagaagcttcagcagagcgctaaaaaacgcgatgctgagttagcgaacggcgccctcggtatcatagagttaaataatgattacacattgaaaaaagtaatgaagccgctgatcacttcaaacacggtaactgatgaaatcgagcgcgcgaatgttttcaaaatgaacggcaaatgnaggaaccccctgcagatccctaaacagcagcaaaacgaaaaataccaagtgcctcaattcgatcaatcaacgattaaaaatattgagtctgcaaaaggacttgatgtgtgggacagctggccgctgcaaaacgctgacggaacagtagctgaatacaacggctatcacgttgtgtttgctcttgcgggaagcccgaaagacgctgatgacacatcaatctacatgttttatcaaaaggtcggcgacaactcaatcgacagctggaaaaacgcgggccgtgtctttaaagacagcgataagttcgacgccaacgatccgatcctgaaagatcagacgcaagaatggtccggttctgcaacctttacatctgacggaaaaatccgtttattctacactgactattccggtaaacattacggcaaacaaagcctgacaacagcgcagatattccagatgattacagtttttattaccagcctctgcaacactacctccagccacatctgtctccacatcagctgggtcaccacaatgcacggcgccatgcctcatcccggccacatccccacagcccctgcttctttacctgccaaggtgaaaggttccgggaaggtctgctggctggccttccctttatcagaactcaccccccccagtgccttacaggtaaatgtgtcaaaatctgatgacacactcaaaatcaacggagtggaagatcacaaaacgatttttgacggagacggaaaaacatatcagaacgttcagcattttatcgatgaaggcaattatacatgcggcgacaaccatacgctgagagaccctcactacgttgaagacaaaggccataaataccttgtattcgaagccaacacgggaacagaaaacggataccaaggcgaagaatctttatttaacaaagcgtactacggcggcggcacgaacttcttccgtaaagaaagccagaagcttcagcagagcgctaaaaaacgcgatgctgagttagcgaacggcgccctcggtatcatagagttaaataatgattacacattgaaaaaagtaatgaagccgctgatcacttcaaacacggtaactgatgaaatcgagcgcgcgaatgttttcaaaatgaacggcaaatggtacttgttcactgattcacgcggttcaaaaatgacgatcgatggtattaactcaaacgatatttacatgcttggttatgtatcaaactctttaaccggcccttacaagccgctgaacaaaacagggcttgtgctgcaaatgggtcttgatccaaacgatgtgacattcacttactctcacttcgcagtgccgcaagccaaaggcaacaatgtggttatcacaagctacatgacaaacagaggcttcttcgaggataaaaaggcaacatttgcgccaagctctgatgaatcccctaatgattttggtaatcgtcacctccacaaagagcgactcgctgtataccgttggcatgctagctttatctgttcgggcaatacgatgcccattgtacttgttgactggtctgatattcgtgagcaaaaacgacttatggtattgcgagcttcagtcgcactacacggtcgttctgttactctttatgagaaagcgttcccgctttcagagcaatgttcaaagaaagctcatgaccaatttctagccgaccttgcgagcattctaccgagtaacaccacaccgctcattgtcagtgatgctggctttaaagtgccatggtataaatccgttgagaagctgggttggtactggttaagtcgagtaagaggaaaagtacaatatgcagacctaggagcggaaaactggaaacctatcagcaacttacatgatatgtcatctagtcactcaaagactttaggctataagaggctgactaaaagcaatccaatctcatgccaaattctattgtataaatctcgctctaaaggccgaaaaaatcagcgctcgacacggactcattgtcaccacccgtcacctaaaatctactcagcgtcggcaaaggagccatgggttctagcaactaacttacctgttgaaattcgaacacccaaacaacttgttaatatctattcgaagcgaatgcagattgaagaaaccttccgagacttgaaaagtcctgcctacggactaggcctacgccatagccgaacgagcagctcagagcgttttgatatcatgctgctaatcgccctgatgcttcaactaacatgttggcttgcgggcgttcatgctcagaaacaaggttgggacaagcacttccaggctaacacagtcagaaatcgaaacgtactctcaacagttcgcttaggcatggaagttttgcggcattctggctacacaataacaagggaagacttactcgtggctgcaaccctactagctcaaaatttattcacacatggtctcttcggccccagcgtcgacgcaccgcctccaaaacggggcttcaaacgtcctaaactcccagaacttcgtttacagcgcttcttcggtggggtgatcacccctccgctggaatcctattcgctcccatccgatcctgttcacctcttccccccccgccgaccccctcggcagcttactgcttctccgcttcgcgcccgagctccgtatgaatgttcatcatgcaaagatgct

SEQ ID NO: 21642 - DNA, 3505 bp, Homo sapiens
  SIMILAR (2087)..(3502): 1001254mologous to Cloning vector pBACe3.6 levansucrase,accession number U80929,Smith-Waterman Score=2482.
atgcgtatgttgcaggaagagaatatctggatcgtcggtacggcaggcgaggcggatcatacactctatcagagcaaaatgaccggacgcctggcgctggtgataatgcaccacattatgggaaaactctttttcacagtatttgcatttgagcgcgatatcattgataccttaaaagtggtgctgatcccggtgctgatcgccggagcaactgcgctattactgagtcgcgcgctgaacagtttgagcctcggcagcgacaccgcgacggcgctgggcagtcgcgtggcgcgcacacagttgattggtctgctggcgattaccgtgctttgtggtagtgcgacggcaatagttggcccgattgcctttattggcctgatgatgccgcatatggcgcgttggctggtgggtgccgatcatcgctggtcgctgcccgtcacgctacttgctacccctgttgtcaccaccccgtcggcaaaggagccatggattctagcaactaacttacctgttgaaattcgaacacccaaacaacttgttaatatctattcgaagcgaatgcagattgaagaaaccttccgagacttgaaaagtcctgcctacggactaggcctacgccatagccgaacgagcagctcagagcgttttgatatcatgctgctaatcgccctgatgcttcaactaacatgttggcttgcgggcgttcatgctcagaaacaaggttgggacaagcacttccaggctaacacagtcagaaatcgaaacgtactctcaacagttcgcttaggcatggaagttttgcggcattctggctacacaataacaagggaagacttactcgtggctgcaaccctactagctcaaaatttattcacacatggctatcgccattgcacagtttaatgatgacagcccggaagcgaggaaaataacccggcgctggagaataggtgaagcagcggatttagttggggtttcttctcaggctatcagagatgccgagaaagcagggcgactaccgcacccggatatggaaattcgaggacgggttgagcaacgtgttggttatacaattgaacaaattaatcatatgcgtgatgtgtttggtacgcgattgcgacgtgctgaagacgtatttccaccggtgatcggggttgctgcccataaaggtggcgtttacaaaacctcagtttctgttcatcttgctcaggatctggctctgaaggggctacgtgttttgctcgtggaaggtaacgacccccagggaacagcctcaatgtatcacggatgggtaccagatcttcatattcatgcagaagacactctcctgcctttctatcttggggaaaaggacgatgtcacttatgcaataaagcccacttgctggccggggcttgacattattccttcctgtctggctctgcaccgtattgaaactgagttaatgggcaaatttgatgaaggtaaactgcccaccgatccacacctgatgctccgactggccattgaaactgttgctcatgactatgatgtcatagttattgacagcgcgcctaacctgggtatcggcacgattaatgtcgtatgtgctgctgatgtgctgattgttcccacgcctgctgagttgtttgactacacctccgcactgcagtttttcgatatgcttcgtgatctgctcaagaacgttgatcttaaagggttcgagcctgatgctgaaacaagccagggagctctgggcacactggcaaatgtagtgacctcccttgccaacctaagtgaatctttgaacaacggtgacacttcagaaatccagccagaggaccagtctgcaagtgagataactcgggcatttgataccttagctaaagcacttaataccacagacagctcctcttctccaagcttggcagatgggatagacaccagtggaggagggagcatccacgtcatcagcagagaccagtcgacacccatcattgaggttgaaggccccctcctttcagacacacacgtcacatttaagtcaattcgggaggatcgaaacggcagatcgcaaaaaacagtacatacagaaggagacatgaacatgaacatcaaaaaaattgtaaaacaagccacagttctgacttttacgactgcacttctggcaggaggagcgactcaagccttcgcgaaagaaaataaccaaaaagcatacaaagaaacgtacggcgtctctcatattacacgccatgatatgctgcagatccctaaacagcagcaaaacgaaaaataccaagtgcctcaattcgatcaatcaacgattaaaaatattgagtctgcaaaaggacttgatgtgtgggacagctggccgctgcaaaacgctgacggaacagtagctgaatacaacggctatcacgttgtgtttgctcttgcgggaagcccgaaagacgctgatgacacatcaatctacatgttttatcaaaaggtcggcgacaactcaatcgacagctggaaaaacgcgggccgtgtctttaaagacagcgataagttcgacgccaacgatccgatcctgaaagatcagacgcaagaatggtccggttctgcaacctttacatctgacggaaaaatccgtttattctacactgactattccggtaaacattacggcaaacaaagcctgacaacagcgcaggtaaatgtgtcaaaatctgatgacacactcaaaatcaacggagtggaagatcacaaaacgatttttgacggagacggaaaaacatatcagaacgttcagcagtttatcgatgaaggcaattatacatccggcgacaaccatacgctgagagaccctcactacgttgaagacaaaggccataaataccttgtattcgaagccaacacgggaacagaaaacggataccaaggcgaagaatctttatttaacaaagcgtactacggcggcggcacgaacttcttccgtaaagaaagccagaagcttcagcagagcgctaaaaaacgcgatgctgagttagcgaacggcgccctcggtatcatagagttaaataatgattacacattgaaaaaagtaatgaagccgctgatcacttcaaacacggtaactgatgaaatcgagcgcgcgaatgttttcaaaatgaacggcaaatggtacttgttcactgattcacgcggttcaaaaatgacgatcgatggtattaactcaaacgatatttacatgcttggttatgtatcaaactctttaaccggcccttacaagccgctgaacaaaacagggcttgtgctgcaaatgggtcttgatccaaacgatgtgacattcacttactctcacttcgcagtgccgcaagccaaaggcaacaatgtggttatcacaagctacatgacaaacagaggcttcttcgaggataaaaaggcaacatttgcgccaagcttcttaatgaacatcaaaggcaataaaacatccgttgtcaaaaacagcatcctggagcaaggacagctgacagtcaactaa

SEQ ID NO: 21643 - DNA, 6033 bp, Homo sapiens
  SIMILAR (5085)..(5150): 1001254mologous to Cloning vector pBACe3.6 levansucrase,accession number U80929,Smith-Waterman Score=118.
  misc_feature (1)...(6033): n = a,t,c or g
atgcccttgagagccttcaacccagtcagctccttccggtgggcgcggggcatgactatcgtcgccgcacttatgactgtcttctttatcatgcaactcgtaggacaggtgccggcagcgctctgggtcattttcggcgaggaccgctttcgctggagcgcgacgatgatcggcctgtcgcttgcggtattcggaatcttgcacgccctcgctcaagccttcgtcactggtcccgccaccaaacgtttcggcgagaagcaggccattatcgccggcatggcggccgacgcgctgggctacgtcttgctggcgttcgcgacgcgaggctggatggccttccccattatgattcttctcgcttccggcggcatcgggatgcccgcgttgcaggccatgctgtccaggcagcctaacttcgatcattggaccgctgatcgtcacggcgatttatgccgcctcggcgagcacatggaacgggttggcatggattgtaggcgccgccctataccttgtctgcctccccgcgttgcgtcgcggtgcatggagccgggccacctcgacctgaatggaagccggcggcacctcgctaacggattcaccactccaagaattggagccaatcaattcttgcggagaactgtgaatgcgcaaaccaacccttggcagaacatatccatcgcgtccgccatctccagcagccgcacgcggcgcatctcgggcagcgttgggtcctggccacggtctggaaacgcggaagtcagcgccctgcaccattatgttccggatctgcatcgcaggatgctgctggctaccctgtggaacacctacatctgtattaacgaagcgctggcattgaccctgagtgatttttctctggtcccgccgcatccataccgccagttgtttaccctcacaacgttccataaccgggcatgttcatcatcagtaacccgtatcgtgagcatcctctctcgtttcatcggtatcattacccccatgaacagaaatcccccttacacggaggcatcagtgaccaaacaggaaaaaaccgcccttaacatggcccgctttatcagaagccagacattaacgcttctggagaaactcaacgagctggacgcggatgaacaggcagacatctgtgaatcgcttcacgaccacgctgatgagctttaccgcagctgcctcgcgcgtttcggtgatgacggaggagcgactcaagccttcgcgaaagaaaataaccaaaaagcatacaaagaaacgtacggcgtctctcatattacacgccatgatatgctgcagatccctaaacagcagcaaaacgaaaaataccaaagtgcctcaattcgatcaatcaacgattataaatattgagtctgcaaaaggacttgatgtgtgggacagctggccgctgcaaaacgctgacggaacagtagctgaatacaacggctatcacgttgtgtttgctcttgcgggaagcccgaaagacgctgatgacacatcaatctacatgttttatcaaaaggtcggcgacaactcaatcgacagctggaaaaacgcgggccgtgtctttaaagacagcgataagttcgacgccaacgatccgatcctgaaagatcagacgcaagaatggtccggttctgcaacctttacatctgacggaaaaatccgtttattctacactgactattccggtaaacattacggcaaacaaagcctgacaacagcgcaggtaaatgtgtcaaaatctgatgacacactcaaaatcaacggagtggaagatcacaaaacgatttttgacggagacggaaaaacatatcagaacgttcagcagtttatcgatgaaggcaattatacatccggcgacaaccatacgctgagagaccctcactacgttgaagacaaaggccataaataccttgtattcgaagccaacacgggaacaaaaaaacggataccaaggcgaagaatctttatttaacaaagccgtactacgggcgggcggcacgaacttctttccgtaaagaaagccagaagcttcaagcagagcgctaaaaaacgcgatgctgagttagcgaacggcgccctcggtatcatagagttaaataatgattacacattgaaaaaagtaatgaagccgcttatcactttaaacaccgtaactgatgaaatcgagcgcgcgaatgttttcaaaatgaaacgcaaagggtacttgttcactgattcacgcggttcaaaaatgacgatcgatggtattaactcaaacgatatttacatgcttggttatgtatcaaactctgtaaccggcccttacaagccgctgaacaaaacagggcttgtgctgcaaatgggtcttgatccaaacgatgtgacattcacttactctcacttcgcagtgccgcaagccaaaggcaacaatgtggttatcacaagctacatgacaaacagaggcttcttcgaggataaaaaggcaacatttgcgccaagcttcttaatgaacatcaaaggcaataaaacatccgttgtcaaaaacagcatcctggagcaaggacagctgacagtcgggggccaaccccttcgcccagtgaaaaaccgcggccgggtctttaaaaacagcgatagttcgacgcccaacgatccgatcctgaaagatcagacgcaagaatggtccggttctgcaacctttacctctgagggaaaaatccgtttattctacactgactattccggtaaacattccggcaaacaaagcttgacaacagcgcaggtaaatgtgtcaaaatctgatgacacactcaaaatcaacggagtggaagatcacaaaacgatttttgacggagacggaaaaacatatcagaacgttcagcagtttatcgatgaaggcaattatacatccggcgacaaccatacgctgagagaccctcactacgttgaagacaaaggccataaataccttgtattcgaagccaacacgggaacagaaaacggataccaaggcgaagaatctttatttaacaaagcgtactacggcggcggcacgaacttcttccgtaaagaaagccagaagcttcagcagagcgctaaaaaacgcgatgctgagttagcgaacggcgccctcggtatcatagagttaaataatgattacacattgaaaaaagtaatgaagccgctgatcacttcaaacacggtaactgatgaaatcgagcgcgcgaatgttttcaaaatgaacggcaaatggtacttgttcactgattcacgcgggtcaaaaatgacgatcgatgacatgttagttgttgcaaacgttgtgggaaccggaggtgaatccacggtttatccgttgggtttggtctgcggggaagcccgaaagccggttgattccccaccattctccagttttatcaaagggtggcggccactccaatcgcaagctggaaaacgggggccggttcttaaagacagcgataagttcgacgccacgatcccgatcctgaagatccagacgcaaagaatgtcgggttctgcaacctttacatctgacggaaaaatccgtttattctacactgactattccggtaaacattacggcaaacaaagcctgacaacagcgcaggtaaatgtgtcaaaatctgatgacacactcanaatcaacggagtggaagatcacaaaacgatttttgacggagacggaaaaacatatcagaacgttcagcagtttatcgatgaaggcaattatacatccggcgacaaccatacgctgagagaccctcactacgttgaagacaaaggccataaataccttgtattcgaagccaacacgggaacagaaaacggataccaaggcgaagaatctttatttaacaaagcgtactacggcggcggcacgaacttcttccgtaaagaaagccagaagcttcagcagagcgctaaaaaacgcgatgctgagttagcgaacggcgccctcggtatcatagagttaaataatgattacacattgaaaaaagtaatgaagccgctgatcacttcaaacacggtaactgatgaaatcgagcgcgcgaatgttttcaaaatgaacggcaaatggtacttgttcactgattcacgcggttcaaaaatgacgatcgatgtctcaagccatcgaaaggccacgccgcgcacaccgcccagcgaccggccgccgcccgcgtgcggcagcaaagcaacacaaaaacaggcaccaccgaccaggcgtcccgggaaagacagaaaacccacaacacggcgccgacaactggggaagacacgcaagagggcccgagaacagagcggacgcccccgggcacaagagggaaacgccgaacaggaagacccggcacaacacaaaacgagcaaagggaagagagaaagagccaccaagcacaggaaaaggcgggacaggccaccagcaaacaaggcgagccacaccccccccacaacgaaatacgacctcacactcactagaacgcgacaatgtcctgtgcatgtagccagggtgttactccaactgaagtgggtcactttccatgactccaactccagagtattggtgcagatgttttgtgcaggggaagagcataatgaacgaggactcttagagtccaagaccgttcagctggatattacggcctttttaaagaccgtaaagaaaaattaagcacaagtttttatccggcctttattcacattcttgcccgcctgatgaatgctcatccggagttccgtatggcaatgaaagacggtgagctggtgatatgggatagtgttcacccttgttacaccgttttccatgagcaaactgaaacgttttcatcgctctggagtgaataccacgacgatttccggcagtttctacacatatattcgcaagatgtggcgtgttacggtgaaaacctggcctatttccctaaagggtttattgagaatatgtttttcgtctcagccaatccctgggtgagtttcaccagttttgatttaaacgtggccaatatggacaacttcttcgcccccgttttcaccatgggcaaatattatacgcaaggcgacaaggtgctgatgccgctggcgattcagatcagacgcaagaatggtccggttctgcaacctttacatctgacggaaaaatccgtttattctaccactgactattccggtaaacattacggcaaacaaagcctgacaacagcgcaggtaaatgtgtcaaaatctgatgacacactcaaaatcaacggagtggaagatcacaaaacgatttttgacggagacggaaaaacatatcagaacgttcagcagtttatcgatgaaggcaattatacatccggcgacaaccatacgctgagagaccctcactacgttgaagacaaaggccataaataccttgtattcgaagccaacacgggaacagaaaacggataccaaggcgaagaatctttatttaacaaagcgtactacggcggcggcacgaacttcttccgtaaagaaagccagaagcttcagcagagcgctaaaaaacgcgatgctgagttagcgaacggcgccctcggtatcatagagttaaataatgattacacattgaaaaaagtaatgaagccgctgatcacttcaaacacggtaactgatgaaatcgagcgcgcgaatgttttcaaaatgaacggcaaatggtacttgttcactgattcacgcggttcaaaaatgacgatcgatggtattaactcaaacgatatttacatgcttggttatgtatcaaactctttaaccggcccttacaagccgctgaacaaaacagggcttgtgctgcaaatgggtcttgatccaaacgatgtgacattcacttactctcacttcgcagtgccgcaagccaaaggcaacaatgtggttatcacaagctacatgacaaacagaggcttcttcgaggataaaaaggcaacatttgcgccaagcttcttaatgaacatcaaaggcaataaaacatccgttgtcaaaaacagcatcctggagcaaggacagctgacagtcaactaa

SEQ ID NO: 21644 - DNA, 3894 bp, Homo sapiens
  SIMILAR (1795)..(2865): 1001254mologous to Cloning vector pSacBII SacB,accession number U09128,Smith-Waterman Score=1899.
atgcagagtgcctcttctcctccaaaggacctcaatgcctctccagcaagggtgcagaactggacagaggatgagatggacgaactgacagaagtaggcttcagaagatggataataaaaaactccactgagctaaaggagcatgttctaatccaatgcaaagaagctaagaaccttgataaaagccagcatcatcctgttaccaaaacctggcagagacacaacaacaacaaaaaaaacttcaggccaatatccctgatgaacatcgatgcaaaaatcctcgataaaatactgcaaactaaatccagcagcacatcaaaaaacttatccactacgatcaagacagcttcatccctgcgggagtcagaaaaccgagtgcctgagaccgaagtgagacttctaggggctttaggaacaatcggttcccttcacggggccattgcacccatcctgcagatgctgaaggtgtcagctgctaacagctggcacctctaccgttctctgaaggactgttgttggctgaggagtaccaccctggccgaagatgcctggaagtttatgcatgcacctctgggagaggtgactgtgaagtctggagctgaagcagccatcttagatcaggaggtggaagcaatgttggaggacagcagcatagcaacaatatggagggagtccagcttaacgttggcttgccacgcattacttgactgtaaaactctcactcttaccgaacttggccgtaacctgccaaccaaagcgagaacaaaacataacatcaaacgaatcgaccgattgttaggtaatcgtcacctccacaaagagcgactcgctgtataccgttggcatgctagctttatctgttcgggcaatacgatgcccatgccgacttgttgactgggctgatattcctgagcaaaaacaacttatggtcttgcgagcttcagtcgcactacacggtcgttctgtgactctttatgagaaagcgttccccgctttcagagcaatgttcaaacgaagctcatgaccaatttctagccgaccttggcgagcattctaccgagtaacaccacaccgctcattgtcagtgatgctggctttaaagtgccatggtataaatccgttgagaagctgggttggtactggttaagtcgagtaagaggaaaagtacaatatgcagacctaggagcggaaaactggaaacctatcagcaacttacatgatatgtcatctagtcactcaaagactttaggctataagaggctgactaaaagcaatccaatctcatgccaaattctattgtataaatctcgctctaaaggccgaaaaaatcagcgctcgacacggactcattgtcaccacccgtcacctaaaatctactcagcgtcggcaaaggagccatggattctagcaactaacttacctgttgaaattcgaacacccaaacaacttgttaatatctattcgaagcgaatgcagattgaagaaaccttccgagacttgaaaagtcctgcctacggactagggcttacgccataggcgaacgagcagctcagagcgttttgatatcatgctgctaatcgccctgatgcttcaactaacatgttggcttgcgggcgttcatgctcagaaacaaggttggggacaagcacttccaagcctaacacagtcagaaatcgaaacgtactctcaacagttcgcttaggcatggaagttttgcggcattctggctacacaataacaagggaagacttactcgtggctgcaaccctactagctcaaaatttattcacacatggaggagcgactcaagccttcgcgaaagaaaataaccaaaaagcatacaaagaaacgtacggcgtctctcatattacacgccatgatatgctgcagatccctaaacagcagcaaaacgaaaaataccaagtgcctcaattcgatcaatcaacgattaaaaatattgagtctgcaaaaggacttgatgtgtgggacagctggccgctgcaaaacgctgacggaacagtagctgaatacaacggctatcacgttgtgtttgctcttgcgggaagcccgaaagacgctgatgacacatcaatctacatgttttatcaaaaggtcggcgacaactcaatcgacagctggaaaaacgcgggccgtgtctttaaagacagcgataagttcgacgccaacgatccgatcctgaaagatcagacgcaagaatggtccggttctgcaacctttacatctgacggaaaaatccgtttattctacactgactattccggtaaacattacggcaaacaaagcctgacaacagcgcaggtaaatgtgtcaaaatctgatgacacactcaaaatcaacggagtggaagatcacaaaacgatttttgacggagacggaaaaacatatcagaacgttcagcagtttatcgatgaaggcaattatacatccggcgacaaccatacgctgagagaccctcactacgttgaagacaaaggccataaataccttgtattcgaagccaacacgggaacagaaaacggataccaaggcgaagaatctttatttaacaaagcgtactacggcggcggcacgaacttcttccgtaaagaaagccagaagcttcagcagagcgctaaaaaacgcgatgctgagttagcgaacggcgccctcggtatcatagagttaaataatgattacacattgaaaaaagtaatgaagccgctgatcacttcaaacacggtaactgatgaaatcgagcgcgcgaatgttttcaaaatgaacggcaaatggtacttgttcactgattcacgcggttcaaaaatgacgatcgatggtattaactcaaacgatatttacatgcttggttctgatgaatcccctaatgattttggtaatcgtcacctccacaaagagcgactcgctgtataccgttggcatgctagctttatctgttcgggcaatacgatgcccattgtacttgttgactggtctgatattcgtgagcaaaaacgacttatggtattgcgagcttcagtcgcactacacggtcgttctgttactctttatgagaaagcgttcccgctttcagagcaatgttcaaagaaagctcatgaccaatttctagccgaccttgcgagcattctaccgagtaacaccacaccgctcattgtcagtgatgctggctttaaagtgccatggtataaatccgttgagaagctgggttggtactggttaagtcgagtaagaggaaaagtacaatatgcagacctaggagcggaaaactggaaacctatcagcaacttacatgatatgtcatctagtcactcaaagactttaggctataagaggctgactaaaagcaatccaatctcatgccaaattctattgtataaatctcgctctaaaggccgaaaaaatcagcgctcgacacggactcattgtcaccacccgtcacctaaaatctactcagcgtcggcaaaggagccatgggttctagcaactaacttacctgttgaaattcgaacacccaaacaacttgttaatatctattcgaagcgaatgcagattgaagaaaccttccgagacttgaaaagtcctgcctacggactaggcctacgccatagccgaacgagcagctcagagcgttttgatatcatgctgctaatcgccctgatgcttcaactaacatgttggcttgcgggcgttcatgctcagaaacaagtgccgcaagccaaaggcaacaatgtggttatcacaagctacatgacaaacagaggcttcttcgaggataaaaaggcaacatttgcgccaagcttcttaatgaacatcaaaggcaataaaacatccgttgtcaaaaacagcatcctggagcaaggacagctgacagtcaactaa

SEQ ID NO: 21645 - DNA, 5952 bp, Homo sapiens
  SIMILAR (974)..(2641): 741254mologous to Homo sapiens putative p150,accession number U93563,Smith-Waterman Score=2065.
atgacctgtaagaccccaacacgtaaacgtgctgtatcaccgggtgcgatccggtcgcgggtaacgacagagggtaaggggatgatcgacgacatcaagcgcatcgactcaatgataaatgcgcttcgcaatatgaaacaggacatcaagcgtcagcagaaactaagtgaaataaacagtttagacctgtcgccgaagcaagctcaaaagcgcaatgccgatgctgactggattgcgatggaacagattaagcgtcggcatgagctgcacgctctgtctgttgagcttgggttcgctgagcgccgggaaagttatgctccatttgaattaactgacggtattttattgaggattttgggtattcttctagagctccaagttgcgaaggcatgcaagcccctaggccggactgcattcggcaggaggagcgactcaagccttcgcgaaagaaaataaccaaaaagcatacaaagaaacgtacggcgtctctcatattacacgccatgatatgctgcagatccctaaacagcagcaaaacgaaaaataccaagtgcctcaattcgatcaatcaacgattaaaaatattgagtctgcaaaaggacttgatgtgtgggacagctggccgctgcaaaacgctgacggaacagtagctgaatacaacggctatcacgttgtgtttgctcttgcgggaagcccgaaagacgctgatgacacatcaatctacatgttttatcaaaaggtcggcgacaactcaatcgacagctggaaaaacgcgggccgtgtctttaaagacagcgataagttcgacgccaacgatccgatcctgaaagatcagacgcaagaacggtccggttctgcaacctttacatctgacggaaaaatccgtttattctacactgactattccggtaaacattacggcaaacaaagcctgacaacagcgcaggtaaatgtgtcaaaatctgatgacacactcaaaatcaacggagtggaagatcacaaaacgatttttgacggagacggaaaaacatatcagaacgttcagcagtttatcgatgaaggcaattatacatccggcgacaaccatacgttgagagaccctcactacgttgaagacaaaggccataaataccttgtattcgaagccaacacgggaacagaagaacggatacgacaggcgaagaactctttatttaacaaagatttttttgcccccctgttttcccccggagtgttcggttcaaaggtgtcaatgggcaatggcaaaattccaacgcgggggacatgcatgaaaccggaaatcatcattctcagtaaactaccgcaagaccccccaaccaaacaccgcatattctcaatcatagcaccacagcacacctattcaaaaactgaccacatagttggaagtaaagctctcctcagcaaatgtaaaagaatagaaattataacaaactatctctcagaccacagtgcaatcaaactagaactcgggattatgaaactcactcaaaactgctcaactacatggaaactgaacaacctgctcctgaactactactgggtacataacgaaatgaaggcagaaataaagatgttctttgaaaccaatgagaacaaagacacaacataccagaatctgtgggacacatttaaagcagtgtgtagagggaaatttacagcactaaatgcccacaagagaaagcaggaaagatctaaaattgacaccctaacatcacaattaaaagaactagaaaagcaagagcaaacacattcaaaagctagcagaaggcaagaaataactaaaatcagagcagaactgaaggaaatagagacacaaaaaacccttcaaaaaattaatgaatccaggagccggttttttgaaaggatcaacaaaatggatagaccgctagcaagactaataaagaaaaaaagagagaagaatcaaatagacgcaataaaaaatgataaaggggatatcaccaccgatcccacagaaatacaaactaccatcagagaatactacaaacacctctacgcaaataaactagaaaatctagaagaaatggataaattccttgacacatacactctcccaagactaaaccaggaagaagttgaatctctgaatacaccaataacaggagctgaaattgtggcaataatcaatagtttaccaaccaaaaagagtccaggaccagatggattcacagccgaattctatcagaggtacaaggaggaactggtaccattccttctgaaactattccaatcaacagaaaaagagggaatcctccctaactcattttatgaggccagcatcattctgataccaaagccaggcagagacacaacaaaaaaagagaattttagaccaatatccttgatgaacattgatgcaaaaatcctcaataaaatactggcaaaacgaatccagcagcacatcaaaaagcttatccaccatgatcaagtgggcttcatccctgggatgcaaggctggttcaatatacgcaaatcaataaatgtaatccagcatataaacaagagccaaaacaaaaaccacatgattatctcaatagatgcagaaaaagcctttcacaaaattcaacaacccttcatgctaaaaactctcaataaattaggaggagcgactcaagccttcgcggaaagaaattacccaaaggccatacaaagaaacgtacggcgtctctcatattacacgccatgatatgctgcagatccttaaacagcagcaaaacgaaaaataccaagtgcctcaattcgatcaatcaacgattaaaaatattgagtctggaaaaaggcctcgttgtgtgggacaagtgggccgcgccaaaccgctgacgggaccaggagctgaaatccaacgggttatcccgttgtgttgcttcttgcggggaagcccgaaaagccgctgatgccactccattctacatgttttatcaaaagggtcggcgccaactcaatcgacagctggaaaaacgcggggccgtgtctttaaagacagcgataagttcgacgccaacggatcccgatcctgaaagatcagacgcaagaatggtccggttctgcaacctttacatctgacggaaaaaatccggtttattctacactgactattccggtaagcattacggcaaacaaagcctgcctccttgcgcatgtttatgtgtcaaaatctgatgacacactcaaaatcaacggagtggaagatcacaaaacgatttttgacggagacggaaaaacatatcagaacgttcagcagtttatcgatgaaggcaattatacatccggcgaccaccatacgctgagagaccctcactacgttgaagacaaaggccataaataccttgtattcgaagccaacacggggaacagaaaaacggataccaaggcgaagaatctttatttaacaaagcgtactacggcggcggcacgaacttcttccgtaaagaaagccagaagcttcagcagagcgctaaaaaacgcgatgctgagttagcgaacggcgccctcgggtatcatagagttaaataatgattacacatctgaaaaaagtaatgaaagccgctgatcacttcaaacacggtaactgatgaaatcgagcgcgcgaatgttttcaaaatgaacggcaaatggtacttgttcactgattcacgcgggttcaaaaatgaccgatcgatggatgccagcctacgtgttctgaggctttgcagaactttcaacggtataccggcatacagcatgtgcatcgcataggaatggcggaacgtatgtggtgtgaccggaacagagaacgtcacaccgtcagcagcagcggcggcacccgcctccccaatccaggtcctgcccgttctgaacattttgaggcatttcagtcagttgctcaatgtacctataaccagaccgttcagctggatattacggcctttttaaagaccgtaaagaaaaataagcacaagttttatccggcctttattcacattcttgcccgcctgatgaatgctcatccggagttccgtatggcaatgaaagacggtgagctggtgatatgggatagtgttcacccttgttacaccgttttccatgagcaaactgaaacgttttcatcgctctggagtgaataccacgacgatttccggcagtttctacacatatattcgcaagatgtggcgtgttacggtgaaaacctggcctatttccctaaagggtttattgagaatatgtttttcgtctcagccaatccctggtcttccttagagctagcagtgatcatgggaccaattctggccaataagtgtgacaatctaaaaacttgtcacacttcacatggatctgtcatggcggaaacagcggttatcaatcacaagaaacgtaaaaatagcccgcgaatcgtccagtcaaacgacctcactgaggcggcatatagtctctcccgggatcaaaaacgtatgctgtatctgttcgttgaccagatcagaaaatctgatggcaccctacaggaacatgacggtatctgcgagatccatgttgctaaatatgctgaaatattcggattgacctctgcggaagccagtaaggatatacggcaggcattgaagagtttcgcggggaaggaagtggttttttatcgccctgaagaggatgccggcgatgaaaaaggctatgaatcttttccttggtttatcaaacgtgcgcacagtccatccagagggctttacagtgtacatatcaacccatatctcattcccttctttatcgggttacagaaccggtttacgcagtttcggcttagtgaaacaaaagaaatcaccaatccgtatgccatgcgtttatacgaatccctgtgtcagtatcgtaagtcttgaatcaaattatgttaatgttaaattgaggaacatggcagttaatttgcattatttagatgatacagaatgtttgcatttaatgtttgtggtaagggtaatggcttatacagtccatgctccacaatcagatgaagttaggtccggttactgcacctttacatctgacggaaaaatccgtttattctacactgactattccggtaaacattacggcaaacaaagcctgacaacagcgcaggtaaatgtgtcaaaatctgatgacacactcaaaatcaacggagtggaagatcacaaaacgatttttgacggagacggaaaaacatatcagaacgttcagcagtttatcgatgaaggcaattatacatccggcgacaaccatacgctgagagaccctcactacgttgaagacaaaggccataaataccttgtattcgaagccaacacgggaacagaaaacggataccaaggcgaagaatctttatttaacaaagcgtactacggcggcggcacgaacttcttccgtaaagaaagccagaagcttcagcagagcgctaaaaaacgcgatgctgagttagcgaacggcgccctcggtatcatagagttaaataatgattacacattgaaaaaagtaatgaagccgctgatcacttcaaacacggtaactgatgaaatcgagcgcgcgaatgttttcaaaatgaacggcaaatggtacttgttcactgattcacgcggttcaaaaatgacgatcgatggtattaactcaaacgatatttacatgcttggttatgtatcaaactctttaaccggcccttacaagccgctgaacaaaacagggcttgtgctgcaaatgggtcttgatccaaacgatgtgacattcacttactctcacttcgcagtgccgcaagccaaaggcaacaatgtggttatcacaagctacatgacaaacagaggcttcttcgaggataaaaaggcaacatttgcgccaagcttcttaatgaacatcaaaggcaataaaacatccgttgtcaaaaacagcatcctggagcaaggacagctgacagtcaactaa

SEQ ID NO: 21646 - DNA, 1729 bp, Homo sapiens
  SIMILAR (619)..(1050): 431254mologous to Monodelphis domestica lactate dehydrogenase B,accession number AF070997,Smith-Waterman Score=181.
atgtcatctagtcactcaaagactttaggctataagaggctgactaaaagcaatccaatctcatgccaaattctattgtataaatctcgctctaaaggccgaaaaaatcagcgctcgacacggactcattgtcaccacccgtcacctaaaatctactcagcgtcggcaaaggagccatgggttctagcaactaacttacctgttgaaattcgaacacccaaacaacttgttaatatctattcgaagcgaatgcagattgaagaaaccttccgagacttgaaaagtcctgcctacggactaggcctacgccatagccgaacgagcagctcagagcgttttgatatcatgctgctaatcgccctgatgcttcaactaacatgttggcttgcgggcgttcatgctcagaaacaaggttgggacaagcacttccaggctaacacagtcagaaatcgaaactgcaaaatggcaactcttaaggaaaaactcattgcaccagttgcggaagagcgaggcgaacagttccaaacaataagatcacctgtagtgggtgtttggacaagttggtatggcagtgtgctatcagcattctggggaaagtctcctggcctgatgaactttgctcttgtgggatgtttttgggaggataagcttaaaggagggaatgatggttccttccagcatggggagcttattttctttcagacacctaaaaattgtgggcaggataaaggattattctggggaccgcccaattcctaaagatttgtaagttggtaactggcagggagtcccgtccagccaagaagggggagaatccggctcaaatcctgggtgccagagaaatggttaatggtcttccaaattccattattcctcaagatcgtccaagtacagtccctgatttgcatcataattggtggtttcccacccagttggacattcctacgtatgttaccctgggaaactaaagtgggattacccaaacaccgcgtgattggaagtggatgtaatctggattctgctagatttcgctaccttatggctgaaaaaacttggcattcatcccagcaagctgccatggatggaattttggggggaacatggcgactcaagtgtggcttggtgttggaatggtgtgaatgtggcaggtgtttctctccaggaattgaatccagaaatgggaactgacaatgatagtgaaaattggaaggaagtgcataagatggtggttgaaagtgcctatgaagtcatcaagctaaaaggatataccaactgggctattggattaagtgtggctgatcttattgaatccatgttgaaaaatctatccaggattcatcccgtgtcaacaatggtaaaggggatgtatggcattgagaatgaagtcttcctgagccttccatgtatcctcaatgcccggggattaaccagcgttatcaaccagaagctaaaggatgatgaggttgctcagctcaagaaaagtgcagataccctgtgggacatccagaaggacctaaaagacctgtgactagtgagctctaggctgtagaaatttaaaaactacaatgtgattaactcgagcctttagttttcatccatgtacatggatcacagtttgctttgatcttcttcaatatgtgaatttgggctcacagaatcaaagcctatgcttggtttaatgcttgcaatctgagctcttgaacaaataaaattaactattgtagtgtga

SEQ ID NO: 21647 - DNA, 390 bp, Homo sapiens
  SIMILAR (2)..(352): 951254mologous to Homo sapiens transformation upregulated nuclear protein,accession number X72727,Smith-Waterman Score=590.
ggaaacttggtactctgcaatagatacatggagcccatcagaatggcagatggcttatgaaccacagggtggctccggatatgggggtcgtggctcatatggtgatcttggtggacctattattactacacaagtaactattcccaaagatttggctggatctattattggcaaaggtggtcagcggattaaacaaatccgtcatgagtcgggagcttcgatcaaaattgatgagcctttagaaggatccgaagatcggatcattaccattacaggaacacaggaccagatacagaatgcacagtatttgctgcagaacagtgtgaagcagtatgcagatgttgaaggattctaatgcaagatattttttcttttttatagtgtgaagcg

SEQ ID NO: 21648 - DNA, 178 bp, Homo sapiens
  SIMILAR (80)..(178): 1001254mologous to Homo sapiens Human secreted protein, SEQ ID NO: 4855,accession number G00774,Smith-Waterman Score=163.
gctactgcagcactggggtgtcagttgttggtccgacccagaacgcttcagttgtgctctgcaaggatatataataactggtaaacgccctgcagaagatatggaagaggaacaagcatttaaaagatctagaaacactgatgagatggttgaattacgcattctgcttcagagcaag

SEQ ID NO: 21649 - DNA, 891 bp, Homo sapiens
  SIMILAR (301)..(675): 971254mologous to Homo sapiens transformation upregulated nuclear protein,accession number X72727,Smith-Waterman Score=701.
atgcccaagaggaaggctgaagggggtgctaaaggagacaaagccaagccagagcccaagcctaaaaaggcccctgcaaaaaagggagaaaagatacccaaagggaaaaaaggaaaagctgatgctggcaaggaggggaataagcctgcagaaaatggagatgccaaacagagcaggcccagaaagctgaaggcactggagatgccaagtgaagtgtctgcatttttgattactgtgtacttctgggtaactgtggaagctgacagacataagccgaagaagaaaatgattggcatcacttctcccatcaaaggacgtgcacagccttatgatcccaatttttacgatgaaacctatgattatggtggttttacaatgatgtttgatgaccgtcgcggacgcccagtgggatttcccatgcggggaagaggtggttttgacagaatgcctcctggtcggggtgggcgtcccatgcctccatctagaagagattatgatgatatgagccctcgtcgaggaccacctccccctcctcccggacgaggcggccggggtggtagcagagctcggaatcttcctcttcctccaccaccaccacctagagggggagacctcatggcctatgacagaagagggagacctggagaccgttacgacggcatgttggctggatctattattggcaaaggtggtcagcggattaaacaaatccgtcatgagtcgggagcttcgatcaaaattgatgagcctttagaaggatccgaagatcggatcattaccattacaggaacacaggaccagatacagaatgcacagtatttgctgcagaacaggggcagcaggggaggtctcgccatttgccgacaactctttgtggtgtctggtgactga

SEQ ID NO: 21650 - DNA, 651 bp, Homo sapiens
  SIMILAR (242)..(388): 971254mologous to Rattus norvegicus dC-stretch binding protein (CSBP),accession number D17711,Smith-Waterman Score=245.
  misc_feature (1)...(651): n = a,t,c or g
gaccatcattacgcctagcttggcacgaggcggcacgaggtacgcattctgcttcagagcaagaatgctggggcagtgattggaaaaaggaggcaagaatattaaggctctccgtacagagctacaatgccagtgtttcagtcccagacagcagtggccccgaggcgcatattgagtatcagtgctgatattgaaacaattggagaaattctgaagaaaatcatccctaccttgggaagagtaccaacactataaaggaagtgactttgactgcgagttgaggctgttgattcatcagagtctagcaggaggaattatttgggtcaaaggtgctaaaatcaaagaacttcgagagaacactcaaaccaccatcaagcttttccaggaatggctgtcctcattccactgacagaagttgttcttattggaggaaaacccgataggtgttagagttcataaagatcatcctngatcttatatctgaggctcccatcaaaggncgtgcacagccttatgtcccaatttttncgatgaacctatgatttggtggtttncaatnatgtttnatgcccgtcgcggncgcccagtgggatttccatncgggnagaggtggttttcagattcctcctggncgggntggggnccatgcct

SEQ ID NO: 21651 - DNA, 1827 bp, Homo sapiens
  SIMILAR (1012)..(1824): 881254mologous to Rattus norvegicus dC-stretch binding protein (CSBP),accession number D17711,Smith-Waterman Score=1292.
atggcaatactgagggccagagcggccgaaatcctgtttcaggagacagcggcttcccctcaggctctgccacgtctccaggccagacagggccgggctaaggtccgccggcgctcccgccagtctcccctaaagtcagcgccctggaagctgagcctggaccacgggactagggggctcgcaaacgacatcggcgtccagtggcgccggccggcccgcccaccttccagggacaccgtccctcggggtctggctctggcgcctgcaagccatgccatgccatgccacccccctcatacacgcgcctcggagccacctggcgctcacctggggaccgggaaagtgcctgcgtggtcgctgaagagtgtggtgagatgtgagcagagacgtgtaatgcagcaggcctgtgcttatccggacagaaagaagggcatgcaaagacttaaggatggagtgtgctcggcatgtgcgcagacaacagggaagcaggactgtgagaatgcttggtgtgtccctttaatacaagtggaaactgaacagccagaagaaagcttccctaacactgaaaccaatggtgaatttggtaaatgccctgcagaagatatggaagaggaacaagcattgaaaagatctagaaacactgatgagatggttgagttacacattctgcttcagaacaagaattctggggcagttattggagaaggaggtaagaatattaaggctccctgtatagactacagtgccagtgtttcagtcccagacagcagtggccccaagtgcatactgagtatcagtgctggtattgaaacaattggagaaattctaaagaaaatcatccctaccttggaagagggcctccagttgccattactcactccaaccagccagctcctgctggaatctgatgctgtggaatgcttaaattaccaacactataaaggaagagactttgagtgcgagttgaagctgttgatttatcagagtctagcaggaggaatattggggtcaaaggaatgctgttctcatcccactgacagagttgttcttattggaggaaaacccaatagggttgtagagtgcataaagatcatccttgatcttatatctgagtctcccatcaaaggacctgcacagccttatgatcccagtttttacaatgaaacctatgattatggtggttttacaatgatgtttgatgaccgccctggatgcccagtgggatttccaatgtggggaagaggtggttttgacagaatgcctcctggttggggtgggcgtcccatgcctccatctagaagagatatgagccctcatcgaggaccacctcctcctcttactggacgaggtggccggggtggtagcagagctcggaatcttcctcttcctccaccaccaccacctagaggggaagacctaatggcctatgacagaagagggagacctggagactgttacgatggcatggttggtttcagtcctgatgaaacttggaactctgcaatagatacatggagcccatcggaatggcagatggcttatgaaccacagggtggctccggatatgattattcctatgcagggattggtggctcatatggtgatcttggtggacctattactactgcacaagtaactattcccaaagatttgactggatctattattggcaaaggtggtcagcggattaaacaaatcggtcatgagttgggagcttcaatcaaaattgatgagcctttagaaggatccgaagatcagatcactatcattacaggaacacaggaccagatacagaatgcacaatatttgctgcagaacaatgtgtag

SEQ ID NO: 21652 - DNA, 476 bp, Homo sapiens
  SIMILAR (354)..(467): 971254mologous to Rattus norvegicus dC-stretch binding protein (CSBP),accession number D17711,Smith-Waterman Score=190.
tgccagtgggaattaactacatttgccaaagtgctttgccagtcatttttattatggtgttatttgaatgttaattaataattttggtggtaaccagccgaccatgctaaatggctgccagtgtggggtatggtgttgcaggacctgaaaataaaatagttttttaaggtggtgcagaatgtcctttttgggcctggctattgaggataataagcacataactggtaaagttattgaaatataaattcaggttgctcactgcaacagtatattattgttatgcttatagcagataagtgtgtattggggaattgttgattagagactaaaattttataattctccctccacagtaccaacactataaaggaagtgactttgactgcgagttgaggctgttgattcatcagagtctagcacgaggaattattggggtcaaaggtgctaaaatcaaagaacttcgagaggtaaaaaaa

SEQ ID NO: 21653 - DNA, 517 bp, Homo sapiens
  SIMILAR (244)..(158): 481254mologous to Chlamydophila pneumoniae J138 hypothetical protein,accession number AP002545,Smith-Waterman Score=67.
gtcaattgctctagtgtcttattagttaaactttgtaaaatatatatatacttgtttttccattgtatgcaaattgaaagaaaaagatgtaccatttctctgttgtatgttggattatgtaggaaatgtttgtgtacaattcaaaaaaaaaaaagatgaaaaaagttcctgtggatgttttgtgtagtatcttggcatttgtattgataagtttaaaattcacttcccaataaataaaacaccccatatgctagatttgatgtgtgcccaatcaaccttgttcaaattgggcacacatcaaatctagcatcatgggtgttttatttgatgtgtgcccaatttgaacaagggttgattgacacctgtaaaatttgttgaaacgttcctcttaaaaggaaatatagtaatcttatgtatttttttttgtgaagtgtttttctagcatttataagtgaaagctggcaggggtggtagttgggctcataatttattaaagtggtaatttagcaaaaaaaaa

SEQ ID NO: 21654 - DNA, 2413 bp, Homo sapiens
  SIMILAR (180)..(1580): 791254mologous to Rattus norvegicus dC-stretch binding protein (CSBP),accession number D17711,Smith-Waterman Score=1831.
aggacgcgtgggcggcagtctcgcgcggtgatgagccgggttgggggagcggctcgtggaggctactgcagcactggggtgtcagttgttggtccgacccaaaacgcttcagttctgctctgcaaggatatataataactgattggtgtgccccgtttaataaaagaatatggaaacgtgaacagccagaagaaaccttccctaacactgaaaccaatggtgaatttggtaaaccgccctgcagaagatatggaagaggaacaagcatttaaaagatctagaaacacttgatgagatggttgaattaccgcattctgcttccagagcaagaatgcctggggcagtgattggaaaaggaggcaagaatattaaggctctccgtacagactacaatgccagtgtttcagtccccagacagcagtgtccccgagcgcatattgtgtatcagtgctgatattgaaacaattggagaaattctgaagaaaatcatccctaccttggaagagggcctgcagttgccatcacccactgcaaccagccagctcccgctcgaatctgatgctgtggaatgcttaaattaccaacactataaaggaagtgactttgactgcgagttgaggctgttgattcatcagagtctaggcagggagggaattattgggggtcaaaggtgcttaaaatcaaaggaacttcggggaggaacacttcaaaccaccatcaagcttttccaggaatgctgtcctcattccactgacagagttgttcttattggaggaaaacccgataggtttgttagagtgcataaagatcatccttgatcttatatctgagtctcccatcaaaggacggtgcacagccttatgatcccaatttttacggatggaaacctatggattatgggtggttttacaatgatgtttgatgaccgtcgcggacgcccagtgggatttcccatgcggggaagaggtggttttgacagaatgcctcctggtcggggtgggcgtcccatgcaaccatatagaagagattatgatgatatgagccctcgtcgaggaccacctccccctcctcccggacgaggcggccggggtggtagcagagctcggaatcttcctcttcctccaccaccaccacctagagggggagacctcatggcctatgacagaagagggagacctggagaccgttacgacggcatggttggtttcagtgctgatgaaacttgggactctgcaatagatacatggagcccatcagaatggcagatggcttatgaaccacagggtggctccggatatgattattcctatgcagggggtcgtggctcatatggtgatcttggtggacctattattactacacaagtaactattcccaaagatttggctggatctattattggcaaaggtggtcagcggattaaacaaatccgtcatgagtcgggagcttcgatcaaaattgatgagcctttagaaggatccgaagatcggatcattaccattacaggaacacaggaccagatacagaatgcacagtatttgctgcagaacagtgtgaagcagtattctggaaagtttttctaagactagtgaagaactgaaggagtcctgcatctttttttttttatctgcttctgtttaaaaagccaacattcctctgcttcataggtgttctgcatttgaggtgtagtgaaatctttgctgttcaccagatgtaatgttttacgttccttacaaacagggttggggggggggaagggcgtgcaaaaactaacattgaaattttgaaacagcagcagagtgagtggattttatttttcgttattgttggtggtttaaaaaattccccccatgtaattattgtgaacaccttgctttgtggtcactgtaacatttggggggtgggacagggaggaaaaagtaacaatagtccacatgtccctgagcatctgttcagagcagtgtgcagaatgtaatgctcttttgtaagagacgttttatgatttttaaaataaatttagtgaacctatttttgggtggtcattttttttttaagacagtcattttaaaatggtggctgaatttcccaacccacccccaaactaaacactaagtttaattttcagctcctctgttgggacatataagtgcatctcttgttgggacatagggcaaaataacttgggcaaacttaggttctgggtgatttcttgatggtttggaagtctattgctgggaagaaattccatcatacatattcatgcttataataagctggggattttttgtttgtttttgcaaatgcttgcccctacttttcaacaattttctatgttagttgtgaagaactaaggtggggagcagtactacaagttgagtaatggttgagtattaccagaattctgatggcacaa

SEQ ID NO: 21655 - DNA, 3075 bp, Homo sapiens
  SIMILAR (217)..(840): 831254mologous to Homo sapiens heterogeneous nuclear ribonucleoprotein K,accession number BC000355,Smith-Waterman Score= 858.
tttcgtgggcgctccaggcgacagcactgcagacgccattatcctctgtttctctgctgcaccgacctcgacgtcttgcctgtgtcccacttgttcgcggcctataggctactgcagcactggggtgtcagttgttggtccgacccagaacgcttcagttctgctctgcaaggatatataataactgattgcgatgtgcccgtttaataaaagaatatggaaactgaacagccagaagaaaccttccctaacactgaaaccaatggtgaatttggtaaacgccctgcagaagatatggaagaggaacaagcatttataagatctagaaacactgatgagatggttgaattacgcattctgcttcagagcaagaatgcttggggcagtgatttggaaaaggaggcaagaatattaaggctctccgtacagactacaatgccagtgtttcagtcccagacagcagtggccccgagcgcattattgagtatcagtgctgatattgaaacaattggagaaattctgaagaaaatcatccctaccttggaagagggcctgcagttgccatcacccactgcaaccagccagctcccgctcgaatctgatgctgtggaatgcttaaattaccaacactataaaggaagtgactttgactgcgagttgaggctgttgattcatcagagtctagcaggaggaattattggggtcaaaggtgctaaaattaaagaacttcgagagaacactcaaaccaccatcaagcttttccaggaatgctgtcctcattccactgacagagttgttcttattggaggaaaacccgatagggttgtaagagtgcataaagatcatccttgatcttatatctgagtctcccatcaaaggacgtgcacagccttatgatcccaatttttacgatgaaacctatgattatggtggttttacaatgatgtttgatgaccgtcgcggacgcccagtgggatttcccatgcggggaagaggtggttttgacagaatgcctcctggtcggggtgggcgtcccatgcctccatctaagaagagattatgatgatatgagccctcgacgaggaccacctccccctcctcccggacgaggcggccggggttgggtagcagagctcggaatcttcctcttcctccaccaccaccacctagagggggagacctcatggcctattacaaaagagggagacctcggagacccttacgacggcatggttggtttcagtgctgatgaaacttgggactctccaatagatacatggagcccattcagaatggcagatggcttatgaaccacagggtgggctccggcatatgattattcctatgacaggggggtcgtggctcatatggtgatcttgggggacctattattactacacaagtaactattcccaaagatttgggctgggatctatttattggaaaaagggtggtcagcgggattaaacaaatcccgtcatgagtcggggagctttcgatcaaaattgatgagcctttaggaaggatccgaagatccggatcattaccattacagggaacacaggaccagatacaggaatgcacagtatttgctgcaggaacagtgtgaagcagtatgcagatgttgaaggattctaatgcaagatattttttcttttttatagtgttgaagccagtattctgggaaagtttttctaaagactagtgaagaactgaagggagtccctgccatcttttttttttttatctgcttctgtttaaaaaagcccaacattccctctgcttccatagggtgttcctgccattttgagggtgtaagtgaaaatctttgcctgttcccccagagggaaatgttttagttccctaccaacccagggttgggggggggaaggggcgggcaaaaaccttacccattgaattttgaaacagcagccagagtgagtgacttttattttttgttcattgttggtggttttaaaaaaaattcccccccatggtaattattgtgaacgaccttgctttgtggtcactgtaacatttggggggttgggacaagggaggaaaagtaacaatagtcccacatgtccctggcatctgttcagaagcagtgtgcagaatgtaatgctcttttgtaagaaacgtttttatgatttttaaaatgaagtctattgaacctatttttggtggtcattttttttttaagaccagtcattttaaaaatggtggctgaatttccaaaccaccccccaaacctaaccactaaggttttattttcaagctctctggttgaacatataaggtgcatcttcttgttggacataggcaaaataactgtggcaaacctagtttctggtgatttcttgactggtttggaagtctattgctgggyagaaattccatcatacatatccaggcctaaaaataagcctggggattttttgtttgtttttgccaaaatgctttgcccccctaccttttccaaccaaatttttcctatggtttaggttagttgtgaagaacctaaggtggggagccagtacctacaagttgaggtaatgggtatgaggtatatacccagaaattcctgattgggcagcaagttttattaatcacgaataacacttgggttatggcaagtgacctaatgccggaaaaaattgattatttttattaagataatttcctcaccctatagacttaaaactggtcaatttgctctagtgtcctattagttaaactttgttaaaatatatatatacccggttttttcccttgtatggccaattgaaagaaaaagatggaccctttttcttgttgtatgttggattatgtaggaaatgtttgtgtccaattcaaaaaaaaaaaaaagatgaaaaaagttcctgtggatgttttgtgtagtatcttggcaatttgtattgatagttaaaatttcacttccaaataaataaaacacccatgatgctagatttgatgtgtgcccaatttgaacaagggttgattgacacctgtaaaatttgttgaaacgttcctcttaaaaggaaatatagtaatcttatgtaaaaaaaaaaaaaa

SEQ ID NO: 21656 - DNA, 2463 bp, Homo sapiens; identical to SEQ ID NO: 9466
  SIMILAR (1227)..(373): 911254mologous to Escherichia coli K12 putative ATP-binding component of a transport system,accession number AE000350,Smith- Waterman Score=1304.

SEQ ID NO: 21657 - DNA, 3750 bp, Homo sapiens
  SIMILAR (187)..(1281): 921254mologous to Escherichia coli K12 putative flagellin structural protein,accession number AE000144,Smith-Waterman Score= 1793.
atggtcattctcctttacggtgataaccgtcgcgtaaggcaaaaattgccccatttttttggattcctcagcgacaacaactgtcgatttttagtaaatatctatccgccgcgtgtccactattgctgggtaagatcagattacaacctgtacgccaatactatcaccgtaactaacggcggtgtattggatgtgaacgttgatcagttcgatactgaagctttccgtactgacaaactggaactgaccagcggcaacatcgctgaccataacggtaacgtagtatctggtgtgttcgatatccatagcagcgattacgttctgaacgctgatctggtgaacgaccgtacctgggatacttccaagtctaactacggttacggtattgttgctatgaactctgatggtcacctgactatcaacggtaacggcgacgtagacaacggtactaactggatacagctctgtaacaatgttgttgctgcaaccggtaactacaaagttcgtatcgacaacgcaactggcgctggcgctaatgctgattacaaagataaagaaattatctacgtaaacgacgtcaacagcaacgcgaccttctctgctgctaacaaagctgacctgggtgcatacacctatcaggctgaacagcgcggtaacaccgcttgtctgccacagatggagcttgacgactacgctaacatgccgctgagcatcccgtctgcgaacaccaatatctggaacctgggacaagacaccgttggtactcgtctgaccaactctcgtcatggcctggctgataacggcggcgcatgggtaagctacttcggtggtaacttcaacggcgacaacggcaccatcaactatgatcaggatgttaacggcatcatggtcggtgttgataccaaaattgacggtaacaacgctaagtggatcgtcggtgcggctgcaggttcgctaaaggtggatcaagacagccagactgcctacatctactcttctgctcacttcgcgaacaacgtctttgttgatggtagcttgagctactctcacttcaacaacgacctgtctgcaaccatgagcaacggtacttacgttgacggtagcaccaactccgacgcttggggcttcggtttgaaagccggttacgacttcaaactgggtgatgctggttacgtgactccttacggcagcgtttctggtctgttccagtctggtgatgactaccagctgagcaacgacatgaaagttgacggtcagtcttacgacagcatgcgttatgagggatctcctagagtcgagcctgcatcggcatgcaagatgcacaaagtgacgttagacacggcgacttatgtgccgatcgatgacgatcacaaatgggttgttctggggcgtacccgctggggttatggtgatggtttaggcggcaaagagatgccgttctacgagaacttctatgccggtggttccagcaccgtgcgtggcttccagtccaataccattggtccgaaagcagtttacttcccgcatcaggccagtaattatgatccggactatgattacgaatgtgcgactcaggacggcgcgaaagacctgtgtaaatcggatgatgctgtaggcggtaacgcactggcggttgccagcctcgagttcatcaccccgacgccgtttattagcgataagtatgctaactcggttcgtacttccttcttctgggatatgggtaccgtttgggatacaaactgggattccagccaatattctggatatccggactatagtgatccaagcaatatccgtatgtctgcgggtatcgcattacaatggatgtccccattggggccgttggtgttctcctacgcccagccgttcaaaaagtacgatggagacaaggcagaacagttccagtttaacatcggtaaaacctgcgcaacaattaccccgcaaatttatcccgaaggaaaactgcgctgtaccgcaccggtgttcgaacccgggggcggcggcatcaacgtcgcccgcgccattgcccatcttggaggcagtgccacagcgatcttcccggcgggtggcgcgaccggcgaacacctggtttcactgttggcggatgaaaatgtccccgtcgctactgtagaagccaaagactggacccggcagaatttacacgtacatgtggaagcaagcggtgagcagtatcgttttgttatgccaggcgcggcattaaatgaagatgagtttcgccagcttgaagagcaagttctggaaattgaatccggggccatcctggtcataagcggaagcctgccgccaggtgtgaagctggaaaaattaacccaactgatttccgctgcgcaaaaacaagggatccgctgcatcgtcgacagttctggcgaacagttaagtgcagcactggcaattgaaaatccactggccgtatctctgctgttcactgcacctgtttatgctgctgatgaaggttctggcgaaattcactttaagggggaggttattgaagcaccttgtgaaattcatccagaagatattgataaaaacatagatcttggacaagtcacgacaacccatataaaccgggagcatcatagcaataaagtggccgtcgacattcggttgatcaactgtgatctgcctgcttctgacaacggtagcggaatgccggtatccaaagttggcgtaaccttcgatagcacggctaagacaactggtgctacgcctttgttgagcaacaccagtgcaggcgaacatactggggtcggtgtacgactgatggacaaaaatgacggtaacatcgtattaggttcagccgcgccagatcttgacctggatgcaagctcatcagaacagacgctgaactttttcgcctggatggaacaaattgataatgcagtcgatgtcacggcaggtatggacaccgtgaatatttatcgactctcttttgtatcctgcctggtcatggcgatgccttgcgcaatggcggtcgaattcaatctgaatgttctcgataaatcaatgcgcgaccgcattgatatttcattaataataggaaaaggagtcatttgctcccgatatccgtcagtccttgcacagttagatcgctgcttaagcttcctgttgatgattggctttagcctggtggcagaaggtttcggcttcgtcattccgaaaggctacctgtacgctgccattggtttctcggtgatgatcgaggcgctcaatcagttggctatctttaaccggcgacgttttctttccgctaaccagacgctgcgccacgagactaccgaagcggtaatgcgcctgcttagcgggcaaaaagaagatgcggaactggacgccgaaaccgcgtccatgctggtggatcatggtaaccagcagatctttaatccgcaggaacggcggatgattgagcgggtacttaatcttaaccagcgtaccgtcagcagcattatgacgtcgcgccacgatattgagcatatcgatctcaacgcgccggaagaagaaatccgccaattgctggagcgaaatcagcatacgcggctggtggttaccgacggtgatgacgcagaagatttgctcggtgttgttcacgttatcgacctgctacaacagtctctgcgcggcgaaccgctcaacctgcgggtgatgattcgccaaccgctggtgttcccggaaaacttgccgttgtgtactgccctggaacatttcgtaatgcccgcacgcactttgcttttgtag

SEQ ID NO: 21658 - DNA, 1353 bp, Homo sapiens
  SIMILAR (331)..(1071): 1001254mologous to Escherichia coli No definition line found,accession number U00039,Smith-Waterman Score=1302.
atgattgtcatcggtgctcgtccgcgccaaagcttgcatgcctgcagccgcgtaacctggcaaaatcggttacggttgagtaataaatggatgcccctgcttttagagtttttccgtcacagaaagggctacaactgtttccttatgctctggcatctgagaactgacgagaacaaggtaaccgtcagtgccgataagttcaaagttaaacctggtgttgataccaacattgaaacgttgatcgaaaacgcgctgaaaaacgctgctgaatgtgcggcgctggatgtcacaaagcaaatggcagcagacaagaaagcgatggatgaaatcaacggtccttcgcgtgatgtgaagctgacctttgcgcaaattgcaccgccgccgggcagcatggtgctacgtggcattaacccgaacggcagcattgagtttggtatgcgcagcgatgaagtggtgacgaaggcgatgctcaacctcgaatacaccccatcgccatcgttactgcctgtccagtcgcagttaaaggtttatctcaatgatgaactgatgggcgtgctgccagtgaccaaagaacagttgggtaaaaaaacgctggcgcaaatgcccattaacccactgtttattagcgacttcaaccgtgtacggctggagtttgtcggccattatcaggacgtgtgcgaaaaaccggccagcaccacgctttggctggatgttgggcggagcagtggactggatctgacctatcagaccctgaatgtgaagaatgacctgtcacacttcccggtgccattctttgacccgagcgataaccgcaccaacaccttgccgatggtctttgcgggtgcgccggatgttgggctgcaacaagcctctgccattgtcgcctcgtggtttggttcgcgttctggctggcgtgggcagaacttcccggtactctataaccaactgccggatcgcaatgccattgtctttgcaaccaacgacaaacggccggacttcctgcgcgatcatccggcggtaaaagccccggtgattgagatgattaaccatccgcagaatccttacgtcaaacagtttacttttgcttgttctgaagaatactcgacgataaagcgcgtatgggtctacatcactggtgtgaccgatcaccatcagaacagccagccccagtcgatgcagcgaattgcaggcactaacgtctggcagtggacgacacaactcaatgccaactggcgcggcagctactgcttagttcccaccgaacgggtacccgagctcgattgtaatcattctgtccatatgagaggttctgatttatcagccttcatagaagctgataagctcttgaaatga

SEQ ID NO: 21659 - DNA, 1940 bp, Homo sapiens
  SIMILAR (996)..(1937): 791254mologous to Escherichia coli K12 putative transport protein,accession number AE000296,Smith-Waterman Score=1188.
tgctttatctggttggctttcagtcagaacaggggattttgcggcgctgacgctacaactaacagccagcagagaaagatagagcattgtccgtttcatgatatcagtccagattgacgttacggcagccaaagagcgtggtgaaaataaacccgcaaacccatgccaccagaatcccgccagcataaaccgccatggccggaaggatgccttgtgcggaagtcatcagcggcagcgctaccagaccagacggcccaaaggcgctgtttaagcccatcggcagaccccaccaggctatcaggccgataaacaaaccgcccgccgcgccgcctaaacaggcggtaacaaacggcttcatgcggggcagggtgccacccaaaacattaacggtgccctctgagtcctcattagcgccaatgacgctggtagtaatagtggttaaggaggcattaccgccagccaaaatattcagcactccagtgccataccagccaaccagacgtgcaccagacgctgaaccgcttagtgccagcaaaacacccagcgtctatctagtgaatttcgttgtcagtccagaggatttacgcaaattaaccgtcgatgttttacctgccctgcgagcaaatacccgagccctttggcaggtggaggtgagtgcgttcccctctttcatgacgcaggcgacgccagcaacgcaacccctgatcaatgctgagccagctgtagccgccccgacggaacaaaatccgcaggtggggccagtgatgccgggcgtgcagggcgctgatgcgccagtcgtggcgcagaacggtccttcgcgtgatgtgaagctgacctttgcgccaattgcaccgccgccgggcagcatggtgctacgtggccttaacccgaacggcagccttgagtttggtatgcgcagcgatgaagtggtgacgaaggcgatggtccaactcgaattaaccccatggcatggttatggctgtcagtgcccgtttctcccggtgaagtacctgtacgctgccattggtttctcggtgatgatcgaggcgctcaatcagttggctatctttaaccggcgacgttttctttccgctaaccagacgctgcgccagcggactaccgaagcggtaatgcgcctgcttagcgggcaaaaagaagatgcggaactggacgccgaaaccgcgtccatgctggtggatcatggtaaccagcagatctttaatccgcaggaacggcggatgattgagcgggtacttaatcttaaccagcgtaccgtcagcagcattatgacgtcgcgccacgatattgagcatatcgatctcaacgcgccggaagaagaaatccgccagttgctggagcgaaatcagcatacgcggctggtggttaccgacggtgatgacgcagaagatttgctcggtgttgttcacgttatcgacctgctacaacagtctctgcgcggcgaaccgctcaacctgcgggtgttgattcgccagccgctggtgttcccggaaaccttgccgttgttacctgccctggagcagttccgtaatgcccgcacgcactttgcttttgtggtggatgagtttggctcggtggaagggattgtgacattaagtgacgtcactgaaaccattgccggtaacttaccgaacgaagtggaagagatcgacgcccgccatgatattcagaagaatgcggaccgttcctggacgggaaatgtctattgccgttgggggactgtcgactctagcaggcatccccgactggctgtattaaccgacgaggctcccaactatggttatcctacattgtacgaatttcggaaaaggtttctgactcctggaacagtgtgcaagcggtgtgaccagagaggagacgccatgcgtgtgcaggtccagtgggttttctacacgtacattctgcctttggcaaacgagtga

SEQ ID NO: 21660 - DNA, 1566 bp, Homo sapiens
  SIMILAR (790)..(1563): 961254mologous to Escherichia coli K12 putative ATP-binding component of a transport system,accession number AE000134,Smith- Waterman Score=1288.
atgaaggcagaaataaagatgtcctttgaaaccaatgagaacaaagacacaacataccagaatctctgggacacattcaaagcagtgtgtagagggaaatttatagcactaaattcccacaagacaaagcaggaaaggtctaaaattgacaccctaacatcacaaataaaagaactacagaagcaagagcaaacactttcaaaagctagcagaaggcaagaaataactaagatcagagcagaactgaaggaaatagagacacaaaaaacccttcaaaaactcaatgaatccaggagctggttttttgaaaagatcaacaaaattgatagaccaccagcaagactaataaagaagaaaagagagaagaatgacatagacacaataaaaaatgataaaggggatatcaccaccgatcccacagaaatacaaactaccatcagagaataccgtaaacacctctatgcaaataaactagaaaatctagaggaaatggataaattccttgacacatacaccatcccaagactaaaccaggaagaagttgaatctctgaatagaccaataacaggctctgaaagtaaggcaataattaatagcttaccaaccaaaaaaagtccaggaccagatggattcacagccgaattctaccagaggcgggatgtgaatcgcgtctgtcgggcgcaacaattgtggcttgtggcggtttacaccggcgaaggccatctcctgggggaaaatccaccctgtttttcagcggcaaattctgagggttctcagtcaaaccctgttcccgaatattccctgggaagaaatctcggttatggcctaaaaatgttcggcgtaccgcgcgcagagctgaaaccccgcttcaaagaggctttgccgatggtgaatctggaaggattcgaagaccgctttgtcgatcagatctccggcgggcagcagcagcgcgtggcgctggcccgcgcgctgatcctcaagccgaaagtgctgctgtttgatgagccgttgagtaacctcgacgccaacctgcgtcgcagcatgcgcgacaagatccgcgagttgcaaaagcagtttgatatcacctcgctgtacgtcacccacgatcagagcgaagcctttgcggtttctgatactgtgctggtgatgaacaagggacacatcatgcagatcggctcaccgcaggatctttaccgccagcccgcctcccgctttatggcgagctttatgggcgatgccaacctgttcccggcaaccttcagcgacggatacgttgatatctacggctatcatctgccgcgcccgctgcactttggtacacagggtgaagggatggtcggtgtgcgcccggaagcgatcacgctcagcgatcgcggcgaagagagccagcgctgcgtgatccgccatgtcgcctatatggggccgcagtatgaagtgacggtggaatggcacgggcaggagatattattgcaggtcaacgctacgcgtctgcaaccggacgtcggcgagcagtattatcttgaaatccatccgtacggcatgtttgttctggcggatgcggcataa

SEQ ID NO: 21661 - DNA, 856 bp, Homo sapiens
  SIMILAR (242)..(853): 971254mologous to Cloning vector pZC320 SopA,accession number U26464,Smith-Waterman Score=1025.
ggattttgccgatttcggaaccaccatcaaacaggattttcgcttgctggggcaaaccagcgtggaccgcttgctgcaactctctcagggccaggcggtgaagggcaatcagctgttgcccgtctcatgggtgaaaagaaaaaccaccctggcgcccaatacgcaacccgcctctccccgcgcgttggccgattcattaatgcagctggcacgacaggtttcccgactggaaagcgggcacccacttgctggcccggggctgacaattatcccttcctgtctggctctgccccgtattgaaactgagttaatgggcaaatttgatgaaggtaaactgcccaccgatccacacttgatgctcggactggccattgaaactgttgctcatgactatgatgtcatagttattgacagcgcgcctaacctgggtatcggcacgattaatgtcgtatgtgctgctgatgtgctgattgttcccacgcctgctgagttgtttgactacacctccgcactgcagtttttcgatatgcttcgtgatctgctcaagaacgttgatcttaaagggttcgagcctgatgtacgtattttgcttaccaaatacagcaatagtaatggctctcagtccccgtggatggaggagcaaattcgggatgcctggggaagcatggttctaaaaaatgttgtacgtgaaacggatgaagttggtaaaggtcagatccggatgagaactgtttttgaacaggccattgatcaacgctcttcaactggtgcctggagaaatgctctttctatttgggaacctgtctgcaatgaaattttcgatcgtctgattaaaccacgctgggagattagataa

SEQ ID NO: 21662 - DNA, 2391 bp, Homo sapiens; identical to SEQ ID NO: 7151
  SIMILAR (1)..(759): 1001254mologous to Cloning vector pZC320 SopA,accession number U26464,Smith-Waterman Score=1326.
  misc_feature (1)...(2391): n = a,t,c or g

SEQ ID NO: 21663 - DNA, 762 bp, Homo sapiens
  SIMILAR (106)..(759): 991254mologous to Cloning vector pZC320 SopB,accession number U26464,Smith-Waterman Score=1059.
atggacgatatcccgcaagaggcccggcagtaccggcataaccaagcctatgcctacagcatccagggtgacggtgccgaggatgacgataagcgcattgttagatttcatacacgagtatctggtgtcatagaaattgccgatgggagtcgccgtcgtaaagctgctgcacttaccgaaagtgattatcgtgttctggttggcgagctggatgatgagcagatggctgcattatccagattgggtaacgattatcgcccaacaagtgcttatgaacgtggtcagcgttatgcaagccgattgcagaatgaatttgctggaaatatttctgcgctggctgatgcggaaaatatttcacgtaagattattacccgctgtatcaacaccgccaaattgcctaaatcagttgttgctcttttttctcaccccggtgaactatctgcccggtcaggtgatgcacttcaaaaagcctttacagataaagaggaattacttaagcagcaggcatctaaccttcatgagcagaaaaaagctggggtgatatttgaagctgaagaagttatcactcttttaacttctgtgcttaaaacgtcatctgcatcaagaactagtttaagctcacgacatcagtttgctcctggagcgacagtattgtataagggcgataaaatggtgcttaacctggacaggtctcgtgttccaactgagtgtatagagaaaattgaggccattcttaaggaacttgaaaagccagcaccctga

SEQ ID NO: 21664 - DNA, 1086 bp, Homo sapiens
  SIMILAR (631)..(1080): 921254mologous to Cloning vector pZC320 SopB,accession number U26464,Smith-Waterman Score=682.
atggagaaaaaaatcactggatataccaccgttgatatatcccaatggcatcgtaaagaacattttgaggcatttcagtcacctgctcaatgtacaaaaaaccaaacagttcagctggatattacggcctttttaaagaccgtaaagaaaaataagcacaagttttatccggcctttattcacattcttgcccgcctgatgaatgctcatccggagttccgtatggcaatgaaaggcgtgcccgggggtgatagtgttaaaaacacctctcgggtatggtcgggtaatgaacgtgaccagaagctgcttactgagaacgcactgaatgatctcatcccttcttttctactgactggtcaacagacaccggcgttgggtagaagagtatctggtgtcatagaaattgccgatggaagtcgccgtcgtaaagctgctgcacttaccgaaagtgattatcgtgttctggttggcgagctgtatgatgagcagatgcccccattatccagattgggtaacgattatcgcccaacaagtgctcacccccagaaaagacgttatgcaagccgattgcagaatgaatttgctggaaatatttctgcgctggctgatgcggaaaatatttcacgggttcgggatgtgaatttacttcttgaagtgctcggggttgatagtgttgagaagacttttcgggtatggtcaggtaatgaacgtgaccaggagctgcttatggaggacgcattggatgatctcatcccttcttttctactgactggtcaacagacaccggcgttcggtcgaagagtatctggtgtcatagaaattgccgatgggagtcgccgtcgtaaagctgctgcacttaccgaaagtgattatcgtgttctggttggcgagctggatgatgagcagatggctgcattatccagattgggtaacgattatcgcccaacaagtgcttatgaacgtggtcagcgttatgcaagccgattgcagaatgaatttgctggaaatatttctgcgctggctgatgcggaaaatatttcacgtaagattatcccccgctgtatcaactcttgccaaattgcctaa

SEQ ID NO: 21665 - DNA, 1575 bp, Homo sapiens
  SIMILAR (253)..(621): 961254mologous to Cloning vector pZC320 SopB,accession number U26464,Smith-Waterman Score=590.
atgcttcgtgatctgctcaagaacgttgatcttaaagggttcgagcctgatgtacgtattttgcttaccaaatacagcaatagtaatggctctcagtccccgtggatggaggagcaaattcgggatgcctggggaagcatggttctaaaaaatgttgtacgtgaaacggatgaagttggtaaaggtcagatccggatgagaactgtttttgaacaggccattgatcaacgctcttcaactgataatgaaggtgcgcctgttattccaaaacatacgctcaatactcaaccggttgaagatacttcgttatcgacaccagctgccccgatggtggattcgttaattgcgcgcgtaggagtaatggctcgcggtaatgccattactttgcctgtatgtggtcgggatgtgaagtttactcttgaagtgctccggggtgatagtgttgagaagacctctcgggtatggtcaggtaatgaacgtgaccaggagctgcttactgaggacgcactggatgatctcatcccttcttttctactgactggtcaacagacaccggcgttcggtcgaagagtatctggtgtcatagaaattgccgatgggggatcctctagatccaagaaaaggaggcgggggtgtgaaggggggaggcggggagacagggctgcccggatcagaaacatcctgcagcattctccgtctccggaggaaaaatacatttgtctgggcgaactccggtggaaaagcgccccaggctgccacagcctagagatcttggtgctcgagccttcgcggcctgccgagggagcagggggcgcccgtggaactggctccctgcagctctgcggctacacgcggacctcggctgtgtgcgaggtggcggaggaggctggccgggtgcgaatccgtacccagccccagcatcttccacctgctgaggaccaccgctcagccatgggctaccagaggcaggagcctgtcatcccgccgcaggtaaaactagcgactaggcaggttctgaagccagttgtccggaaatttcattcaccttgcaacagggccaaccatagtacatgtcgttgtaaccctttagaacggagtaacttcggtgtgccgtttgtatgtcctgcttgtggattgctgctggtcccgccttatccacaacattttgcgcacggttatgtggacaaaattacctgcttacccagcggtgccggtcacgttaaccgggctgcatccgatgcaatcaggcaccgttgtatgaaatctaacaatgcgctcatctgtcatcctcggcaccgtcaccctggatgctgtaggcataggcttggttatgccggtactgccgggcctcttgcgggatatcgtccattccgacagcatcgccagccactatggcgtgtctctagcgctatatgcgttgatgcaatttctatgcgcacccgttctcggagcactgtccgatcgtatttgccgccgcccagtccctggcacttcgctacttggagccactatcgactacgcgatcatggcgaccacacccgtcttgtggtttttcctcacacgacaatggattaa

SEQ ID NO: 21666 - DNA, 975 bp, Homo sapiens
  SIMILAR (317)..(273): 531254mologous to Cloning vector pZC320 SopA,accession number U26464,Smith-Waterman Score=43.
tcaacaagatggtgaattgactagtgggtagatccacaggacgggtgtggtcgccatgatcgcgtagtcgatagtggctccaagtagcgaagcgagcaggactgggcggcggccaaagcggtcggacagtgctccgagaacgggtgcgcatagaaattgcatcaacgcatatagcgctagcagcacgccatagtgactggcgatgctgtcggaatgcaccacatcccgcaagaggcccggcagtaccggcataaccaagcctatgcctacagcatccagggtgacggtgccgaggatgacgatgagcgcattgttagatttcatacacggtgcctgacagaagcattcgaaaaactgcagtgcggaggtgtagtcaaccaactcagcaggcgtgggaacaatcagcacatcagcagcacatacgacattaatcgtgccgatacccaggttaggcgcgctgtcaataactatgacatcatagtcatgagcaacagtttcaatggccagtcggagcatcaggtgtggatcggtgggcagtttaccttcatcaaatttgcccattaactcagtttcaatacggtgcagagccagacaggaaggaataatgtcaagccccggccagcaagtgggctttattgcataagtgacatcgtccttttccccaagatagaaaggcaggagagtgtcttctgcatgaatatgaagatctggtacccatccgtgatacattgaggctgttccctgggggtcgttaccttccacgagcaaaacacgtagccccttcagagccagatcctgagcaagatgaacagaaactgaggttttgtaaacgccacctttatgggcagcaaccccgatcaccggtggaaatacgtcttcagcacgtcgcaatcgcgtacccaacacatcacgcatatgattaatatgttcaattgtataaccaacacgttgctcaacccgtcctcgaatttccat

SEQ ID NO: 21667 - DNA, 798 bp, Homo sapiens
  SIMILAR (798)..(13): 861254mologous to Cloning vector pZC320 SopA,accession number U26464,Smith-Waterman Score=1167.
tcaagcaagtaagcgttgatcaaggggcggttcaaaaccagttttcaccgggttctctcctttcccaacttcatcggtttcgcggacaacttttttagacccatgttccccaggcatccgaatttgttgttccatccccgggggactgagagccattactattgttgtattgggtaaatcaggctcgaaccctttaagatcaacgttcttgagcagatcacgaagcatatcgaaaaactgcagtgcggaggtgtagtcaaacaactcagcaggcgtgggaacaatcagcacatcagcagcacatacgacattaatcgtgccgatacccaggttaggcgcgctgtcaataactatgacatcatagtcatgagcaacagtttcaatggccagtcggagcatcaggtgtggatcggtgggcagtttaccttcatcaaatttgcccattaactcagtttcaatacggtgcagagccagacaggaaggaataatgtcaagccccggccagcaagtgggctttattgcataagtgacatcgtccttttccccaagatagaaaggcaggagagtgtcttctgcatgaatatgaagatctggtacccatccgtgatacattgaggctgttccctgggggtcgttaccttccacgagcaaaacacgtagccccttcagagccagatcctgagcaagatgaacagaaactgaggttttgtaaacgccacctttatgggcagcaaccccgatcaccggtggaaatacgtctggagctcgtcgcaatcgcgtaccaaacacatcacgcat

SEQ ID NO: 21668 - DNA, 975 bp, Homo sapiens; identical to SEQ ID NO: 4285
  SIMILAR (1)..(483): 991254mologous to Leishmania major probable levansucrase precursor,accession number AL160371,Smith-Waterman Score=843.
  misc_feature (1)...(975): n = a,t,c or g

SEQ ID NO: 21669 - DNA, 1142 bp, Homo sapiens
  SIMILAR (51)..(692): 881254mologous to Cloning vector pZC320 SopA,accession number U26464,Smith-Waterman Score=970.
atagtcgtgttaaattggggcagtcctcagagtcccaagtagcagcactcaagacaagggagcctatgaatatagcaaccctggaggttctggttttgaaagggctacgtgtttgtttcgtgaaagtaaaccaccccaagggaccagcttcaatgtatccgggatgggtaccaattctttatattcatgcagaagaccctctcctgcctttctatcttggggaaaaggaggatgtcacttatgcaataaagcccacttgctggccggggcttgacattattccttcctgtctggctctgccccgtattgaaactgagttaatgggcaaatttgatgaaggtaaactgcccaccgatccacacctgatgctccgactggccattgaaactgttgctcatgactatgatgtcatagttattgacagcgcgcctaacctgggtatcggcacgattaatgtcgtatgtgctgctgatgtgctgattgttcccacgcctgctgagttgtttgactacacctccgcactgcagtttttcgatatgcttcgtcctctgctcaagaacgttgatcttaaagggttcgagcctgatgtacgtattttgcttaccaaatacagcaatagtaatggctctcagtccccgtggatggaggagcaaattcgggatgcctggggaagcatggttctaaaaaatgttaaagaatttgctggaaatatttctgcgctggctgatgcggaaaatatttcacgtaagattattacccgctgtatcaacaccgccaaattgcctaaatcagttgttgtcttttttctcaccccggtgaactatctgcccggtgatgcacttcaaaaagcctttacagataaagaggaattacttaagcagcaggcatctaaccttcatgagcagaaaaaagctggggtgatatttgaagctgaagaagttatcactcttttaacttctgtgcttaaaacgtcatctgcatcaagaactagtttaagctcacgacatcagtttgctcctggagcgacagtattgtataagggcgataaaatggtgcttaacctggacaggtctcgtgttccaactgagtgtatagagaaaattgaggccattcttaaggaacttgaaaagccagcaccctga

SEQ ID NO: 21670 - DNA, 1206 bp, Homo sapiens
  SIMILAR (1188)..(814): 981254mologous to Cloning vector pZC320 SopA,accession number U26464,Smith-Waterman Score=663.
ttagaacctgcttccctcagcatcccgaatttgctcctccatccacggggactgagagccattactattgctgtatttggtaagcaaaatacgtacatcaggctcgaaccctttaagatcaacgttcttgagcagatcacgaagcatatcgaaaaactgcagtgcggaggtgtagtcaaacaactcagcaggcgtgggaacaatcagcacatcagcagcacatacgacattaatcgtgccgatacccaggttaggcgcgctgtcaataactatgacatcatagtcatgagcaacagtttcaatggccagtcggagcatcaggtgtggatcggtgggcagtttaccttcatcaaatttgcccattaactcagtttcaatacggtgcagagccagacaggaaggaataatgtcaagccccggccagcaagtgggctttattgcataagtgacatcgtccttttccccaagatagaaaggcaggagagtgtcttctgcatgaatatgaagatctggtacccatccgtgatacattgaggctgttccctgggggtcgttaccttccacgagcaaaacacgtagccccttcagagccgatcctgtcgtgccagctgcattaatgaatcggccaacgcgcggggagaggcggtttgcgtattgggcgccagggtggtttttcttttcaccagtgagacgggcaacagctgattgcccttcaccgcctggccctgagagagttgcagcaagcggtccacgctggtttgccccagcaggcgaaaatcctgtttgatggtggttccgaaatcggcaaaatccgacattaatcgtgccgagacccaggttaggcgcgctgtcaataactatgacatcatagtcatgagcaacagtttcaatggccagtcggagcatcaggtgtggatcggtgggcagtttaccttcatcaaatttgcccattaactcagtttcaatacggtgcagagccagacaggaaggaataatgtcaagccccggccagcaagtgggctttattgcataagtgacatcgtccttttccccaagatagaaaggcaggagagtgtcttctgcatgaatatgaagatctggtacccatccgtgatacattgaggctgttccctgggggtcgttaccttccacgagcaaaacacgtagccccttcagagccagatccttggtcttacgctctatcat

SEQ ID NO: 21671 - DNA, 1041 bp, Homo sapiens
  SIMILAR (1032)..(328): 971254mologous to Cloning vector pZC320 SopA,accession number U26464,Smith-Waterman Score=1188.
tcaacaagatggtgaattgactagtgggtagatccacaggacgggtgtggtcgccatgatcgcgtagtcgatagtggctccaagtagcgaagcgagcaggactgggcggcggccaaagcggtcggacagtgctccgagaacgggtgcgcatagaaattgcatcaacgcatatagcgctagcagcacgccatagtgactggcgatgctgtcggaatggacgatatcccgcaagaggcccggcagtaccggcataaccaagcctatgcctacagcatccagggtgacggtgccgaggatgacgatgagcgcattgttagatttcatacacggcgcctgacctttaagatcaacgttcttgagcagatcacgaagcatatcgaaaaactgcagtgcggaggtgtagtcaaacaactcagcaggcgtgggaacaatcagcacatcagcagcacatacgacattaatcgtgccgatacccaggttaggcgcgctgtcaataactatgacatcatagtcatgagcaacagtttcaatggccagtcggagcatcaggtgtggatcggtgggcagtttaccttcatcaaatttgcccattaactcagtttcaatacggtgcagagccagacaggaaggaataatgtcaagccccggccagcaagtgggctttattgcataagtgacatcgtccttttccccaagatagaaaggcaggagagtgtcttctgcatgaatatgaagatctggtacccatccgtgatacattgaggctgttccctgggggtcgttaccttccacgagcaaaacacgtagccccttcagagccagatcctgagcaagatgaacagaaactgaggttttgtaaacgccacctttatgggcagcaaccccgatcaccggtggaaatacgtcttcagcacgtcgcaatcgcgtaccaaacacatcacgcatatgattaatttgttcaattgtataaccaacacgttgctcaacccgtcctcgaatttccatatccggggtgcggtagtcgccctgctttctcggcat

SEQ ID NO: 21672 - DNA, 801 bp, Homo sapiens
  SIMILAR (1)..(492): 1001254mologous to Cloning vector pZC320 SopB,accession number U26464,Smith-Waterman Score=825.
atgaagcgtgcgcctgttattccaaaacatacgctcaatactcaaccggttgaagatacttcgttatcgacaccagctgccccgatggtggattcgttaattgcgcgcgtaggagtaatggctcgcggtaatgccattactttgcctgtatgtggtcgggatgtgaagtttactcttgaagtgctccggggtgatagtgttgagaagacctctcgggtatggtcaggtaatgaacgtgaccaggagctgcttactgaggacgcactggatgatctcatcccttcttttctactgactggtcaacagacaccggcgttcggtcgaagagtatctggtgtcatagaaattgccgatgggagtcgccgtcgtaaagctgctgcacttaccgaaagtgattatcgtgttctggttggcgagctggatgatgagcagatggctgcattatccagattgggtaacgattatcgcccaacaagtgcttatgaacgtggtgatgcacttcaaaaagcctttacagataaagaggagttacttaagcagcaggcatctaaccttcatgagcagaaaaaagctggggtgatatttgaagctgaagaagttatcactcttttaacttctgtgcttattacgtcatctgcatcaagaactggggggagctcacgacatcagtttgctcctggagcgacagtattgtataagggcgataaaatggtgcttaacctggacaggtctcgtgttccaactgagtgtatagagaaaattgaggccattcttaaggaacttgaaaagccagcaccctga

SEQ ID NO: 21673 - DNA, 1785 bp, Homo sapiens; identical to SEQ ID NO: 5203
  SIMILAR (478)..(1038): 941254mologous to Cloning vector pZC320 SopA,accession number U26464,Smith-Waterman Score=925.

SEQ ID NO: 21674 - DNA, 1134 bp, Homo sapiens
  SIMILAR (1)..(687): 921254mologous to Cloning vector pZC320 SopA,accession number U26464,Smith-Waterman Score=1093.
atggaaattaaaggaccggttgagcaacgtgttggttatacaattgagcaaattaatcatatgcgtgatgtgtttggtacgcgattgcgacgtgctgaagacgtatttccaccggtgatcggggttgctgcccataaatgtggcgtttacaaaacctcagtttctgtgcatcttgctcaggatctggctctgaaggggctacgtgttttgctcgtggaaggtaacgacccccagggaacagcctcaatgtatcacggatgggtaccagatcttcatattcatgcagaagacactctcctgcctttctatcttggggaaaaggacgatgtcacttatgcaataaagcccacttgctggccggggcttgacattattccttcctgtctggctctgcaccgtattgaaactgagttaatgggcaaatttgatgaaagtaaactgcccaccgatccacacctgatgctccgactggccattgaaactgttgctcatgactatgatgtcatagttattgacagcgcgcctaaactgggtatcgggacgattaatgtcgcatgtgctgctggagtgctgattgttcccccccctgctgagttgtttgactacaccttcgcactggagttttttcatttgcttcgtgatctggtcaagaaccttgatcttaaaagggtcgagggacctacggtaatgaacgtgaccaggagctgcttactggaggacgcactggatgatctcatcccttcttttctactgactggtcaacagacaccggcgttcggtcgaagagtatctggtgtcatagaaattgccgatgggagtcgccgtcgtaaagctgctgcacttaccgaaagtgattatcgtgttctggttggcgagctggatgatgagcagatggctgcattatccagattgggtaacgattatcgcccaacaagtgcttatgaacgtggtcagcgttatgcaagccgattgcagaatgaatttgctggaaatatttctgcgctggctgatgcggaaaatatttcacgtaagattattacccgctgtatcaacacccgccaattgcctaaatcagttgttggttttttttctcaccccggtgaactttctgcccggtcaggtgatgccctttaa

SEQ ID NO: 21675 - DNA, 3300 bp, Homo sapiens
  SIMILAR (482)..(562): 741254mologous to Cloning vector pZC320 SopB,accession number U26464,Smith-Waterman Score=91.
  misc_feature (1)...(3300): n = a,t,c or g
atggcgggcgcccttcccccagcctcgctgccgccttgcagtttgatctcagactgctgtgctagcaatcagggagactccgtgggcctaggatcctccgagccaggtgcgggatataatctcgtggtgcaccgttttttaagcaggtcagaaaagcgcagtattcgggtgggagtgacccgattttctagggatttccgatttggaccccccatcaacaagattttcgcctgtggggcaaaccagcgtggacggcttgctgcaattctctcagggccagccggtgaagggcaatcagctgttgcccgtctcactggtaaaaagaaaaaccaccctggcgcccaatacgcaacccgcctctccccgcgcgttggccgattcattaatgcagctggcacgacaggtttcccgactggaaagcgggcagtgagcgcaacgcaattaatgtccaatactcaccggttgaaaatatttggtaatgacccccagctgccccgagggggattcgttattggcgcgcgtaggagtaatggctcccggaaacgccattactttgctggtaatgaacgtgcccaggagctgcttactgaggacgcactggatgatctcatcctttcttttctactgactggtcaacagacaccggcgttcggtcgaagagtatctggtgtcatagaaattgccgatgggagtcgccgtcgtaaagctgctgcacttaccgaaagtgattatcgtgttctggttggcgagctggatgatgagcagatggctgcattatccagattgggtaacgattatcgcccaacaagtgcttatgaacgtggtcagcgttatgcaagcccattgcagaatgaatttgctggaaatatttctgcgctggctgatgcggaaaatatttcacgtaagattattacccgctgtatcaacaccgccaaattgcctaaatcagttgttgctcttttttctcaccccggtgaactatctgcccggtcagacacctccaacaggagcattcagctggcatcaggttggtgcccccctcggatggagctgccagaggaaggagcagtcttcaatctttgctcttttgcagcctttactagtgataccttcagggattttgccgatttcggaccccccatcacacaggattttcgcctgctggggcaaaccagcgtggaccgcttgctgcaactctctcagggccaggcggtgaagggcaatcagctgttgcccgtctcactggtgaaaagaaaaaccaccctggcgcccaatacgcaaaccgcctctccccgcgcgttggccgattcattaatgcagctggcacgacaggtttcccgactggaaagcgggcaggattttgccgatttcggaaccaccatcaaacaggattttcgcctgctggggcaaaccagcgtggaccgcttgctgcaactctctcagggccaggcggtgaagggcaatcagctgttgcccgtctcactggtgaaaagaaaaaccaccctggcgcccaatacgcaaaccgcctctccccgcgcgttggccgattcattaatgcagctggcacgacaggtttcccgactggaaagcgggcaaaataaagacccaactcaatggattgctacttttggtgcaactataacaccacccgcagtgaaacgaaatgtgaggaaaattattcttcatgagaattaccatagagaaacaaatgaaaatgacaccgctttggttcagctctctactggagttgagttttcaaatatagtccagagagtttgcctcccagactcatctataaagttgccacctaaaacaagtgtgttcgtcacaggatttggatccattgtagatgatgcctcgctgccgccttgcagtttgatctcagactgctgtgctagcaatcagggagactccgtgggcctaggatcctccgagccaggtgcgggatataatctcgtggtgcaccgttttttaagcaggtcagaaaagcgcagtattcgggtgggaggacccgattttctaggggatttttgttcccaaatgggaaccaacactcaaccctatcttggggctattctttttattaataagggatttgcccgatttgggaacccaccatccaacagggatttttcgcttgctggggcaaaaccagcgtggacccgcttgctgcacttctctcagggcccagggggtgaagggcaatcagctgttgcccgtctcactggtgaaaagaaaaaccaccctggcgctcaatacgcaaaccgcctctccccgcgcgttggccgattcattaatgcagctggcacgacaggtttcctgactggaaagcgggcagtgagcgcaacgcaattaataataaccaatacagagaagtgcttaaaggagctgatgaagctgaaaaccaaggctcgagaactacgtgaagaatgcagaagcctcaggagccgatgcgatcaactggaagaaagggtgtcagcaatggaagatgaaatgaatgaaatgaagcgagaagggaagtttagagaaaaaagaataaaaagaaacgagcaaagcctccaagaaatatgggactatgtgaaaagaccaaatctacgtctgattggtgtaactgaaagtgatggggagaatggaaccaagttggaaaacactctgcaggatattatccaggagaacttccccaacctagcaaggcagtccaacgttcagatgtctaggatatttcgacattcttctgtaggcggtcgatttatcaaatctcatgttatcaaattaagattgggtaacgattatcgcccaccaagggcttatgcacgtggtcagcgttatgcaacccgattgcagaatgaatttgctgnaaatatttctgcgctggctgatgcggaaaatatttcacgtaagattattacccgctgtatcaaccccgccaaattgcctaaatcagttgttgctctnttttctcaccccggtgaactatctgcccggtcaggtgatgcacttcaaaaagcctttacagataaagaggaattacttaagcagcaggcatctaaccttcatgagcagaaaaaagctggggtgatatttgaagctgaagaagttatcactcttttaacttctgtgcttaaaacgtcatctgcatcaagaactagtttaagctcaccacatcagtttgctcctggagcgacagtattgtataagggcgataaaatggtgcttaacctggacaggtctcgtgttccaactgagtgtatagagaaaattgaggccattcttaaggaacttgaaaagccagcaccctga

SEQ ID NO: 21676 - DNA, 898 bp, Homo sapiens
  SIMILAR (412)..(897): 921254mologous to Cloning vector pZC320 SopB,accession number U26464,Smith-Waterman Score=752.
atgctccgactggccattgaaactgttgctcatgactatgatgtaaaacatattgacagcgcgcctaacctgggtatcggcacgattaatgtcgtatgtgctgctgatgtgctgattgttcccacgcctgctgagttgtttgactacacctccgcactgcagtttttcgatatgcttcgtgatctgctcaagaacgttgatcttaaagggttcgagcctgatgtacgtattttgcttaccaaatacagcaatagtaatggctctcagtccccgtggatggaggagcaaattcgggatgcctggggaagcatggttctaaaaattgttgtacgtgaacggaatgaagttggtaaaggtcagatccggatgagaactgtttttgaccaggccattgatcaacgctcttcaactgatacttcgttatcgacaccagctgccccgatggtggattcgttaattgcgcgcgtaggagtaatggctcgcggtaatgccattactttgcctgtatgtggtcgggatgtggagtttactcttgaagtgctccggggtgatagtgttgagaagacctctcgggagctgcttactgaggacgcactggatgatctcatcccttcttttctactgactggtcaacagacaccggcgttcggtcgaagagtatctggtgtcatagaaattgccgatgggagtcgccgtcgtaaagctgctgcacttaccgaaagtgattatcgtgttctggttggcgagctggatgatgagcagatggctgcattatccagattgggttttttttatcgcccaacaagtgcttatgaacgtggtcagcgttatgcaagccgattgcagaatgaatttgctggaaatatttctgcgctggcggatgcggaaaatatttcac

SEQ ID NO: 21677 - DNA, 1980 bp, Homo sapiens; identical to SEQ ID NO: 5204
  SIMILAR (190)..(786): 951254mologous to Cloning vector pZC320 SopB,accession number U26464,Smith-Waterman Score=932.
  misc_feature (1)...(1980): n = a,t,c or g

SEQ ID NO: 21678 - DNA, 1932 bp, Homo sapiens; identical to SEQ ID NO: 5205
  SIMILAR (418)..(1038): 911254mologous to unidentified cloning vector 29kD protein essential for the replication of mini F plasmid,accession number AB015619,Smith-Waterman Score=970.
  misc_feature (1)...(1932): n = a,t,c or g

SEQ ID NO: 21679 - DNA, 1014 bp, Homo sapiens
  SIMILAR (1014)..(223): 841254mologous to Cloning vector pZC320 SopA,accession number U26464,Smith-Waterman Score=1170.
tcaacaagatggtgaattgactagtgggtagatccacaggacgggtgtggtcgccatgatcgcgtagtcgatagtggctccaagtagcgaagcgagcaggactgggcggcggccaaagcggtcggacagtgctccgagaacgggtgcgcatagaaattgcatcaacgcatatagcgctagcagcacgccatagtgactggcgatgctgtcggaatggacgatatcccgcaagaggcccggcagtaccggcataaccaagcctatgcctacagcatccagggtgacggtgccgaggatgacgatgagcgcattgttagatttcatacacggtgcctgatagtagtacatcaggtgtggatcggtgggcagactaccttcatcaaatttgcccattaactcagtttcaatacggtgcagagccagacaggaaggaataatgtcaagccccggccagcaagtgggctttattgcataagtgacatcgtccttttccccaagatagaaaggcaggagagtgtcttctgcatgaatatgaagatctggtacccatccgtgatacattgtttctgttccctgggggtcgttaccttccacgagcaaaacacgtagccccttcagagccagatcctgagcaagatgaacagaaactgaggttttgtaaacgccacctttatgggcagcaaccccgatcaccggtggaaatacgtcttcagcacgtcgcaatcgcgtaccaaacacatcacgcatatgattaatttgttcaattgtataaccaacacgttgctcaacccgtcctcgaatttccatatccgggtgcggtagtcgccctgctttctcggcatctctgatagcctgagaagaaaccccaactaaatccgctgcttcacctattctccagcgccgggttattttcctcgcttccgggctgtcatcattaaactgtgcaatggcgatagccttcgtcatttcatgaccagcgtttatgcactggttaagtgtttccatgagtttcat

SEQ ID NO: 21680 - DNA, 1077 bp, Homo sapiens
  SIMILAR (317)..(273): 531254mologous to Cloning vector pZC320 SopA,accession number U26464,Smith-Waterman Score=43.
  misc_feature (1)...(1077): n = a,t,c or g
tcaacaagatggtgaattgactagtgggtagatccacaggacgggtgtggtcgccatgatcgcgtagtcgatagtggctccaagtagcgaagcgagcaggactgggcggcggccaaagcggtcggacagtgctccgagaacgggtgcgcatagaaattgcatcaacgcatatagcgctagcagcacgccatagtgactggcgatgctgtcggaatggacgatatcccgcaagaggcccggcagtaccggcataaccaagcctatgcctacagcatccagggtgacggtgccgaggatgacgatgagcgcattgttagatttcatacacggtgcctgacntagtctaggcgcgctgtcaataactatgacatcatagtcatgagcaacagtttcaatggccagtcggagcatcaggtgtggatcggtgggcagtttaccttcatcaaatttgcccattaactcagtttcaatacggtgcagagccagacaggaaggaataatgtcaagccccggccagcaagtgggctttattgcataagtgacatcgtccttttccccaagatagaaaggcaggagagtgtcttctgcatgaatatgaagatctggtacccatccgtgatacattgaggctgttccctgggggtcgttaccttccacgagcaaaacacgtagccccttcagagccagatcctgagcaagatgaacagaaactgaggttttgtaaacgccacctttatgggcagcaaccccgatcaccggtggaaatacgtcttcagcacgtcgcaatcgcgtaccaaacacatcacgcatatgattaatttgttcaattgtataaccaacacgttgctcaacccgtcctcgaatttccatatccgggtgcggtagtcgccctgctttctcggcatctctgatagcctgagaagaaaccccaactaaatccgctgcttcacctattctccagcgccgggttattttcctcgcttccgggctgtcatcattaaactgtgcaatggcgatagccttcgtcatttcatgaccagcgtttatgcactggttaagtgtttccatgagtttcat

SEQ ID NO: 21681 - DNA, 783 bp, Homo sapiens; identical to SEQ ID NO: 13447
  SIMILAR (1)..(660): 981254mologous to Cloning vector pZC320 SopB,accession number U26464,Smith-Waterman Score=1079.

SEQ ID NO: 21682 - DNA, 1053 bp, Homo sapiens; identical to SEQ ID NO: 4282
  SIMILAR (496)..(1050): 991254mologous to Cloning vector pZC320 SopB,accession number U26464,Smith-Waterman Score=920.

SEQ ID NO: 21683 - DNA, 735 bp, Homo sapiens
  SIMILAR (4)..(648): 821254mologous to Cloning vector pZC320 SopB,accession number U26464,Smith-Waterman Score=878.
atgaccaccagcggccccgaggggaatttgttaatggcgcgcgtaggagtaaaggctcgcggtaaagcccattacttgcccttgctccggggtgaaagtgtgagaaagacctctcgggtagggtcaggtaatgaacgtgaccaggagctgcttactgaggacgcactggatgatctcatcccttcttttctactgactggtcaacagacaccggcgttcggtcgaagagtatctggtgtcatagaaattgccgatgggagtcgccgtcgtaaagctgctgcacttaccgaaagtgattatcgtgttctggttggcgagctggatgatgagcagatggctgcattatccagattgggtaacgattatcgcccaacaagtgcttatgaacgtggtcagcgttatgcaagccgattgcagaatgaatttgctggaaatatttctgcgctggctgatgcggaaaatatttcacgtcagattattacccgctgtatcaacaccgccaaattgcctaaatcagttgttgctcttttttctcaccccggtgaactatctgcccggtcaggtgatgcacttcaaaaagcctttacagaaaagagaacacttaagcagcaggcactaacttcagagcaaaaaaagcggggtataatgaagctgaagaagtatcatcgtctttatctccccaagggcggctttctaaccgaagtgcctctaaggatatgtactcatcctttttaa

SEQ ID NO: 21684 - DNA, 1089 bp, Homo sapiens
  SIMILAR (118)..(885): 901254mologous to Cloning vector pZC320 SopB,accession number U26464,Smith-Waterman Score=1138.
atgaacatgaacatcaaaaaaattgtaaaacaagccacagttctgacttttacgactgcacttctggcaggaggagcgactcaagccttcgcgaaagaaaataaccaaaaagcatacaaagaaacgaaggcggtagggtcaggtaatgaacgtgaccaggagctgcttactgaggaggcatggaatgatctcatcctttcttttctactgactggtcaacagaccccggcgttcggtcgaagagtatctggtgtcatagaaattccggatgggagtcgccgtcgtaaagctgctgcacttccgaaaagtgattatcgtgttctggttggcgagctggatgatgagcagatggctgcattatccagattgggtaacgattatcgcccaacaagtgcttatgaacgtggtcagcgttatgcaagccgattgcagaatgaatttgctggaaatatttctgcgctggctgatgcggaaaatatttcacgtaagattattacccgctgtatcaacaccgccaaattgcctaaatcagttgttgctcttttttctcaccccggtgaactatctgcccggtcaggtgatgcacttcaaaaagcctttacagataaagaggaattacttaagcagcaggcatctaaccttcatgagcagaaaaaagctggggtgatatttgaagctgaagaagttatcactcttttaacttctgtgcttaaaacgtcatctgcatcaagaactagtttaagctcacgacatcagtttgctcctggagcgacagtattgtataagggcgataaaatggtgcttaacctggacaggtctcgtgttccaactgagtgtaagagaaaattgaggccattcttaaggaacttgaaaagccagcaccctgatgcgggggatcctctacagaagactggcttgcatgcccctagggcttcctcattcagtcagctagcattagattatgccctttttgtcctatctatcttctacccgggctgcccattctttgttaaacttaagcataaaaacagacaatttcttctgtatctttgggtcttcattctaaaggccgctgtgtatacacattaa

SEQ ID NO: 21685 - DNA, 924 bp, Homo sapiens
  SIMILAR (523)..(921): 951254mologous to Cloning vector pZC320 SopB,accession number U26464,Smith-Waterman Score=622.
atgaaactcatggaaacacttaaccagtgcataaacgctggtcatgaaatgacgaaggctatcgccattgcacagtttaatgatgacagcccggaagcgaggaaaataacccggcgctggagaataggtgaagcagcggatttagttggggtttcttctcaggctatcagagatgccgagaaagcagggcgactaccgcacccggatatggaaattcgaggacgggttgagcaacgtgttggttatacaattgaacaaattaatcatatgcgtgatgtgtttggtacgcgattgcgacgtgctgaagacgtatttccaccggtgatcggggttgctgcccataaaggtggcgtttacaaaacctcagtttctgttcatcttgctcaggatctggctctgaaggggctacgtgttttgctcgtggaagtgcttatgaacttggtcagcgttatgcaagccgattgcagaatgcatttgctggaaaaatttctgcgctggctgatgcggaaatattttcacgtaagattatttacccgctgtatcaacaccgccaaattgcttaaatcagttgttgctcttttttctcacccggttgaactatctgcccggtcaggtgatgcacttcaaaaagcctttacagataaagaggaattacttaagcagcaggcatctaaccttcatgagcagaaaaaagctggggtgatatttgaagctgaagaagttatcactctttttacttctgtgcttaaaacgtcatctgcatcaagaactagtttaagctcacgacatcagtttgctcctggagcgacagtattgtataagggcgataaaatggtgcttaacctggacaggtctcgtgttccaactgagtgtatagagaaaattgaggccattcttaaggaacttgaaaagccagcaccctga

SEQ ID NO: 21686 - DNA, 1992 bp, Homo sapiens; identical to SEQ ID NO: 7126
  SIMILAR (1)..(438): 981254mologous to Cloning vector pZC320 SopA,accession number U26464,Smith-Waterman Score=733.

SEQ ID NO: 21687 - DNA, 588 bp, Homo sapiens
  SIMILAR (4)..(210): 441254mologous to Cloning vector pZC320 SopA,accession number U26464,Smith-Waterman Score=119.
  misc_feature (1)...(588): n = a,t,c or g
nttaaccagtgcataaacgctggtcagtaaatgaggaaggctatccccactggcacagcttaatgattgcagcgccggaacgagggaaaaataacccggcgctgggaaatagggtaaaccaccgatataatttggggtttttttccaggcttccaaagatccgaaaaaccaggccggactccggcaccggatatggaaaatcgaaggcggggttgagcaacgtgttggttatacaattgaacaaattaatcatatgcgtgatgtgtttggtacgcgattgcgacgtgctgaagacgtatttccaccggtgatcggggttgctgcccataaaggtggcgtttacaaaacctcagtttctgttcatcttgctcaggatctggctctgaaggggctacgtgttttgctcgtggaaggtaccgacccccagggaacagcctcaatgtatcacggatgggtaccagatcttcatattcatgcagaagacactctcctgcctttctatcttggggaaaaggacgatgtcacttatgcaataaagcccacttgctggccggggcttgacattattccttcctgtccggntntnct

SEQ ID NO: 21688 - DNA, 848 bp, Homo sapiens
  SIMILAR (393)..(842): 921254mologous to Cloning vector pZC320 SopB,accession number U26464,Smith-Waterman Score=682.
tgcccgggggtgatagtgttaaaaacacctctcgggtatggtcgggtaatgaacgtgaccagaagctgcttactgagaacgcactgaatgatctcatcccttcttttctactgactggtcaacagacaccggcgttgggtagaagagtatctggtgtcatagaaattgccgatggaagtcgccgtcgtaaagctgctgcacttaccgaaagtgattatcgtgttctggttggcgagctgtatgatgagcagatgcccccattatccagattgggtaacgattatcgcccaacaagtgctcacccccagaaaagacgttatgcaagccgattgcagaatgaatttgctggaaatatttctgcgctggctgatgcggaaaatatttcacgggttcgggatgtgaatttacttcttgaagtgctcggggttgatagtgttgagaagacttttcgggtatggtcaggtaatgaacgtgaccaggagctgcttatggaggacgcattggatgatctcatcccttcttttctactgactggtcaacagacaccggcgttcggtcgaagagtatctggtgtcatagaaattgccgatgggagtcgccgtcgtaaagctgctgcacttaccgaaagtgattatcgtgttctggttggcgagctggatgatgagcagatggctgcattatccagattgggtaacgattatcgcccaacaagtgcttatgaacgtggtcagcgttatgcaagccgattgcagaatgaatttgctggaaatatttctgcgctggctgatgcggaaaatatttcacgtaagattatcccccgctgtatcaactcttgccaaattgcctaa

SEQ ID NO: 21689 - DNA, 972 bp, Homo sapiens
  SIMILAR (343)..(969): 991254mologous to Cloning vector pZC320 SopB,accession number U26464,Smith-Waterman Score=1020.
atgggactgaccctgaacttagagccgcccccagctggaacctgggctccccggcgcggccaccaggtggcactggcgccctccctcgcggacccaggctggtgctctcgtcctttcaagcacaagcttggaggcctgattttcaatcagttgctttcaaacgcacaaacgccgaaccggtttacgcagtttcggcttagtgaaacaaaagaaatcaccaatccgtatgccatgcgtttatacgaatccctgtgtcagtatcgtaagccggatggctcaggcatcgtctctctgaaaatcgactggatcatagagcgttaccagctgcctcaaagttaccagcaaattgccgatgggagtcgccgtcgtaaagctgctgcacttaccgaaagtgattatcgtgttctggttggcgagctggatgatgagcagatggctgcattatccagattgggtaacgattatcgcccaacaagtgcttatgaacgtggtcagcgttatgcaatccgattgcagaatgaatttgctggaaatatttctgcgctggctgatgcggaaaatatttcacgtaagattattacccgctgtatcaacaccgccaaattgcctaaatcagttgttgctcttttttctcaccccggtgaactatctgcccggtcaggtgatgcacttcaaaaagcctttacagataaagaggaattacttaagcagcaggcatctaaccttcatgagcagaaaaaagctggggtgatatttgaagctgaagaagttatcactcttttaacttctgtgcttaaaacgtcatctgcatcaagaactagtttaagctcacgacatcagtttgctcctggagcgacagtattgtataagggcgataaaatggtgcttaacctggacaggtctcgtgttccaactgagtgtatagagaaaattgaggccattcttaaggaacttgaaaagccagcaccctga

SEQ ID NO: 21690 - DNA, 1617 bp, Homo sapiens
  SIMILAR (919)..(1614): 961254mologous to Cloning vector pZC320 SopB,accession number U26464,Smith-Waterman Score=1092.
atgcagcgacaattgactggatcattaaggatttgtacagacttcctttctggggctttaaagcttactaagcatcagttctcagtaagtacaacccgtccctcagggcggggcgatcgcgcggagtcgggggcggtttcctgcacacagaaagggagtgcttttaggggcaaaggaagctgcccgcggcgtagggacgtctttctaatgtcagcagagagaggccgatgcgggaagagttatccacagatgcgggaagggagaggacgcgagaaggggaaccgcgttctcctggccttccgcggacggggatcgggcaattcagagatcatcagagtggtttcaaaagaggagccacctgtgcctgcaggttcacacactccactccctgcagtctggcaccctgctcctctgcagcacaagatatcgaaggatggaccacaggcacaacacccaggtaaggaaccaccacaaggcaaggccaccacaaagagctgctactatggcaaggcccagcaaagccatgggggcaggactgcctggaggcttagggatccaaccaatggccagcaaaactgcagggatggagcctccactctagtgtgtccagaaggtggaacggcagccccagggggatcctctagcacattcgacccaatagaagatgtactgagaggagatagaggaagagataaggtaaaaagtttattcaaagggataataccagagaactttccaaacctagagaaagatatcaacattcaagtacaagaaggctatagaacaccacgcagatttaaccccaagactacttccagccatttaataatcaaactcctaaaggtcaaggataaagaaaggatcctaaaagcagcaagagaaaagaaacaaataacatgcaaaggaactccaatatatctggtagcagacttctcagtagaaaccttacagacaccggcgtcgggtcgaagagtatctggtgtcatagaaattgccgatgggagtcgccgtcgtaaagctgctgcacttaccgaaagtgattatcgtgttctggttggcgagctggatgatgagcagatggctgcattatccagattgggtaacgattatcgcccaacaagtgcttatgaacgtggtcagcgttatgcaagccgattgcagaatgaatttgctggaaatatttctgcgctggctgatgcggaaaatatttcacgtaagattattacccgctgtatcaacaccgccaaattgcctaaatcagttgttgctcttttttctcaccccggtgaactatctgcccggtcaggtgatgcacttcaaaaagcctttacagataaagaggaattacttaagcagcaggcatctaaccttcatgagcagaaaaaagctggggtgatatttgaagctgaagaagttatcactcttttaacttctgtgcttaaaacgtcatctgcatcaagaactagtttaagctcacgacatcagtttgctcctggagcgacagtattgtataagggcgataaaatggtgcttaacctggacaggtctcgtgttccaactgagtgtatagagaaaattgaggccattcttaaggaacttgaaaagccagcaccctga

SEQ ID NO: 21691 - DNA, 867 bp, Homo sapiens
  SIMILAR (184)..(840): 731254mologous to Cloning vector pZC320 SopB,accession number U26464,Smith-Waterman Score=742.
atggacgatatcccgcaagaggcccggcagtaccggcataaccaagcctatgcctacagcatccagggtgacggtgccgaggatgacgatgagcgcattgttagatttcatacacgggtcaccgtcgacagcgacacacttgcatcggatgcagcccggttaacgtgccggcacggcctggctcgggatgtgaagtttactcttgaagtgctccggggtgatagtgttgagaagacctctcgggtatggtcaggtaatgaacgtgaccaggagctgcttactgaggacgcactggatgatctcatccctttttttctactgactggtcaacagacaccggcgttcggtcgaagagtatctggtgtcatagaaattgccgatgggagtcgccgtcgtaaagctgctgcacttaccgaaagtgattatcgtgttctggttggcgagctggatgatgagcagatggctgcattatccagattgggtaacgattatcgcccaacaagtgcttatgaacgtggtcagcgttatgcaagccgattgcagaatgaatttgctggaaatatttctgcgctggctgatgcggaaaatatttcacgtaagattattacccggctgtatcaacaccggcacaattggctaaatcaggtgttgctcttttttctcaccccggtgaactatctgccccgtcaggggatgcactttaaaaagcctttaccgattaagaggaatttctttaaccgcaaggatctaacctttattgaacagaaaaaagctgggggtgatatttggaagctgaaaaaaattttcactctttttaacttctgtggtttaaaaacgtcattttgcgtcaaagaactaattttatag

SEQ ID NO: 21692 - DNA, 1341 bp, Homo sapiens
  SIMILAR (116)..(142): 881254mologous to Leishmania major probable levansucrase precursor,accession number AL160371,Smith-Waterman Score=43.
atgctagtgtggtgtcccttaaaagtcgacggcccagggggccgccaggcctaccccaaaggcaaatcgggaggatcgaaacgccagatcgcaaaaaccagtccatccagaaggagacatgaacatgaacatcaaaaaaatgtaaaacaagccccagttctgacttttacgactgcacttctggcaggaggagcgactcaagccttcgcgaaagaaaataaccaaaaagcatacaaagaaacgtacggcgtctctcatattacacgccatgatatgctgcagatccctaaacagcagcaaaacgaaaaataccaagtgcctcaattcgatcaatcaacgattaaaaatattgagtctgcaaaaggacttgatgtgtgggacagctggccgctgcaaaacgctgacggaacagtagctgaatacaacggctatcacgttgtgtttgctcttgcgggaagcccgaaagacgctgatgacacatcaatctacatgttttatcaaaaggtcggcgacaactcaatcgacagctggaaaaacgcgggccgtgtctttaaagacagcgataagttcgacgccaacgatccgatcctgaaagatcagacgcaagaatggtccggttctgcaacctttacatctgacggaaaaatccgtttattctacactgactattccggtaaacattacggcaaacaaagcctgacaacagcgcagaaattgccgatgggagtcgccgtcgtaaagctgctgcacttaccgaaaagtgattatcgtgttctggttggcgagctggatgataagcagatggctgcattatccagattgggtaacgattatcgcccaacaagtgcttatgaacgtggtcagcgttatgcaagccgattgcagaatgaatttgctggaaatatttctgcgctggctgatgcggaaaatatttcacgtaagattattacccgctgtatcaacaccgccaaattgcctaaatcagttgttgctcttttttctcaccccggtgaactatctgcccggtcaggtgatgcacttcaaaaagcctttacagataaagaggaattacttaagcagcaggcatctaaccttcatgagcagaaaaaagctggggtgatatttgaagctgaagaagttatcactcttttaacttctgtgcttaaaacgtcatctgcatcaagaactagtttaagctcacgacatcagtttgctcctggagcgacagtattgtataagggcgataaaatggtgcttaacctggacaggtctcgtgttccaactgagtgtatagagaaaattgaggccattcttaaggaacttgaaaagccagcaccctga

SEQ ID NO: 21693 - DNA, 1812 bp, Homo sapiens
  SIMILAR (445)..(1140): 971254mologous to Cloning vector pZC320 SopB,accession number U26464,Smith-Waterman Score=1122.
atgagggtgcaggcattgggtaaatacaggcattcaaaatgggagaaattggccaaaacaaagaggctgcaggcccaatgcaagtcccccccccagtggggcagtcaaatattaaagctacaaaatgatctcctcgcttacatccaggtcacactgatgcaagagtggactcttgttcccaaacgggaacaacactcaacctattctcgggctattcttttgatttataagggattttgccgatttcggaaccaccatcaaacaggattttcgcctgctggggcaaaccagcgtggaccgcttgctgcaactctctcagggccaggcggtgaagggcaatcagctgttgcccgtctcactggtgaaaagaaaaaccaccctggcgcccaatacgcaaaccgcctctccccgcgcgttggccgattcattaatgcagctggcacgacaggtaatgaacgtgaccaggagctgcttactaagaacgcatgggatgatctcatcccttcttttctactgactggtcaacaaacaccggcgttcggtcgaagagtatctggtgtcatagaaattgccgatgggagtcgccgtcgtaaagctgctgcacttaccgaaagtgattatcgtcttctggttggcgagctggatgatgagcagatggctgcattatccagattgggtaacgattatcgcccaacaagtgcttatgaacgtggtcagcgttatgcaagccgattgcagaatgaatttgctggaaatatttctgcgctggctgatgcggaaaatatttcacgtaagattattacccgctgtatcaacaccgccaaattgcctaaatcagttgttgctcttttttctcaccccggtgaactatctgcccggtcaggtgatgcacttcaaaaagcctttacagataaagaggaattacttaagcagcaggcatctaaccttcatgagcagaaaaaagctggggtgatatttgaagctgaagaagttatcactcttttaacttctgtgcttaaaacgtcatctgcatcaagaactagtttaagctcacgacatcagtttgctcctggagcgacagtattgtataagggcgataaaatggtgcttaacctggacaggtctcgtgttccaactgagtatcagacgcaagaatggtcgggttctgcaactttaccatctgacggaaaaatccgtttattctacactgactattcgggtaaacattacggcaaacaaagcctgacaacagcgcaggtaaatgtgtcaaaatctgatgacacactcaaaatcaacggagtggaagatcacaaaacgatttttgacggagacggaaaaacatatcagaacgttcagcagtttatcgatgaaggcaattatacatccggcgacaaccatacgctgagagaccctcactacgttgaagacaaaggccataaataccttgtattcgaagccaacacgggaacagaaaacggataccaaggcgaagaatctttatttaacaaagcgtactacggcggcggcacgaacttcttccgtaaagaaagccagaagcttcagcagagcgctaccccccgcgatgctgagttagcgaacggcgccataagaatttttaccgtgggaaatttcccggtgtggggggaaaaaaaatgtgtgcacaagtttgtcaaaatattttttgggcagatcaaagttgaggatgagctcaggcgctttggcgacctggccggttgcgcgcacactcagggcagcactgatatgccagccccctgctgcctcagccccctccagactttgggtgctgactag

SEQ ID NO: 21694 - DNA, 1012 bp, Homo sapiens
  SIMILAR (140)..(805): 981254mologous to Cloning vector pZC320 SopB,accession number U26464,Smith-Waterman Score=1078.
atccctgtacaagctgaacgcttaccggatgtgtaataagtattcattgaagagttgggtaattactctcttgaaatcctgggtatctcatcccaactactcccccatctgcgaggtacctgttaaattattttatgccaagacaccggcgttcggtcgaagagtatctggtgtcatagaaattgccgatgggagtcgccgtcgtaaagctgctgcacttaccgaaagtgattatcgtgttctggttggcgagctggatgatgagcagatggctgcattatccagattgggtaacgattatcgcccaacaagtgcttatgaacgtggtcagcgttatgcaagccgattgcagaatgaatttgctggaaatatttctgcgctggctgatgcggaaaatatttcacgtaagattattacccgctgtatcaacaccgccaaattgcctaaatcagttgttgctcttttttctcaccccggtgaactatctgcccggtcaggtgatgcacttcaaaaagcctttacagataaagaggaattacttaagcagcaggcatctaaccttcatgagcagaaaaaagctggggtgatatttgaagctcaacaagttatcactcttttaacttctgtgcttaaaacgtcatctgcatcaagaactagtttaagctcacgacatcagtttgctcctggagcgacagtattgtataagggcgataaaatggtgcttaccctggacaggtctcgtgttccaactgagtgtatagagaaaattgaggccattcttaaggaacttgaaaagccagcacccggcatcgccagtcaatatggcgtgctgctagcgctatatgcgttgatgcaatttctatgcgcacccgttctcggagcactgtccggccgctttggccgccgcccagtcctgctcgcttcgctacttggagccactatcgactacgcgatcatggcgaccacacccgtcctgtggatctacccactagtcaattcaccatcttgttga

SEQ ID NO: 21695 - DNA, 2179 bp, Homo sapiens
  SIMILAR (287)..(1378): 991254mologous to Plasmid F Protein A,accession number M12987,Smith-Waterman Score=1881.
atttttcccccggggaaatttcttttgccctgagggtaaaagctatctgacaaaacggtttttttttgtttcctccccaattccctccatatgtcggggtaccgggctcggggagggttaatgaaaataaagggcctaggggttgggtctttttatactcccgtgggagggggggccttaaatttaacacaaccttcgcgtttttttaatggccttggcgatttggttgttgctttccaagtaaatgcaaagatttaataaaaaaacgcaaagcaatgattaaaggatgttcagaatgaaactcatggaaacacttaaccagtgcataaacgctggtcatgaaatgacgaaggctatcgccattgcacagtttaatgatgacagcccggaagcgaggaaaataacccggcgctggagaataggtgaagcagcggatttagttggggtttcttctcaggctatcagagatgccgagaaagcagggcgactaccgcacccggatatggaaattcgaggacgggttgagcaaggtgttggttatacaattgaacaaattaatcatatgcgtgatgtgtttggtacgcgattgcgacgtgctgaagacgtatttccaccggtgatcggggttgctgcccataaaggtggcgtttacaaaacctcagtttctgttcatcttgctcaggatctggctctgaaggggctacgtgttttgctcgtggaaggtaacgacccccagggaacagcctcaatgtatcacggatgggtaccagatcttcatattcatgcagaagacactctcctgcctttctatcttggggaaaaggacgatgtcacttatgcaataaagcccacttgctggccggggcttgacattattccttcctgtctggctctgcaccgtattgaaactgagttaatgggcaaatttgatgaaggtaaactgcccaccgatccacacctgatgctccgactggccattgaaactgttgctcatgactatgatgtcatagttattgacagcgcgcctaacctgggtatcggcacgattaatgtcgtatgtgctgctgatgtgctgattgttcccacgcctgctgagttgtttgactacacctccgcactgcagtttttcgatatgcttcgtgatctgctcaagaacgttgatcttaaagggttcgagcctgatgtacgtattttgcttaccaaatacagcaatagtaatggctctcagtccccgtggatggaggagcaaattcgggatgcctggggaagcatggttctaaaaaatgttgtacgtgaaacggatgaagttggtaaaggtcagatccggatgagaactgtttttgaacaggccattgatcaacgctcttcaactgctgccccgatggtggattcgttaattgcgcgcgtaggagtaatggctcgcggtaatgccattactttgcctgtatgtggtcgggatgtgaagtttactcttgaagtgctccggggtgatagtgttgagaagacctctcggacaccggcgttcggtcgaagagtatctggtgtcatagacattgccgatgggagtcgccgtcgtaaagctgctgcacttaccgaaagtgattatcgtgttctggttggcgagctggatgatgagcacatgcctgcattatccccattgggtaacgattatcgcccaacaagtgcttatgaacgtggtcagcgttatgcaacccgattgcagaatgaatttgctggaaatatttctgcgctggctgatgcggaaaatatttcacgtaagattattacccgctgtatcaacaccgccaaattgcctaaatcagttgttgctcttttttctcaccccggtgaactatctgcccggtcaggtgatgcacttcaaaaagcctttacagataaagaggaattacttaagcagcaggcatctaaccttcatgagcagaaaaaagctggggtgatatttgaagctgaagaagttatcactcttttaacttctgtgcttaaaacgtcatctgcatcaatatatagtttaagctcgagacagcagtttgctcatggagcgccagtattgtataagggcgataaaatggtgcttaacctggacaggtctcgtgttccaactgagtgtatagagaaaattgaggccattcttaaggaacttgaaaagccagcaccctga

SEQ ID NO: 21696 - DNA, 1299 bp, Homo sapiens; identical to SEQ ID NO: 13361
  SIMILAR (646)..(1296): 971254mologous to Cloning vector pZC320 SopB,accession number U26464,Smith-Waterman Score=1040.

SEQ ID NO: 21697 - DNA, 1044 bp, Homo sapiens
  SIMILAR (193)..(876): 971254mologous to Cloning vector pZC320 SopB,accession number U26464,Smith-Waterman Score=1101.
atggacgatatcccgcaagaggcccggcagtaccggcataaccaagcctatgcctacagcatccagggtgacggtgccgaggatgacgatgagcgcattgttagatttcatacacgggtcaccgtcgacagcgacacacttgcatcggatgcagcccggttaacgtgccggcacggcctgggtaaccagagacccccttttctactgactggtcaacagacaccggcgttcggtcgaagagtatctggtgtcatagaaattgccgatgggagtcgccgtcgtaaagctgctgcacttaccgaaagtgattatcgtgttctggttggcgagctggatgatgagcagatggctgcattatccagattgggtaacgattatcgcccaacaagtgcttatgaacgtggtcagcgttatgcaagccgattgcagaatgaatttgctggaaatatttctgcgctggctgatgcggaaaatatttcacgtaagattattacccgctgtatcaacaccgccaaattgcctaaatcagttgttgctcttttttctcaccccggtgaactatctgcccggtcaggtgatgcacttcaaaaagcctttacagataaagaggaattacttaagcagcaggcatctaaccttcatgagcagaaaaaagctggggtgatatttgaagctgaagaagttatcactcttttaacttctgtgcttaaaacgtcatctgcatcaagaactagtttaagctcacgacatcagtttgctcctggagcgacagtattgtataagggcgataaaatggtgcttaacctggacaggtctcgtgttccaactgagtgtatagaagaaattgaggccattcttaagaacttgaaaagcccgcacctggacccccactaccaagacgtgattgactcgcgtgacgtgatcgcccgtattgaggagttgcaggggtaccgagctcgaattcgtaatcatggtcatagctgtttcctgtgtgaaattgttatccgctcacaattccacacaacatacgagccggaagcataa

SEQ ID NO: 21698 - DNA, 2061 bp, Homo sapiens
  SIMILAR (2061)..(1336): 981254mologous to unidentified cloning vector 29kD protein essential for the replication of mini F plasmid,accession number AB015619,Smith-Waterman Score=1245.
tcacggttccgaaccccaagcaccaccggttcgttcatccagcgccgaccgtgtcaacgccagcgagtacccaacatccagcgaggagacatcaggtcgctcgtccagataggtcatcaacgccgttgcctgcgcggatagcgcttcgggtgttttgcccgacaccatccacggcaccaccggaacatccacgacagaacccgaacccggccccgcagactgactcggcactcccgggggctgttcgaggatgacgtgcgcgttagtaccactgatcccgaacgacgacacccccacccgacgaacacgaccactcctgggccagggcgtgttctccgtaaggagttgaaccgtccccgccgaccaatccacctccggcgacggcgattccacgtgcaacgtgcgtggcagctgcccgtgccgcatcgccatcaccatcttgatcacaccagccacacccgccgccgcttgcgtatgaccgatgttcgacttgaccgaccccaaccacaacggccggccaggatcacgatcacggccgtaggtggcgatcagcgcctgcgcctcgatcggatcacctgtcagatatgcttcaagaacaagtatgtctttattaccattaattctttcatcaactagatcaggctcgaaccctttaagatcaacgttcttgagcagatcacgaagcatatcgaaaaactgcagtgcggaggtgtagtcaaacaactcagcaggcgtgggaacaatcagcacatcagcagcacatacgacattaatcgtgccgatacccaggttaggcgcgctgtcaataactatgacatcatagtcatgagcaacagtttcaatggccagtcggagcatcaggtgtggatcggtgggcagtttaccttcatcaaatttgcccattaactcagtttcaatacggtgcagagccagacaggaaggaataatgtcaagccccggccagcaagtgggctttattgcataagtgacatcgtccttttccccaagatagaaaggcaggagagtgtcttctgcatgaatatgaagatctgtacccatccgtgatacattgaggctgttcccttccacgagcaaaacacgtagccccttcagagccagatcctgagcaagatgaacagaaactgaggttttgtaaacgccacctttatgggcagcaaccccgatcaccggtggaaatacgtcttcagcacgtcgcaatcgcgtaccaaacacatcacgcatatgattaatttgttcaattgtataaccaacacgttgctcaacccgtcctcgaatttccatatccgggtgcggtagtcgccctgctttctcggcatctctgatagcgatatgagtcgtctggcggcctttctttttctcaatgtatgagaggcgcattggagttctgctgttgatctcattaacacagacctgcaggaagcggcggcggaagtcaggcatacgctggtaactttgaggcagctggtaacgctctatgatccagtcgattttcagagagacgatgcctgagccatccggcttacgatactgacacagggattcgtataaacgcatggcatacggattggtgatttcttttgtttcactaagccgaaactgcgtaaaccggttctgtaacccgataaagaagggaatgagatatgggttgatatgtacactgtaaagccctctggatggactgtgcgcacgtttgataaaccaaggaaaagattcatagcctttttcatcgccggcatcctcttcagggcgataaaaaaccacttccttccccgcgaaactcttcaatgcctgccgtatatccttactggcttccgcagaggtcaatccgaatatttcagcatatttagcaacatggatctcgcagataccgtcatgttcctgtagggtgccatcagattttctgatctggtcaacgaacagatacagcatacgtttttgatcccgggagagactatatgccgcctcagtgaggtcgtttgactggacgattcgcgggctatttttacgtttcttgtgattgataaccgctgtttccgccat

SEQ ID NO: 21699 - DNA, 2406 bp, Homo sapiens
  SIMILAR (817)..(1704): 981254mologous to Cloning vector pSacBII SacB,accession number U09128,Smith-Waterman Score=1550.
atgagactgggatttgaatcaaggggtgagatagcaaaagatcaagctaaacttgatctagcagggcaaaaagaaagggataaccaaagctcaacattgggggaagcagaaaccccattgattatttgctggtcgactctagaggatccccactatgatgtcatagttattgacagcgcgcctaacctgggtatcggcacgattaatgtcgtatgtgctgctgatgtgctgattgttcccacgcctgctgagttgtttgactacacctccgcactgcagtttttcgatatgcttcgtgatctgctcaagaacgttgatcttaaagggttcgagcctgatgtacgtattttgcttaccaaatacagcaatagtaatggctctcagtccccgtggatggaggagcaaattcgggatgcctggggaagcatggttctaaaaaatgttgtacgtgaaacggatgaagttggtaaaggtcagatccggatgagaactgtttttgaacaggccattgatcaacgctcttcaactgatacttcgttatcgacaccagctgccccgatggtggattcgttaattgcgcgcgtaggagtaatggctcgcggtaatgccattactttgcctgtatgtggtcgggatgtgaagtttactcttgaagtgctccggggtgatagtgttgagaagacctctcgggtatggtcaggtaatgaacgtgaccaggagctgcttactgaggacgcactggatgatctcatcccttcttttctactgactggtcaacagacaccggcgttcggtcgaagagtttccttgtaccctctggcaggaggagcgactcaagccttcgcgaaagaaaataaccaaaaagcatacaaagaaacgtacggcgtctctcatattacacgccatgatatgctgcagatccctaaacagcagcaaaacgaaaaataccaagtgcctcaattcgatcaatcaacgattaaaaatattgagtctgcaaaaggacttgatgtgtgggacagctggccgctgcaaaacgctgacggaacagtagctgaatacaacggctatcacgttgtgtttgctcttgcgggaagcccgaaagacgctgatgacacatcaatctacatgttttatcaaaaggtcggcgacaactcaatcgacagctggaaaaacgcgggccgtgtctttaaagacagcgataagttcgacgccaacgatccgatcctgaaagatcagacgcaagaatggtccggttctgcaacctttacatctgacggaaaaatccgtttattctacactgactattccggtaaacattacggcaaacaaagcctgacaacagcgcaggtaaatgtgtcaaaatctgatgacacactcaaaatcaacggagtggaagatcacaaaacgatttttgacggagacggaaaaacatatcagaacgttcagcagtttatcgatgaaggcaattatacatccggcgacaaccatacgctgagagaccctcactacgttgaagacaaaggccataaataccttgtattcgaagccaacacgggaacagaaaacggataccaaggcgaagaatctttatttaacaaagcgtactacggcggcggcacgaacttcttccgtaaagaaagccagaagcttcagcagagcgctaaaaaacgcgatgctgagttaggggtctatgctcttgctgtttcctctgtccggggtaccgagctagagctgggacttacaccggcgttcggtcgaagagtatctggtgtcatagaaattgccgatgggagtcgccgtcgtaaagctgctgcacttaccgaaagtgattatcgtgttctggttggcgagctggatgatgagcagatggctgcattatccagattgggtaacgattatcgcccaacaagtgcttatgaacgtggtcagcgttatgcaagccgattgcagaatgaatttgctggaaatatttctgcgctggctgatgcggaaaatatttcacgtaagattattacccgctgtatcaacaccgccaaattgcctaaatcagttgttgctcttttttctcaccccggtgaactatctgcccggtcaggtgatgcacttcaaaaagcctttacagataaagaggaattacttaagcagcaggcatctaaccttcatgagcagaaaaaagctggggtgatatttgaagctgaagaagttatcactcttttaacttctgtgcttaaaacgtcatctgcatcaagaactagtttaagctcacgacatcagtttgctcctggagcgacagtattgtataagggcgataaaatggtgcttaacctggacaggtctcgtgttccaactgagtgtatagagaaaattgaggccattcttaaggaacttgaaaagccagcaccctga

SEQ ID NO: 21700 - DNA, 3189 bp, Homo sapiens
  SIMILAR (2329)..(3183): 871254mologous to Cloning vector pZC320 SopB,accession number U26464,Smith-Waterman Score=1218.
  misc_feature (1)...(3189): n = a,t,c or g
atggagaaattgctactggaaaatgacagcttaagtaaggatgtaagccgcctagaaactgtgtttgtacctcctgagaaacatgaaaaagagataatagctctgaaatccaatattgttgaacttaagaaacagctgtctgaacttaagaaaaaatgtggtgaagaccaggagaaaatacacgctctcacatctgaaaacactaacttgaagaagatgatgagtaatcagtatgtgccagttaaaacccatgaagaggttaaaatgacactgaatgacacgttagccaaaactaacagagaattattagatgtgaagaaaaaatttgaagatataaatcaggaatttgtaaaaataaaagataagaatgaaatattaaaaagaaacctggaaaacactcagaaccaaataaaagctgagtacatcagcctggcagagcacgaggcaaagatgagctcgctaagtcagagcatgagaaaggtgcaggatagtaatgctgaaatcttggccaactacagaaaaggccaagaagagattgtgacactgcatgccgaaattaaagcacagaagaaggagctcgacacaatacaagaatgcattaagataatgaagcgtgcgcctgttattccaaaacatacgctcaatactcaaccggttgaagatacttcgttatcgacaccagctgccccgatggtggattcgttaattgcgcgcgtaggagtaatggctcgcggtaatgccattactttgcctgtatgtggtcgggatgtgaagtttactcttgaagtgctccggggtgatagtgttgagaagacctctcgggtatggtcaggtaatgaacgtgaccaggagctgcttactgaggacgcactggatgatctcatcccttcttttctactgactggtcaacagacaccggcgttcggtcgaagagtatctggtgtcatagaaattgccgatgggagtcgccgtcgtaaagctgctgcacttaccgaaagtgattatcgtgttctggttggcgagctggatgatgagcagatggctgcattatccagattgggtaacgattatcgcccaacaagtgcttatgaacgtggtcagcgttatgcaagccgattgcagaatgaatttgctggaaatatttctgcgctggctgatgcggaaaatatttcacgtaagattattacccgctgtatcaacaccgccaaattgcctaaatcagttgttgctcttttttctcaccccggtgaagctatctgcccggtcaggatgttcagaatgaaactcatggaaacacttaaccagtgcataaacgctggtcatgaaatgacgaaggctatcgccattgcacagtttaatgatgacagcccggaagcgaggaaaataacccggcgctggagaataggtgaagcagcggatttagttggggtttcttctcaggctatcagagatgccgagaaagcagggcgnctaccgcacccggatatggaaattcgaggacgggttgagcaacgtgttggttatacaattgaacaaattaatcatatgcgtgatgtgtttggtacgcgattgcgacgtgctgaagacgtatttacaccggtgatcggggttgctgccataaagactgggaccacggtccatatcgtatcgtcgtccagtttattaggcggggaccatggtccatctcgtatcggcggtctattattagtctgtgactacgggcctctcgtatcgtcgtctgggatcagcggtcctactcgtatcgtcggtctgattattagtctgggaccaggataccacttgtgttttcggtctgattatcggactgggatcacggatccactttatattggtgatgcgactattcgcgtgagtctacgagtatattctttgccgtcaaggtcaaggattgaacatgtcgtcgctaactgtggaatgatccctaaacagcagcaaaacgaaaaataccaagtgcctcaattcgatcaatcaacgattaaaaatattgagtctgcaaaaggacttgatgtgtgggacagctggccgctgcaaaacgctgacggaacagtagctgaatacaacggctatcacgttgtgtttgctcttgcgggaagcccgaaagacgctgatgacacatcaatctacatgttttatcaaaaggtcggcgacaactcaatcgacagctggaaaaacgcgggccgtgtctttaaagacagcgataagttcgacgccaacgatccgatcctgaaagatcagacgcaagaatggtccggttctgcaacctttacatctgacggaaaaatccgtttattctacactgactattccggagtaatggctcgcggtaatgccattactttgcctgtatgtggtcgggatgtgaagtatactcttgaagtgctccggggtgatagtgttgagaagacctctcgggtatggtcaggtaatgaacgtgaccaggagctgcttactgaggacgcactggatgatctcatcccttcttttctactgactggtcaacagacaccggcgttcggtcgaagagtatctggtgtcatagaaattgccgatgggagtcgccgtcgtaaagctgctgcacttaccgaaagtgattatcgtgttctggttggcgagctggatgatgagcagatggctgcattatccagattgggtaacgattatcgcccaacaagtgcttatgaacgtggtcagcgttatgcaagccgattgcagaatgaatttgctggaaatatttctgcgctggctgatgcggaaaatatttcacgtaagattattacccgctgtatcaacaccgccaaattgcctaaatcagttgttgctcttttttctcaccccggtgaactatctgcccggtcaggtgatgcacttcaaaaagcctttacagataaagaggaattacttatgcagcaggcatctaaccttcatgagcagaaaaaagctggggtgatatttgaagctgaagaagttatcactcttttaacttctgtggctaaaacgtcatctgcatccagaactagtttaagctcacgacatcagtttggctcctggagcgacagtatttgtataagggcgataaaatggtgcttaacctggacatgtctcgtggttcaactggagtgtttagatcgcttgcatgcctgcaggtcgactctagaggatcccccatag

SEQ ID NO: 21701 - DNA, 2408 bp, Homo sapiens
  SIMILAR (1713)..(2303): 991254mologous to Cloning vector pZC320 SopB,accession number U26464,Smith-Waterman Score=958.
atgcagggcatgcaagccctagctaggacagttgatggtaaggaagaaagcctcaaccttgatcaagcttttcaatgggctggaaaaagttcttcttttgggacctgtcccaataaatttcgatcgtcgattaaccccgctggagatagaatattaagcggggcctgttatccaaaactacgtcaatactcaaccggtggagaaacttcgtattcgacaccagctgccccgatggtggattcgttaattgcgcgcgtaggagtaatggctcccggtaatgccattactttgcctgtatgtggtcgggatgtgaagtttactcttgaagtgctccggggtgatagtgttaagaagacctctcgggtatggtcaggtaatgaacgtgaccaggagctgcttactgaggacgcactggatgatctcatcccttcttttctactgactggtcaacagacaccggcgttcggtcgaagagtatctggtgtcatagaaattgccgatgggagtcgccgtcgtaaagctgctgcacttaccgaaagtgattatcgtgttctggttggcgagctggatgatgagcagatggctgcattatccagattgggtaacgattatcgcccaacaagtgcttatgaacgtggtcagcgttatgcaagccgattgcagaatgaatttgctggaaatatttctgcgctggctgatgcggaaaatatttcacgtaagattattacccgctgtatcaacaccgccaaattgcctaaatcagttgttgctcttttttctcaccccggtgaactatctgcccggtcaggtgatgcacttcaaaaagcctttacagataaagaggaattacttaagcagcaggggggatcctctagagtcggcgacaactcaatcgacagctggaaaacgcggggccgtgttctttaaagccagccgataagtttgacgcccaacgatccggatctgaaaagatcagacgcaagaatggtccggtttctgcaacttttacatctgacggaaaaatcggtttattttacactgactatcccggtaaacattacggcaaacaaagcctgacaacagcgcaggtaaatgtgtcaaaatctgatgacacactcaaaatcaacggagtggaagatcacaaaacgatttttgacggagacggaaaaacatatcagaacgttcagcagtttatcgatgaaggcaattatacatccggcgacaaccatacgctgagagaccctcactacgttgaagacaaaggccataaataccttgtattcgaagccaacacgggaacagaaaacggataccaaggcgaagaatctttatttaacaaagcgtactacggcggcggcacgaacttcttccgtaaagaaagccagaagcttcagcagagcgctaaaaaacgcgatgctgagttagcgaacggcgccctcggtatcatagagttaaataatgattacacattgaaaaaagtaatgaagccgctgatcacttcaaacacggtaactgatgaaatcgagcgcgcgaatgttttcaaaatgaacggcaaatggttgttcaaatactgcatgctgctgctatttttcaaaattccttttgaatccatagatcccccttctgagttttcttgcagttcattgttaaaccaggttgcttgtgctgtacatcaatgcttcacacactttagcatagaaaagaaccccctgacaccggcgttcggtcgaagagtatctggtgtcatagaaattgccgatgggagtcgccgtcgtaaagctgctgcacttaccgaaagtgattatcgtgttctggttggcgagctggatgatgagcagatggctgcattatccagattgggtaacgattatcgcccaacaagtgcttatgaacgtggtcagcgttatgcaagccgattgcagaatgaatttgctggaaatatttctgcgctggctgatgcggaaaatatttcacgtaagattattacccgctgtatcaacaccgccaaattgcttaaatcagttgttgctcttttttctcaccccggtgaactatctgcccggtcaggtgatgcacttcaaaaagcctttacagataaagaggaattacttaagcagcaggcatctaaccttcatgagcagaaaaaagctggggtgatatttgaagctgaagaagttatcactcttttaacttctgtgcttaaaacgtcatctgcatcaagaactagtttaagctcacgacatcagtttgctcctggagcgacagtattgtataagggcgataaaatggtgcttaacctggacagttgctcatactatcctatgtatatcaccaatgtaacaacagctgtttttattgctgctgtcattgtgctggaaaagcgcaaacatgtttgtacagctttctaa

SEQ ID NO: 21702 - DNA, 3774 bp, Homo sapiens
  SIMILAR (322)..(810): 1001254mologous to Cloning vector pZC320 SopA,accession number U26464,Smith-Waterman Score=862.
atgaaactcatggaaacacttaaccagtgcataaacgctggtcatgaaatgacgaaggctatcgccattgcacagtttaatgatgacagcccggaagcgaggaaaataacccggcgctggagaataggtgaagcagcggatttagttggggtttcttctcaggctatcagagatgccgagaaagcagggcgactaccgcacccggatatggaaattcgaggacgggttgagcaacgtgttggttatacaattgaacaaattaatcatatgcgtgatgtgtttggtacgcgattgcgacgtgctgaagacgtatttccaccggatctggctctgaaggggctacgtgttttgctcgtggaaggtaacgacccccagggaacagcctcaatgtatcacggatgggtaccagatcttcatattcatgcagaagacactctcctgcctttctatcttggggaaaaggacgatgtcacttatgcaataaagcccacttgctggccggggcttgacattattccttcctgtctggctctgcaccgtattgaaactgagttaatgggcaaatttgatgaaggtaaactgcccaccgatccacacctgatgctccgactggccattgaaactgttgctcatgactatgatgtcatagttattgacagcgcgcctaacctgggtatcggcacgattaatgtcgtatgtgctgctgatgtgctgattgttcccacgcctgctgagttgtttgactacacctccgcactgcagtttttcgatatgcttcgtgatctgctcaagaacgttgatcttaaagggcaattatacatccggcgacaaccatacgctgagagaccctcactacgttgaagacaaaggccataaataccttgtattcgaagccaacacgggaacagaaaacggataccaaggcgaagaatctttatttaacaaagcgtactacggcggcggcacgaacttcttccgtaaagaaagccagaagcttcagcagagcgctaaaaaacgcgatgctgagttagcgaacggcgccctcggtatcatagagttaaataatgattacacattgaaaaaagtaatgaagccgctgatcacttcaaacacggtaactgatgaaatcgagcgcgcgaatgttttcaaaatgaacggcaaatggtacttgttcactgattcacgcggttcaaaaatgacgatcgatggtattaactcaaacgatatttacatgcttggttatgtatcaaactctttaaccggcccttacaagccgctgaacaaaacagggcttgtgctgcaaatgggtcttgatcccaaacgatgtgacattcacttactctccacttcgcagtgcctcaagccaaagggatcttatgtgaagaagataattatacggccggcgacaaccatatgatgagagcccctcactgcgaagaagacagagcccataaattcgttgtattcgacgccaacgcgggaacagaaagcggacaccaaggagaatcttctttatttaacagagcgtgcggcggcggcggcacgttcttcttcagtaaagaaagccagaagcttcagcagagcgctaaaaaacgcgattgcataaacgctggtcatgaaatgacgaaggctatcgccattgcacagtttaatgatgacagcccggaagcgaggaaaataacccggcgctggagaataggtgaagcagcggatttagttggggtttcttctcaggctatcagagatgccgagaaagcagggcgactaccgcacccggatatggaaattcgaggacgggttgagcaacgtgttggttatacaattgaacaaattaatcatatgcgtgatgtgtttggtacgcgattgaaacgtgctgaagacgtatttccaccggtgatcggggttgctgcccataaaggtggcgtttacaaaacctcagtttctgttcatcttgctcaggatctggctctgaaggggtccctgctccttcctaagaatgactttctcttcaaactaggccttgagggtcatttacctttgggaaaaatccactccccacctacaggggctgatgttgccagaggatccagtggccttcccaagtctgagctatttcttccagagagaaatacccaggagcttcagcaagacagtgaagaggggcctctggcccttcaagtcctgcaaagcaatctcatggattttgccgatttcggaaccaccatcaaacaggattttcgcctgctggggcaaaccagcgtggaccgcttgctgcaactctctcagggccaggcggtgaagggcaatcagctgttgcccgtctcactggtgaaaagaaaaaccaccctggcgcccaatacgcaaaccgcctctccccgcgcgttggccgattcattaatgcagctggcacgacaggtttcccgactggaaagcgggcagaacaatgacggtatctgcgagatccatgttgctaaatatgttgaaatattcggattgacctctgcggaagccagtaaggatatacggcaggcattgaagagtttcgcggggaagttagtggttttttatcgccctgaagaggatgccggcgatgaaaaaggctatgaatcttttccttggtttatcaaacgtgcgcacagtccatccagagggctttacagtgtacatatcaacccatatctcattcccttctttatcgggttacagaaccggtttacgcagtttcggcttagtgaaacaaaagaaatcaccaatccgtatgccatgcgtttatacgaatccctgtgtcagtatcgtaagccggatggctcaggcatcgtctctctgaaaatcgactggatcatagagcgttaccagctgcctcaaagttaccagcgtatgcctgacttccgccgccgcttcctgcaggtctgtgttaatgagatcaacagcagaactccaatgcgcctctcatacattgagaaaaagaaaggccgccagacgactcatatctcccggaagtttactctgaagtggtccgggggtgatagtgttgagaagacttctcgggtatggtcaggtaatgaacgtgcccaggagctgcttactgaggacgcactgaatgatctcatcccttcttttctactgactggtcaacagacaccggcgttcggtcgaagagtatctggtgtcatagaaattgccgatgggagtcgccgtcgtaaagctgctgcacttaccgaaagtgattatcgtgttctggttggcgagctggatgatgagcagatggctgcattatccagattgggtaacgattatcgcccaacaagtgcttatgaacgtggtcagcgttatgcaagccgattgcagaatgaatttgctggacatatttctgcgctggctgatgcggaaaatatttcacgtaagattattacccgctgtatcaacaccgccaaattgcctaaatcagttgttgctcttttttctcaccccggtgaactatctgcccggtcaggtgatgcacttcaaaaagcctttacagataaagaggaattacttaagcagcaggcatctaaccttcatgagcagaaaaaagctggggtgatatttcaagctgaagaagttatcactcttttaacttctgtgcttaaaacgtcatctgcatcaagaactagtttaagctcacgacatcagtttgctcctggagcgacagtattgtataagggcgataaaatggtgcttaacctggacagttctcgtgtccaactgagttatagagaaaatgaggccaaataa

SEQ ID NO: 21703 - DNA, 1855 bp, Homo sapiens
  SIMILAR (1427)..(1726): 601254mologous to Cloning vector pZC320 SopB,accession number U26464,Smith-Waterman Score=235.
atgaaactcatggaaacacttaaccagtgcataaacgctggtcatgaaatgacgaaggctatcgccattgcacagtttaatgatgacagcccggaagcgaggaaaataacccggcgctggagaataggtgaagcagcggatttagttggggtttcttctcaggctatcagagatgccgagaaagcagggcgactaccgcacccggatatggaaattcgaggacgggttgagcaacgtgttggttatacaattgaacaaattaatcatatgcgtgatgtgtttggtacgcgattgcgacgtgctgaagacgtatttccaccggtgatcggggttgctgcccataaaggtggcgtttacaaaacctcagtttctgttcatcttgctcaggatctggctctgaaggggctacgtgttttgctcgtggaagccttgcaccagggattttctaaatctttctttctccccgcctatggcaggaccaccctggacgttctacagtccacagagttcagcccatcagggagtgagactggaagcccatgtgagaagtggggcctggtgccggggtctggagaaggggcttacacaggtccctgggcagccggggtctgggctgtgggcaggggtctgggtctaccagctgtgctctgcctgcagcccctctgtcgctcagaaatcccagacatacaaccagccaagctggaattgcgtgaatatgttcgccgaagcactggacatcatagcgatgctttacctgaattactgcccgccaaatacagtaatggctacgaattaaaagaagctctgcactatattcacgaaccaccgattgatgccaatatggtacaactcaatcaaggctcacatcctgcacagcagcgattgatttttgaagaactggtcgcgcatcaaatcagcttacttacacgtcgtgcttatattcgacaaatagcagcacctcgctttagcagcagcaaagttttagcaaagcgccttttagatgccctgcctttccagatgaccaacgcacaaaaaagggtttctaaagaaattctacggacaccggcgttcggtcgaagagtatctggtgtcatagaaattgccgatgggagtcgccgtcgtaaagctgcggcgcttaccgaaagtgattatcgtgttctggttggcgagctggatgatgagcagatggctgcattatccagattgggtaacgattatcgcccaacaagtgcttatgaacgtggtcagcgttatgcaagccgattgcagaatgaatttgctggaaatatttctgcgctggctgatgcggaaaatatttcacgtaagattattacccgctgtatcaacaccgccaaattgcctaaatcagttgttgctcttttttctcaccccggtgaactatctgcccggtcaggtgatgcacttcaaaaagcctttacagataaagaggaattacttaagcagggggccttttacccttattgaccggataaaagctggggtgatatttgaggctgacgaaagtatcactcttttaacttctgtgcttaaaacgtcatctgcatcaagaactagtttaagctcacgacatcagtttgctcctggagcgacagtattgtattatcgtcgataaaatggtgcttcaacctggacaggtctcgtgttcctaactgagtgtatagagaaaattgaggccattcttaagggaactgaaaaccagccccctgtgcgacacctcattgctgtcctcacagccaagcccaacccagcttttcaacaagactcagcgtcatttatgagcatctctaggctcatccgtaaccactttccagctcccgtggctatacccatgtga

SEQ ID NO: 21704 - DNA, 3542 bp, Homo sapiens
  SIMILAR (556)..(1299): 1001254mologous to Cloning vector pZC320 SopB,accession number U26464,Smith-Waterman Score=1237.
  misc_feature (1)...(3542): n = a,t,c or g
accgttcagctggatattacggcctttttaaagaccgtaaagaaaaataagcacaagttttatccggcctttattcacattcttgcccgcctgatgaatgctcatccggaattccgtatggcaatgaaagacggtgagctggtgatatgggatagtgttcacccttgttacaccgttttccatgagcaaactgaaacgttttcatcgctctggagtgaataccacgacgatttccggcagtttctacacatatattcgcaagatgtggcgtgttacggtgaaaacctggcctatttccctaaagggtttattgagaatatgtttttcgtctcagccaatccctgggtgagtttcaccagttttgatttaaacgtggccaatatggacaacttcttcgcccccgttttcaccatgggcaaatattatacgcaaggcgacaaggtgctgatgccgctggcgattcaggttcatcatgccgtttgtgatggcttccatgtcggcagaatgcttaatgaattacaacagtactgcgatgagtggcagggcggggggtnaaaacatacgctcaatactcaaccggttgaagatacttcgttatcgacaccagctgccccgatggtggattcgttaattgcgcgcgtaggagtaatggctcgcggtaatgccattactttgcctgtatgtggtcgggatgtgaagtttactcttgaagtgctccggggtgatagtgttgagaagacctctcgggtatggtcaggtaatgaacgtgaccaggagctgcttactgaggacgcactggatgatctcatcccttcttttctactgactggtcaacagacaccggcgttcggtcgaagagtatctggtgtcatagaaattgccgatgggagtcgccgtcgtaaagctgctgcacttaccgaaagtgattatcgtgttctggttggcgagctggatgatgagcagatggctgcattatccagattgggtaacgattatcgcccaacaagtgcttatgaacgtggtcagcgttatgcaagccgattgcagaatgaatttgctggaaatatttctgcgctggctgatgcggaaaatatttcacgtaagattattacccgctgtatcaacaccgccaaattgcctaaatcagttgttgctcttttttctcaccccggtgaactatctgcccggtcaggtgatgcacttcaaaaagcctttacagataaagaggaattacttaagcagcaggcatctaaccttcatgagcagaaaaaagctggggtgatatttgaagctgaagaaggtccccggtcaggtgatgcacttcaaaaagcctttacagataaagaggaattatttaagcagcaggcatctaaccttcatgagcagaaaaaagctggggtgatatttgaagctgaagaagttatcactcttttaacttctgtgcttaaaacgtcatctgcatcaagaactagtttaagctcacgacatcagtttgctcctggagcgacagtattgtataagggcgataaaatggtgcttaccctggacagctctcgtgtcccaactgagtgtatagagaaaattgaggccattcttaaggaacttgaaaagccagcaccctgatgcgtccacgttttagtctacgtttatctgtctttacttaatgtcctttgttacaggccagaaagcataactggcctgaatattctctctgggcccactgtcccacttgtatcgtcggtctgataatcagactgggaccacggtcccactcgtatcgtcggtctgattattagtcgtggaccacggtcccactcgtatcgtcggtctgattattagtctgggccaacggtcccactcgtatcgtcggtctgataatcggtaccgggaccaacggtccccctcgtatcgtcggtctgattattagtactgggaccatgggcccactcgtatcgtcggtctgattattagtcgtggcgcacggtcccactcgtatcgacggtcttgattattagtctgtccaggttaagcaccattttatcgcccttatacaatactgtcgctccaggagcaaactgatgtcgtgagcttaaactagttcttgatgcagatgacgttttaagcacagaagttaaaagagtgataacttcttcagcttcaaatatcaccccagcttttttctgctcatgaaggttagatgcctgctgcttaagtaattcctctttatctgtaaaggctttttgaagtgcatcacctgaccgggcagatagttcaccggggtgagaaaaaagagcaacaactgatttaggcaatttggcggtgttgatacagcgggtaataatcttacgtgaaatattttccgcatcagccagcgcagaaatatttccagcaaattcattctgcaataggcttgcataacgctgaccacgttcataagcacttgttgggcgataatcgttacccaatctggataatgcagccatctgctcatcacccagctcgccaaccagaacacgatatcgctttcggtaagtgcagcagctcagtttctgttcatcttgctcaggatctggctctgaaggggctacgtgttttgctcgtggaaggtaacgacccccagggaacagcctcaatgtatcacggatgggtaccagatcttcatattcatgcagaagacactctcctgcctttctatcgatccacacctgatgctccgactggccattgaaactgttgctcatgactatgatgtcatagttattgacagcgcgcctaacctgggtatcggcacgattaatgtcgtatgtgctgctgatgtgctgattgttcccacgcctgctgagttgtttgactacacctccgcactgcagtttttcgatatgcttcgtgatctgctcaagaacgttgatcttaaagggttcgagcctgatgtacgtattttggtagtgagggtctctcagcgtatggttgtcgccggatgtataattgccttcatcgataaactgctgaacgttctgatatgttttccgttctccgtcaaaaatcgttttgtgatcttccactccgttgattttgagtgtgtcatcagattttgacacatttacctgcgctgttgtcaggctttgtttgccgtaatgtttaccggaatagtcagtgtagaataaacggatttttccgtcagatgtaaaggttgcagaaccggaccattcttgcgtctgatctttcaggatcggatcgttggcgtcgaacttatcgctgtctttaaagacacggcccgcgtttttccagctgtcgattgagttgtcgccgaccttttgataaaacatgtagattgatgtgtcatcagcgtctttcgggcttcccgcaagagcaaacacaacgtgatagccgttgtattcagctactgttccgtcagcgttttgcagcggccagctgtcccacacatcaagtccttttgcagactcaatatttttaatcgttgattgatcgaattgaggcacttggtatttttcgttttgctgctgtttagggatctgcagcat

SEQ ID NO: 21705 - DNA, 2619 bp, Homo sapiens
  SIMILAR (1899)..(1970): 441254mologous to Cloning vector pZC320 SopA,accession number U26464,Smith-Waterman Score=42.
atgaagcgtgcgcctgttattcaaaaacatacgctcaatactcaaccggttgaagatacttcgttatcgacaccagctgccccgatggtggattcgttaattgcgcgcgtaggagtaatggctcgcggtaatgccattactttgcctgtatgtggtcgggatgtgaagtttactcttgaagtgctccggggtgatagtgttgagaagacctctcgggtatggtcaggtaatgaacgtgaccaggagctgcttactgaggacgcactggatgatctcatcccttcttttctactgactggtcaacagacaccggcgttcggtcgaagagtatctggtgtcatagaaattgccgatgggagtcgccgtcgtaaagctgctgcacttaccgaaagtgattatcgtgttctggttggcgagctggatgatgagcagatggctgcattatccagattgggtaacgattatcgcccaacaagtgcttatgaacgtggtcagcgttatgcaagccgattgcagaatgaatttgctggaaatatttctgcgctggctgatgcggaaaatatttcacgtaagattattacccgctgtatcaacaccgccaaattgcctaaatcagttgttgctcttttttctcacccccgtcaggcaccgtgtatgaaatctaacaatgcgctcatcgtcatcctcggcaccgtcaccctggatgctgtaggcataggcttggttatgccggatctggctctgaaggggctacgtgttttgctcgtggaaggtaacgacccccagggaacagcctcaatgtatcacggatgggtaccagatcttcatattcatgcagaagacactctcctgcctttctatcttggggaaaaggacgatgtcacttatgcaataaagcccacttgctggccggggcttgacattattccttcctgtctggctctgcaccgtattgaaactgagttaatgggcaaatttgatgaaggtaaactgcccaccgatccacacctgatgctccgactggccattgaaactgttgctcatgactatgatgtcatagttattgacagcgcgcctaacctgggtatcggcacgattaatgtcgtatgtgctgctcacgccctgattgttcccacgcctgctgagttgtttgactacacctccgcactgcagtttttcgatatgcttcgtgatctgctcaagaacgttgatcttaaagggttcgagcctgatgtacgtattttgcttaccaaatacagcaatagtaatggctctcagtccccgtggatggaggagcaaattcgggacgcctgccgaagcatggttgtaaaaaatgttgaacgtgaaacggataaagttggtaaagacaccttaaaaggcttttacagtttaaaagagcggcctttggggaatcactttttaggacccaacaacagaccttttggcaaaataatgaagcacaagacaccggcgttcggtcgaagagtatctggtgtcatagaaattgccgatgggagtcgccgtcgtaaagctgctgcacttaccgaaagtgattatcgtgttctggttggcgagctggatgatgagcagatggctgcattatccagattgggtaacgattatcgcccaacaagtgcttatgaacgtggtcagcgttatgcaagccgattgcagaatgaatttgctggaaatatttctgcgctggctgatgcggaaaatatttcacgtaagattattacccgctgtatcaacaccgccaaattgcctaaatcagttgttgctcttttttctcaccccggtgaactatctgcccggtcaggtgatgcacttcaaaaagcctttacagataaagaggaattacttaagcagcaggcatctaaccttcatgagcagaaaaaagctgggggattttgccgatttcggaaccaccatcaaacaggattttcgcctgctggggcaaaccagcgtggaccgcttgctgcaactctctcagggccaggcggtgaagggcaatcagctgttgcccgtctcactggtgaaaagaaaaaccaccctggcgcccaatacgcaaaccgcctctccccgcgcgttggccgattcattaatgcagctggcacgacaggaaacagctatgaccatgattacgaattcgagctcggtaccctcccgcaagaggcccggcagtaccggcataaccaagcctatgcctacagcatccagggtgacggtgccgaggatgacgatgagcgcattgttagatttcatacacgggtcaccgtcgacagcgacacacttgcatcggatgcagcccggttaacgtgccggcacggcctgggtaaccaggtattttgtccacataaccgtgcgcaaaatgttgtggataagcaggacacagcagcaatccacagcaggcatacaaccgcacaccgaggttactccggtctacagtgtctttcagatgcagggatggtgctcaggataggccaagcctgtgtgaaaaccctgcagacagccattctcagggcagttgggctgccctgcactgccaaggtggtcttcccggggccttatgtccacaactgtatgggctccagggctcgcctagtttcatctggttga

SEQ ID NO: 21706 - DNA, 3311 bp, Homo sapiens
  SIMILAR (844)..(1557): 1001254mologous to unidentified cloning vector 29kD protein essential for the replication of mini F plasmid,accession number AB015619,Smith-Waterman Score=1244.
atggatgccaagatgcattcaggtggaacagctccccccgggacattgagtcagcgtcagccaagtagtaattccaaaaccaacggctcaaaactcaacccgttgaaagatactttgttatcgacaccaagctgccccgaaggggaattggttaatgcggcgcgtaggagtaatggttccggtaatgccattactttgcctgtatggggtcgggatgtaaagtttactcttgaagtgctccggggtgatagtgttgagaagacctctcgggtatggtcaggtaatgaacgtgaccaggagctgcttactgaggacgcactggatgatctcatcccttcttttctactgactggtcaacagacaccggcgttcggtcgaagagtatctggtgtcatagaaattgccgatgggagtcgccgtcgtaaagctgctgcacttaccgaaagtgattatcgtgttctggttggcgagctggatgatgagcagatggctgcattatccagattgggtaacgattatcgcccaacaagtgcttatgaacgtggtcagcgttatgcaagccgattgcagaatgaatttgctggaaatatttctgcgctggctgatgcggaaaatatttcacgtaagattattacccgctgtatcaacaccgccaaattgcctaaatcagttgttgctcttttttctcaccccggtgaactatctgcccggtcaggtgatgcacttcaaaaagcctttacagataaagaggaattacttaagcagcaggcatctaaccttcatgagcagaaaaaagctgggtgtgacaatctaaaaacttgtcacacttcacatggatctgtcatggcggaaacagcggttatcaatcacaagaaacgtaaaaatagcccgcgaatcgtccagtcaaacgacctcactgaggcggcatatagtctctcccgggatcaaaaacgtatgctgtatctgttcgttgaccagatcagaaaatctgatggcaccctacaggaacatgacggtatctgcgagatccatgttgctaaatatgctgaaatattcggattgacctctgcggaagccagtaaggatatacggcaggcattgaagagtttcgcggggaaggaagtggttttttatcgccctgaagaggatgccggcgatgaaaaaggctatgaatcttttccttggtttatcaaacgtgcgcacagtccatccagagggctttacagtgtacatatcaacccatatctcattcccttctttatcgggttacagaaccggtttacgcagtttcggcttagtgaaacaaaagaaatcaccaatccgtatgccatgcgtttatacgaatccctgtgtcagtatcgtaagccggatggctcaggcatcgtctctctgaaaatcgactggatcatagagcgttaccagctgcctcaaagttaccagcgtatgcctgacttccgccgccgcttcctgcaggtctgtgttaatgagatcaacagcagaactccaatgcgcctctcatacattgagaaaaagaaaggccgccagacgactcatatctttaatgatgacagcccggaaagcgaggaaaataacccggcgctggagaataggtgaagcagcggatttagttggggtttcttctcaggctatcagagatgccgagaaagcagggcgactaccgcacccggatatggaaattcgaggacgggttgagcaacgtgttggttatacaattgaacaaattaatcatatgcgtgatgtgtttggtacgcgattgcgacgtgctgaagacgtatttccaccggtgatcggggttgctgcccataaaggtaacgacccccagggaacagcctcaatgtatcacggatgggtaccagatcttcatattcatgcagaagacactctcctgcctttctatcttggggaaaaggacgatgtcacttatgcaataaagcccacttgctggccggggcttgacattattccttcctgtctggctctgcaccgtattgaaactgagttaatgggcaaatttgatgaagcgcagcctaacctgggtatcggcacgattaatgtcgtatgtgctgctgatgtgctgattgttcccacgcctgctgagttgtttgactacacctccgcactgcagtttttcgatatgcttcgtgatctgctcaagaacgttgatcttaaagggttcgagcctgatgtacgtattttgcttaccaaatacagcaatagtaatggctctcagtccccgtggatggaggagcaaattcgggatgcctggggaagcatggttctaaaaaatgttgtacgtgaaacggatgaagttggtaaaggtcagatccggatgagaactgtttttgaacaggccattgatcaacgctcttcaactgatacttcgttatcgacaccagctgccccgatggtggattcgttaattgcgcgcgtaggagtaatggctcgcggtaatgccattactttgcctgtatgtggtcgggatgtgaagtttactcttgaagtgctccggggtgatagtgttgagaagacctctcgggtatggtcaggtaatgaacgtgaccaggagctgcttactgaggacgcactggatgatctcatcccttcttttctactgactggtcaacagacaccggcgttcggtcgaagagtatctggtgtcatagaaattgccgatgggagtcgccgtcgtaaagctgctgcacttcccgaaaagtaattatggtgttctggttgccgagctggatgatgagcagatgcctgcatatcccagattgggtaacgattatcgcccaacaagtgcttatgaacgtggtcagcgttatgcaaccagattgcagaatgaatttgctgggaaatatttcttgcgctggctgatgcggaaaatatttcacattattacccgctgtatcaacaccgccaaattgcctaaatcagttgttgctcttttttctcaccccggtgaactatctgcccggtcaggtgatgcacttcaaaaagcctttacagataaagaggaattacttaagcagcaggcatctaaccttcatgagcagaaaaaagctggggtgatatttgaagctgaagaagttatcactcttttaacttctgtgcttaaaacgtcatctgcatcaagaactagtttaagctcacgacatcagtttgctcctggagcgacagtattgtataagggcgataaaatggtgcttaacctggacaggtctcgtgttccaactgagtgtatagagaaaattgaggccattcttaaggaacttgaaaagccagcaccctga

SEQ ID NO: 21707 - DNA, 2372 bp, Homo sapiens
  SIMILAR (972)..(1100): 371254mologous to Cloning vector pZC320 SopA,accession number U26464,Smith-Waterman Score=63.
atgaaactcatggaaacacttaaccagtgcataaacgctggtcatgaaatgacgaaggctatcgccattgcacagtttaatgatgacagcccggaagcgaggaaaataacccggcgctggagaataggtgaagcagcggatttagttggggtttcttctcaggctatcagagatgccgagaaagcagggcgactaccgcacccggatatggaaattcgaggacgggttgagcaacgtgttggttatacaattgaacaaattaatcatatgcgtgatgtgtttggtacgcgattgcgacgtgctgaagacgtatttccaccggtgatcggggttgctgcccataaaggtggcgtttacaaaacctcagtttctgttcatcttgctcaggatctggctctgaaggggctacgtgttttgctcgtggaaggtaacgacccccagggaacagcctcaatgtatcacggatgggtaccagatcttcatattcatgcagaagacactctcctgcctttctatcttggggaaaaggacgatgtcacttatgcaataaagcccacttgctggccggggcttgacattattccttcctgtctggctctgcaccgtattgaaactgagttaatgggcaaatttgatgaaggtaaactgcccaccgatccacacctgatgctccgactggccattgaaactgttgctcatgactatgatgtcatagttattggacagcgcgcctaacctgggtatcggcacgattaatgtcgtatgtgctgctgatgtgctgattgttcccacgcctgctgagttgtttgactacacctccgcactgcagtttttcgatatgcttcgtgatctgctcaagaacgttgatcttaaagggttcgagcctgatgtacgtattttgcttaccaaatacagcaatagtaatggctctcagtccccgtggatggaggagcaaattcgggatgcctggggaagcatggttaataaaaaatgttgtacgtgaaacgaatgaagttggtaaagctgccccgatggtggattcgttaattgcgcgcgtaggagtaatggctcgcggtaatgccattactttgcctgtatgtggtcgggatgtgaagtttactcttgaagtgctccggggtgatagtgttgagaagacctctcgggtatggtcaggtaatgaacgtgaccaggagctgcttactgaggacgcactggatgatctcatcccttcttttctactgactggtcaacagacaccggcgttcggtcgaagagtatctggtgtcatagaaattgccgatgggagtcgccgtcgtaaagctgctgcacttaccgaaagtgattatcgtgttctggttggcgagctggatgatgagcagatggctgcattatccagattgggtaacgattatcgcccaacaagtgcttatgaacgtggtcagcgttatgcaagccgattgcagaatgaatttgctggaaatatttctgcgctggctgatgcggaaaatatttcacgtaagattattacccgctgtatcaacaccgccaaattgcctaaatcagttgttgctcttttttctcaccccggtgaactatctgcccggtcaggtgatgcacttcaaaaagcctttacagataaagaggaattacttaagcagcaggcatctaaccttcatgagcagaaaaaagctggggtgatatttgaagctgaagaagttatcactcttttaacttctgtgcttaaaacgtcatctgcatcaagaactagtttaagctcacgacatcagtttgctcctggagcgacagtattgtataagggcgataaaatggtgcttaacctggacaggccaaaagtagataaaaccacaaagatggggaaaaaacagagaagaaaaactggaaactctaaaaagcagagcgcctctcctcctccaaatgaatgcagctcctcaccagcaacggaacaaagctggatggagaatgactttgacgagctgagagaagaaggcttcagacgatcaaattactccgagctatgggaggacattcaaaacaaaggcaaacaagttgaaaactttggaaaaaatttagaagaatgtataactagaataaccaatacagagaagtgcttaaaggagctgttggagctgaaaaccaaggctcgagaactacatgaagaatgcagaagcctcaggagccgatgtgatcaactgatagaaagggtatcagtgatggaagacccactgaatgaaatgaagcaagacgggaagtttagagaaaaaagaataaaaagaaatgagcaaagcctccaagaaatatgggactatgtgaaaagaccaaatctacgtctgattggtgtacctgaaagctga

SEQ ID NO: 21708 - DNA, 7060 bp, Homo sapiens
  SIMILAR (1)..(285): 1001254mologous to Cloning vector pZC320 SopA,accession number U26464,Smith-Waterman Score=490.
atgaaactcatggaaacacttaaccagtgcataaacgctggtcatgaaatgacgaaggctatcgccattgcacagtttaatgatgacagcccggaagcgaggaaaataacccggcgctggagaataggtgaagcagcggatttagttggggtttcttctcaggctatcagagatgccgagaaagcagggcgactaccgcacccggatatggaaattcgaggacgggttgagcaacgtgttggttatacaattgaacaaattaatcatatgcgtgatgtgtttggtggcgtttacaaaacctcagtttctgttcatcttgctcaggatctggctctgaaggggctacgtgtttgtgctcgtggaaggtaacgacccctcagggaacagcctcaatgtatcacggatgggtaccagatcttcatattcatgcagaagacactctcctgcctttctatcttggggaaaaggacgatgtcacttatgcaataaagcccacttgctggccggggcttgacattattccttcctgtctggctctgcaccgtattgaaactgagttaatgggcaaatttgatgaaggtaaactgcccaccgatccacacctgatgctccgactggccattgaaactgttgctcatgactatgatgtcatagttattgacagcgcgcctaacctgggtatcggcacgattaatgtcgtatgtgctgctgatgtgctgattgttcccacgcctgctgagttgtttgactacacctccgcactgcagtttttcgatatgcttcgtgatctgctcaagaacgttgatcttaaagggttcgagcctgatgtacgtattttgcttaccaaatacagcaatagtaatggctctcagtccccgtggattgaggagcaaatatcggatgcctggggaagcatggttctaaaaaatgttcacgccatagtgactggcgatgctgtcggaatggacgatatcccgcaagaggcccggcagtaccggcataaccaagcctatgcctacagcatccagggtgacggtgccgaggatgacgatgagcgcattgttagatttcatacacgggtcaccgtcgacagcgacacacttgcatcggatgcagcccggttaacgtgccggcacggcctgggtaaccagcggaatggtggtgtcctgattgaagacaaattcgagtgcttcttctccctcactgcggtctttgctacaagagcctactatgctgtctatcatttgacgggtgccagacactcagacatcgtggtcgcacacgggtacgctggttgcaatgtcaggtttgttgcacttctgggcacaaataccaccttggagacctacttatctaatcaaggttctaatggcttttcttgtctgcattttggagaggatgtgggacaggagaggatccccatctgcgagatccatgttgctaaatatgctgaaatattcggattgacctctgcggaagccagtaaggatatacggcaggcattgaagagtttcgcggggaaggaagtggttttttatcgccctgaagaggatgccggcgatgaaaaaggctatgaatcttttccttggtttatcaaacgtgcgcacagtccatccagagggctttacagtgtacatatcaacccatatctcattcccttctttatcgggttacagaaccggtttacgcagtttcggcttagtgaaacaaaagaaatcaccaatccgtatgccatgcgtttatacgaatccctgtgtcagtatcgtaagccggatggctcaggcatcgtctctctgaaaatcgactggatcatagagcgttaccagctgcctcaaagttaccagcgtatgcctgacttccgccgccgcttcctgcaggtctgtgttaatgagatcaacagcagaactccaatgcgcctctcatacattgagaaaaagaaaggccgccagacgactcatatcgtattttccttccgcgatatcacttccatgacgacaggatagtctgagggttatctgtcacagatttgagggcggttcgtcacatttgttctgacctactgagggtaatttgtcacagttttgctgtttccttcagcctgcatggattttctcatactttttgaactgtactttttaaggaagccaaatttgagggcagtttgccacagtggatttccttctctttcccttcgtcatgtgacctgatatcgggggttagttcgtcatcattgatgagggttgattatcacagtttattactctgaattggctatccgcgtgtgtacctctacctggagtttttcccacggaggatatttcttcttgcgctgagcgtaagagctatctgacagaacagttcttctttgcttcctcggccaggtcgcctcgttaagctcggttacacggcctgcggggaggcgctagtaataatgagcgcctgaggtagggccttcttcctatctccctttggtagtgttgctcttattttaaacaactttgcgggttttttgaggaccttgcggattttgttgttgctttgcagtaaattgcaagatttaataaaaaaaccgcaaagcaaatgattaaaaggatggtctagaatgacactcatggtagacacttaaccagtgccataaacgctggtcatggaatgacgaaggctatcgccatttgcacaagtttaatgatgacagccccggaagcgaggaaaataacccggcgctggagaataggtgaagcagcggatttagttggggtttcttctcaggctatcagagatgccgagaaagcaaggccgattccggcacccggatatggaaaattcgggcccgggttgagcaacgtgttggttataccattgaacaaatttatcttagcgcgtgatgtgtttggtacgcgattgccacgtgctgaagactgtatttccaccggtgatcggggttgctgcccataaaggtggcgtttacaaaacctcagtttctgttcatcttgctcaggatctggctctgaaggggctacgtgttttgctcgtggaaggtaacgacccccagggaacagcctcaatgtatcacggatgggtgccagatcttcatattcatgcagaagacactctcctgcctttctatcttggggaaaaggacgatgtcacttatgcaataaagcccacttgctggcctggggcttgacattattccttcctgtctggctttgctccgtattgaagctgagtataatgggcaaactgtcaggaaggtaccctgcccaccgatccacacctgatgctccgactggccattgaaactgttgctcatgactatgatgtcatagttattgacagcgcgcctaacctgggtatcggcacgattaatgtcgtatgtgctgctgatgtgctgattgttcccacgcctgctgagttgtttgactacacctccgcactgcagtttttcgatatgcttcgtgatctgctcaaaaccgttgatcttaaagggttcgagcctgatgtacgtattttgcttaccaaatacagcaatagtaatggctctcagtccccgtggatggaggagcaaattcgggatgcctggggaagcatggttctaaaaaatgttgtacgtgaaacggatgaagttggtaaaggtcagatccggatgagaactgtttttgaacaggccattgatcaacgctcttcaactgatacttcgttatcgacaccagctgccccgatggtggatttgttaattgcgcgcgtaggagtaatggctcgcggtaaagccatacttttgcctgtatgtggtcgggaagtaaagtttactcttaaagtgctccggggtgatagtgttgagaagacctctcgggtatggtcaggtaatgaacgtgaccaggagctgcttactgaggacgcactggatgatctcatcccttcttttctactgactggtcaacagacaccggcgttcggtcgaagagtatctggtgtcatagaaattgccgatgggagtcgccgtcgtaaagctgctgcacttaccgaaagtgattatcgtgttctggttggcgagctggatgatgagcagatggctgcattatccagattgggtaacgattatcgcccaacaagtgcttatgaacgtggtcagcgttatgcaagccgattgcagaatgaatttgctggaaatatttctgcgctggctgatgcggaaaatatttcacgtaagattattacccgctgtatcaacaccgccaaattgcctaaatcagttgttgctcttttttctcaccccggtgaactatctgcccggtcaggtgatgcacttcaaaaagcctttacagataaagaggaattacttaagcagcaggctgtagagtgttctctagaccagggccgcatagtattcccagaaggaaaaggtaccacattttctttacccaatccacccatgatgggccatcaagttgattcccacgcttttgcttttgtaaccagtactgcaatgaataaacacatgctcctctcgggttccgaatttagggcttatacgggccccttgacccccaaaaaaaacttgatttgggtgaatggttcacgtagtgggcccatcgcccttaaaagcgggtttttcgcccctttgaccgtggaagtcccacgttctttaaaaagtgaattcctggttccaaactgggaacaacacctcacccctatctcgggctattcttttgatttataagggattttgccggatttcgggaaccacccatcaaacaggaattttcgcctgttggggcaaaccagcgtggaccgcttgctgcaactctctcagggccaggcggtgaagggccaatcagctgttgcccgtctcactggtgaaaagaaaaaccaccctggcgcccaatacgcaaaccgcctctccccgcgcgttggccgattcattaatgcagctggcacgacaggtttcccgactggaaagcgggcagtgagcgcaacgcaattaatgccccggaactctcaacctaaacacatttcagaaagaagttggattcgagatctagtgggcgccgaacctgaggtcgcagactccaagattggagacaggagtctgggaagcagccctggtttggcggccactggtccaagttctcgggaggactcttttaaaggccagagatggggaggggcaactgagtcccagagtcttcccgcagcttggcttccagggaggggctggcggcggactgtgattcgacccagagtcctcctgtcacctcctgcgagggattttgccgatttcggaaccaccatcaaacaggattttcgcctgctggggcaaaccagcgtggaccgcttgctgcaactctctcagggccaggcggtgaagggcaatcagctgttgcccgtctcactggtgaaaagaaaaaccaccctggcgcccaatacgcaaaccgcctctccccgcgcgttggccgattcattaatgcagctggcacgacaggtttcccgactggacagcgggcagccccggaactctcaacctaaacacatttcagaaagaagttggattcgagatctagtgggcgccgaacctgaggtcgcagactccaagattggagacaggagtctgggaagcagccctggtttggcggccactggtccaagttctcgggaggactcttttaaaggccagagatggggaggggcaactgagtcccagagtcttcccgcagcttggcttccagggaggggctggcggcggactgtgattcgacccagagtcctcctgtcacctcctgcgagggattttgccgatttcggaaccaccatcaaacaggattttcgcctgctggggcaaaccagcgtggaccgcttgctgcaactctctcagggccaggcggtgaagggcaatcagctgttgcccgtctcactggtgaaaagaaaaaccaccctggcgcccaatacgcaaaccgcctctccccgcgcgttggccgattcattaatgcagctggcacgacaggtttcccgactggaaagcgggcaccacgttggccggcttccccggtcaagttataaatggggggtccctttagggttccgattaagtgctttcggccacctgcaccccaaaaaacttgatttggttgatggttcacacacgggcgttcggttgaagaggaatctggtgtcatagaaatgcccgatgggagtcgcccgtcgtaaagcttgctgcactttaccgaaaagtgattatcgtgttctggtgccgaagctggatgatgagcagatggctgcattatccagattgggtaacgataatcgcccaacaagtgcttatgaacgtggtcagcgttatgcaagccgattgcagaatgaatttgctggaaatatttctgcgctggctgatgcggaaaatatttcacgtaagattattacccgctgtatcaacaccgccaaattgcctaaatcagttgttgctcttttttctcaccccggtgaactatctgcccggtcaggtgatgcacttcaaaaagcccttacagataaagaggaattacttaagcagcaggcatctaaccttcatgagcagaaaaaagctggggtgatatttgaagctgaagaagttatcactcttttcacttctgtgcttaaaacgtcatctgcatcaagaactagtttaagctcacgccatcagtttgctcctggagcgacagtattgtataagggcgataaaatggtgcttaacctggacaggtctcgtgttccaactgagtgtatagagaaaattgaggccattcttaaggaacttgaaaagccagcacctgatgggggcagccctagatcctcaaaccatccactagattatgtgttagaaattgtagcatatgaggcacggcgcttatttcgtgacaaaattgttggcgcaaaggaacttcatttatttgacatcattttaacatcagtgcctcaaggagattggggctcagacatattagacaatatgtcaggactactactggccacaaaaggtgctcaacaaatgtttgtgatccgcaatgcctacttcaagtcatcttaa

SEQ ID NO: 21709 - DNA, 2484 bp, Homo sapiens
  SIMILAR (1099)..(1974): 791254mologous to Cloning vector pZC320 SopB,accession number U26464,Smith-Waterman Score=1125.
atgaagcgtgcgcctgttattccaaaacatacgctcaatactcaaccggttgaagatacttcgttatcgacaccagctgccccgatggtggattcgttaattgcgcgcgtaggagtaatggctcgcggtaatgccattactttgcctgtatgtggtcgggatgtgaagtttactcttgaagtgctccggggtgatagtgttgagaagacctctcgggtatggtcaggtaatgaacgtgaccaggagctgcttactgaggacgcactggatgatctcatcccttcttttctactgactggtcaacagacaccggcgttcggtcgaagagtatctggtgtcatagaaattgccgatgggagtcgccgtcgtaaagctgctgcacttaccgaaagtgattatcgtgttctggttggcgagctggatgatgagcagatggctgcattatccagattgggtaacgattatcgcccaacaagtgcttatgaacgtggtcagcgttatgcaagccgattgcagaatgaatttgctggaaatatttcggcgctggctgatgcggaaaatatttcacgtaagattattatccgctggatcaacaccgccaaattggctaaatcagttgttgctcttttttctcacccggggaaatatctgcccggtcaagaagcttgcatgcctgcaggcatatggtgcaagctgttggtagatctaccattctggggtctggagcacagtggctcttctctcacagcttcactaggcagtggcccaagtggcactttgtgtgagggctccaaccccacgtttgccttctgcactgcccttgtagaagtttttcataagggctccattcctgcagtagacttctgcctggacatccaggtcgactctagaggatcccctttcgatatgcttcgtgatctgctcaagaacgttgatcttaaagggttcgagcctgatgtacgtattttgcttaccaaatacagcaatagtaatggctctcagtccccgtggatggaggagcaaattcgggatgcctggggaagcatggttctaaaaaatgttgtacgtgaaacggatgaagttggtaaaggtcagatccggatgagaactgtttttgaacaggccattgatcaacgctcttcaactgatacttcgttatcgacaccagctgccccgatggtggattcgttaattgcgcgcgtaggagtaatggctcgcggtaatgccattactttgcctgtatgtggtcgggatgtgaagtttactcttgaagtgctccggggtgatagtgttgagaagacctctcgggtatggtcaggtaatgaacgtgaccaggagctgcttactgaggacgcactggatgatctcatcccttcttttctactgactggtcaacagacaccggcgttcggtcgaagagtatctggtgtcatagaaattgccgatgggagtcgccgtcgtaaagctgctgcacttaccgaaagtgattatcgtgttctggttggcgagctggatgatgagcagatggctgcattatccagattgggtaacgattatcgcccaacaagtgcttatgaacgtggtcagcgttatgcaagccgattgcagaatgaatttgctggaaatatttctgcgctggctgatgcggaaaatatttcacgtaagattattacccgctgtatcaacaccgccaaattgcctaaatcagttgttgctcttttttctcaccccggtgaactatctgcccggtcaggtgatgcacttcaaaaagcctttacagataaagaggaattagttaagcagcaggcatctaacttacaaagcagaaaaaaatacagcaagatggccaggccactctatactgtattcaaggaaacccagagggcaactactcatctagtagaatcccacaccagtggcagaaacagccttcaaaacaataaagcaggccctagtacaagcgccagccttaagctttcccacaggacaaaacttctcttatttgtcatagagagagcaggagtagctcttgcactccttactcagacttgtgggacaaccccagaaccagtggcatatctaaattattacccgctgtatcaacaccgccaaaatgccctaaatcagttgtgcttcttttttctcacccccggtgaactatctgcccggtcaggtgatgcacttcaaaaagcctttacagataaagaggaattacttaagcagcaggcatctaaccttcatgagcagaaaaaagctggggtgatatttgaagctgaagaagttatcactcttttaacttctgtgcttaaaacgtcatctgcatcaagaactagtttaagctcacgacatcagtttgctcctggagcgacagtattgtataagggcgataaaatggtgcttaacctggacaggtctcgtgttccaactgagtgtatagagaaaattgaggccattcttaaggaacttgaaaagccagcaccctga

SEQ ID NO: 21710 - DNA, 10771 bp, Homo sapiens
  SIMILAR (1)..(840): 941254mologous to Cloning vector pZC320 SopA,accession number U26464,Smith-Waterman Score=1403.
  misc_feature (1)...(10771): n = a,t,c or g
atgaaactcatggaaacacttaaccagtgcataaacgctggtcatgaaatgacgaaggctatcgccattgcacagtttaatgatgacagcccggaagcgaggaaaataacccggcgctggagaataggtgaagcagcggatttagttggggtttcttctcaggctatcagagatgccgagaaagcagggcgactaccgcacccggatatggaaattcgaggacgggttgagcaacgtgttggttatacaattgaacaaattaatcatatgcgtgatgtgtttggtacgcgattgcgacgtgctgaagacgtatttccaccggtgatcggggttgctgcccataaaggttgcgtttacaagacctcagtttctgttcatcttgctcaggatctggctctgaaggggctacgtgttttgctcgtggaagatcttcatattcatgcagaagacactctcctgcctttctatcttggggaaaaggacgatgtcacttatgcaataaagcccacttgctggccggggcttgacattattccttcctgtctggctctgcaccgtattgaaactgagttaatgggcaaatttgatgaaggtaaactgcccaccgatccacacctgatgctccgactggccattgaaactgttgctcatgactatgatgtcatagttattgacagcgcgcctaacctgggtatcggcacgattaatgtcgtatgtgctgctgatgtgctgattgttcccacgcctgctgagttgtttgactacacctccgcactgcagtttttcgatatgcttcgtgatctgctcaagaacgttgatcttaaagggttcgagcctgatgacgatgtcacttatgcaataaagcccacttgctggccggggcttgacattattccttcctgtctggctctgcaccgtattgaaactgagttaatgggcaaatttgatgaaggtaaactgcccaccgatccacacctgatgctccgactggccattgaaactgttgctcatgactatgatgtcatagttattgacagcgcgcctaacctgggtatcggcacgattaatgtcgtatgtgctgctgatgtgctgattgttcccacgcctgctgagttgtttgactacacctccgcactgcagtttttcgatatgcttcgtgatctgctcaagaacgttgatcttaaagggttcgagcctgatgtacgtattttgcttaccaaatacagcaatagtaatggctctcagtccccgtggatggaggagcaaattcgggatgcctggggaagcatggttctaaaaaatgttgtacgtgaaacggatgaagttgggatttggctctgtgactcaagcttgtatgcaccggggtgtgacaatctaaaaacttgtcacacttcacatggatctgtcatggcggaaacagcggttatcaatcacaagaaacgtaaaaatagcccgcgaatcgtccagtcaaacgacctcactgaggcggcatatagtctctcccgggatcaaaaacgtatgctgtatctgttcgttgaccagatcagaaaatctgatggcaccctacaggaacatgacggtatctgcgagatccatgttgctaaatatgctgaaatattcggattgacctctgcggaagccagtaaggatatacggcaggcattgaagagtttcgcggggaaggaagtggttttttatcgccctgaagaggatgccggcgatgaaaaaggctatgaatcttttccttggtttatcaaacgtgcgcacagtccatccagagggctttacagtgtacatatcaacccatatctcattcccttctttatcgggttacagaaccggtttacgcagtttccgcttagtgaaacaaaagaaatcaccaatccgtatgccatgcgtttataccaattcctgtgtcagtatcggaagccggatggctcaggcatcgtctctctgaaaatcgactggatcatagagcgttaccagctgcctcaaagttaccagcgtatgcctgacttccgccgccgcttcctgcaggtctgtgttaatgagatcaacagcagaactccaatgcgcctctcatacattgagaaaaagaaaggccgccagacgactcatatcgatctggctctgaaggggctacgtgttttgctcgtggaaggtaacgacccccagggaacagcctcaatgtatcacggatgggtaccagatcttcatattcatgcagaagacactctcctgcctttctatcttggggaaaaggacgatgtcacttatgcaataaagcccacttgctggccggggcttgacattattccttcctgtctggctctgcaccgtattgaaactgagttaatgggcaaatttgatgaaggtaaactgcccaccgatccacacctgatgctccgactggccattgaaactgttgctcatgactatgatgtcatagttattgacagcgcccataaccgggggtatcggcacaataaatgtcgtatgtgctgatgatgtgatgattgttcccacgcctgctgagttgtttgactacacctccgcactgcagtttttcgatatgcttcgtgatctgctcaagaacgttgatcttaaagggttcgagcctgatgtacgtattttgcttaccaaatacagcaatagtaatggctctcagtccccgtggatggaggagcaaattcgggatgcctggggaagcatggttctaaaaaatgttgtacgtgaaacggatgaagttggtaaagctgccccgatggtggattcgttaattgcgcgcgtaggagtaatggctcgcggtaatgccattactttgcctgtatgtggtcgggatgtgaagtttactcttgaagtgctccggggtgatagtgttgagaagacctctcgggtatggtcaggtaatgaacgtgaccaggagctgcttactgaggacgcactggatgatctcatcccttcttttctactgactggtcaacagacaccggcgttcggtcaaaggagtatcgggggtcaaagaaattgccgatgggattcgccgtcgtaaagctgctgcacttaccgaaaagtgattatcgtgttctggtgggcgagctggatgatgagcagatggctgcattatccagattgggtaacgattatcgcccaacaagtgcttatgaacgtggtcagcgttatgcaagccgattgcagaatgaatttgctggaaatatttctgcgctggctgatgcggaaaatatttcacgtaagattattacccgctgtatcaacaccgccaaattgcctaaatcagttgttgctcttttttctcaccccggtgaactatctgcccggtcaggtgatgcacttcaaaaagcctttacagataaaggaggatttacttaagcagcaggcatctaaccttcatggagcagaaaaaagctggggttgttattttgaagctgaagaagttatcactcttttaacttctgtgcttaaaacgtcatcttgcatcaagaactagtttaagctcacgacatcagtttgctcctggagcgacagtattgtataagggcgataaaatggtgcttaacctggacaggtctcgtgttccaactgagtacagatacggtgtcttcttaaatgttcttcttccggcaacaaagtattttcagttgcacgatccaagcctacgtaacatggaacttaattactctctggcttcagaggatctggttttgaaggggctacgtgttttgctcgtggaaggtaacgacccccagggaacagcctcaatgtatcacggatgggtaccagatcttcatattcatgcagaagacactctcctgcctttctatcttggggaaaaggacgatgtcacttatgcaataaagcccacttgctggccggggcttgacattattccttcctgtctggctctgcaccgtattgaaactgagtataatgggcaaatttgatgaaggtaaactgcccaccgatccacacctgatgctccgactggccattgaaactgttgctcatgactatgatgtcatagttattgacagcgcgcctaacctgggtatcggcacgattaatgtcgtatgtgctgctgatgtgctgattgttcccacgcctgctgagcagttagatataagctgcgtcacgccagttttttgactattcttcgtgatctgctcaagaacgttgatcttaaagggttcgagcctgatgtacgtatggtgctccggggtgatagtgttgagaagacctctcgggtatggtcaggtaatgaacgtgaccaggagctgcttactgaggacgcactggatgatctcatcccttcttttctactgactggtcaacagacaccggcgttcggtcgaagagtatctggtgtcatagaaattgccgatgggagtcgccgtcgtaaagctgctgcacttaccgaaagtgattatcgtgttctggttggcgagctggatgatgagcagatggctgcattatccagattgggtaacgattatcgcccaacaagtgcttatgaacgtggtcagcgttatgcaagccgattgcagaatgaatttgctggaaatatttctgcgctggctgatgcggaaaatataatcacgtgcgcctttattccaaaacatacgcccaatatcaaccggttgaaagatatttcgttaacgacaccagttgccccgatggtggattcgttatttgcgcgcgtaggagtaatggctcgcggtaatgccaatactttgccctgtatgtggtcgggatgtaaagtttactcttgaagtgctccggggtgatagtgttgacaagacctctcgggtatggtcaggtaatgaacgtgaccaggagctgcttactgaggacgcactggatgatctcatcccttcttttctactgactggtcaacagacaccggcgttcggtcgaagagtatctggtgtcatagaaattgccgatgggagtcgccgtcgtaaagctgctgcacttaccgaaagtgattatcgtgttctggttggcgagctggatgatgagcagatggctgcattatccagattgggtaacgattatcgcccaacaagtgcttatgaacgtggtcagcgttatgcaagccgattgcagaatgaatttgctggaaatatttctgcgctggctgatgcggaaaatatttcacgtaagattattacccgctgtatcaacaccgccaaattgcctaaatcagttgttgctcttttttctcaccccggtgaactatctgcccggtcaggtgatgcacttcaaaaagcctttacagataaagaggaattacttaagcagcaggcatctaaccttcatgagcagaaaaaagctggggtgatatttgaagctgaagaagttatcactcttttaacttctgtgcttaaaacgtcaggggattttgccgatttcggaaccaccatcaaacaggattttcgcctgctggggcaaaccagcgtggaccgcttgctgcaactctctcagggccaggcggtgaagggcaatcagctgttgcccgtctcactggtgaaaagaaaaaccaccctggcgcccaatacgcaaaccgcctctccccgcgcgttggccgattcattaatgcagctggcacgacaggtttcccgactggaaagcgggcagcataggcttggttatgccggtactgccgggcctcttgcgggatatcgtccattccgacagcatcgccagtcactatggcgtgctgctagcgctatatgcgttgatgcaatttctatgcgcacccgttctcggagcactgtccgaccgctttggccgccgcccagtcctgctcgcttcgctacttggagccactatcgactacgcgatcatggcgaccacacccgtcctgtggatctacccactaggattttgccgatttgggaccccccatcaaacaggattttcgccggttggggcaacccagcgtggaccggcttgctgcaactctctcagggcccagccggtgaagggcaatcagctgttgcccgtctcactggtgaaaagaaaaacccacccctggcgcccaatacgcaaaccgcctctccccgcgcgttggccgatttcattaatgcagcgggcacgacaggtttccccgactggaaagcgggcagtgagcgcaacgcaattaatagtctttccattatctttgatgccaggcctagcatcccaggtgcggaagtttgggcctctcatgatgcagcaatgagtgcccacagcacgtggcctgagcatttctcttggcaaatgtcattgcttgctgtgtgtggtgctacgggggtggattttgccgatttcggaaccaccatcaaacaggattttcgcctgctggggcaaaccagcgtggaccgcttgctgcaactctctcagggccaggcggtgaagggcaatcagctgttgcccgtctcactggtgaaaagaaaaaccaccctggcgcccaatacgcaaaccgcctctccccgcgcgttggccgattcattaatgcagctggcacgacaggtttcccgactggaaagcgggcaggattttgccgatttcggaaccaccatcaaacaggattttcgcctgctggggcaaaccagcgtggaccgcttgctgcaactctctcagggccaggcggtgaagggcaatcagctgttgcccgtctcactggtgaaaagaaaaaccaccctggcgcccaatacgcaaaccgcctctccccgcgcgttggccgattcattaatgcagctgggcacgacaggtttcccgactggaaagcgggcagtgagcgcaacgcaattaatggattttgccgatttcggaaccaccatcaaacaggattttcgcctgctggggcaaaccagcgtggaccgcttgctgcaactctctcagggccaggcggtgaagggcaatcagctgttgcccgtctcactggtgaaaagaaaaaccaccctggcgcccaatacgcaaaccgcctctccccgcgcgttggccgattcattaatgcagctggcacgacaggtttcccgactggaaagcgggcaggattttgccgatttcggaaccaccatcaaacaggattttcgcctgctggggcaaaccagcgtggaccgcttgctgcaactctctcagggccaggcggcatcccgaattttgttcctccatccacggggattgagagccattactattgctgtatttggtaagcaaaatacgtacatcaggctcgaaccttttaagatcaacgttcttgagcagatcacgaagcatatcgaaaaactgcagtgcggaggtgtagtcaaacaactcagcaggcgtgggaacaatcagcacatcagcagcacatacgacattaatcgtgccgatacccaggttaggcgcgctgtcaataactatgacatcatagtcatgagcaacagtttcaatggccagtcggagcatcaggtgtggatcgatagaaaggcaggagagtgtcttctgcatgaatatgaagatatagtacccatccgtgatacattgaggctgttccctgggggtcgttaccttccacgagcaaaacacgtagccccttcagagccagatcctgagcaagatgaacagaaactgaggttttgtaaacgccacctttatgggcagcaaccccgatcaccggtggaaatacgtctcagggttccttagatcngaggattttgccgatttcggaaccaccatcaaacaggattttcgcctgctggggcaaaccagcgtggaccgcttgctgcaactctctcagggccaggcggtgaagggcaatcagctgttgcccgtctcactggtgaaaagaaaaaccaccctggcgcccaatacgcaaaccgcctctccccgcgcgttggccgattcattaatgcagctggcacgacaggtttcccgactggaaagcgggcaggatatggctttaaaaggggctaccgtgtattgctggtggaagggtaacgaccccccagggaacagcctcaatgtatcacggatgggtaccagatcttcatattcatgcagaaaaacactctcgctgcctttctatgttggggaaaaggacgatgtcacttatgcaataaagcccacttgctggccggggcttgacattattccttcctgtctggctctgcaccgtattgaaactgagttaatgggcaaatttgatgaaggtaaactgcccaccgatccacacctgatgctccgactggccattgaaactgttgctcatgactatgatgtcatagttattgacagcgcgcctaacctggtttttcgatatggcttcgtgatctgctcaagaacgttgatctctccagggttcgagcctgatgtacgtattttgcttaccaaatacagcaatagtaatggctctcagtccccgtggatggaggagcaaattcgggatgcctggggaagcatggttctaaaaaatgttgtacgtgaaacggatgaagttggtaaagggccaggcggtgaagggcaatcagctgttgcccgtctcactggtgaaaagaaaaaccaccctggcgcccaatacgcaaaccgcctctccccgcgcgttggccgattcattaatgcagctggcacgacaggtttcccgactggaaagcgggcagtgagcgcaacgcaattaatggattttgccgatttcggaaccaccatcaaacaggattttcgcctgctggggcaaaccagcgtggaccgcttgctgcaactctctcagggccaggcggtgaagggcaatcagctgttgcccgtctcactggtgaaaagaaaaaccaccctggcgcccaatacgcaaaccgcctctccccgcgcgttggccgattcattaatgcagctggcacgacaggtttcccgactggaaagcgggcacgccttacatatctccctcatcacaccaagtttccctactgaggggaagagccagtttgtgctgcaactaagaccttcgttacgaggagcactcttgagtttgctggatcactacgaatggaactgttttgtcttcctgtatgacacagacagggnagtaatggctcgcggtaatgccatttctttgcctgtatgtggtcgggatgtgaagttactctttgaagtgctccggggtgatagtgttgagaagacctctcgggtatggtcaggtaatgaacgtgaccaggagctgcttactgaggacgcactggatgatctcatcctttcttttctactgactggtcaacagacaccggcgttcggtngaagagtatctggtgtcatagaaattgccgatgggagtcgccgtcgtaaagctgctgcacttaccgaaagtgattatcgtgttctggttggcgagctggatgatgagcagatggctgcattatccagattgggtaacgattatcgcccaacaagtgcttatgaacgtggtcagcgttatgcaagccgattgcagaatgaatttgctggaaatatttctgcgctggctgatgcggaaaatatttcacgtaagattattacccgctgtatcaacaccgccaaattgcctaaatcagttgttgctctcccctctcaccccggtgaactatctgcccggtcaggtgatgcacttcaaaaagcctttacagataaagaggaattacttaagcagcaggcatctaaccttcatgagcagaaaaaagctgggacggtttttcgccttttgacgttggagtccacgtctttaatagtggactcttgtcccaaactgaaacaacactcaaccttatctcgggttattcttttgatttataagggattttgccgatttcggaaccaccatcaaacaggattttcgcctgctggggcaaaccagcgtggaccgcttgctgcaactctctcagggccaggcggtgaagggcaatcagctgttgcccgtctcactggtgaaaagaaaaaccaccctggcgcccaatacgcaaaccgcctctccccgcgcgttggccgattcattaatgcagctggcacgacaggtttcccgactggaaagcgggcagtgagcgcaacgcaattaattgttgagaagccttctcgggtatggtcaggtaatgaacgtgaccagaagctgtttactaaggacgcactggatgatctcatccttttttttctactgactggtcaacagacacgggcggtcggtcgaagagtatctggtgtcatagaaattgccgatgggagtcgccgtcgtaaagctgctgcacttaccganagtgattatcgtgttctggttggcgagctggatgatgagcagatggctgcattatccagattgggtaacgattatcgcccaacaagtgcttatgaacgtggtcagcgttatgcaagccgattgcagaatgaatttgctggaaatatttctgcgctggctgatgcggaaaatatttcacgtaagattattacccgctgtatcaacaccgccaaattgcctaaatcagttgttgctcttttttctcaccccggtgaactatctgcccggtcaggtgatgcacttcaaaaagcctttacagataaagaggaattacttaagcagcaggcatctaaccttcatgagcagaaaaaagctggggtgatatttgaagctgaagaagttatcactcttttaacttctgtgcttaaaacgtcatctgcatcaagaactagtttaagctcacgacatcagtttgctcctggagcgacagtattgtggagtggatcctcaccagagagccggttttcagccctaagttga

SEQ ID NO: 21711 - DNA, 2860 bp, Homo sapiens
  SIMILAR (1576)..(2130): 931254mologous to Cloning vector pZC320 SopB,accession number U26464,Smith-Waterman Score=854.
atggcgcaacgccctatgaggaaactgaggctcagggaaagtaataacggccagggttcgcggcttgacgatccgatcgaggcgcaggcgctgatcgccacctacggccgtgatcgtgatcctggccggccgttgtggttggggtcggtcaagtcgaacatcggtcatacgcaagcggcggcgggtgtggctggtgtgatcaagatggtgatggcgatgcggcacgggcagctgccacgcacgttgcacgtggaatcgccgtcgccggaggtggattggtcggcggggacggttcaactccttacggagaacacgccctggcccaggagtggtcgtgttcgtcgggtgggggtgtcgtcgttcgggatcagtggtactaacgcgcacgtcatcctcgaacagcccccgggagtgccgagacccgctatggcaatccgggacagtttccctctttgcccgcctcctgctgaggccttcaacacctctggaggaagggctgctacagtcaagtcttcaggagaaagcaagaagggaccagtctctacggatgtgcctagtcatccctcggtatccacaggggatgggttccaggacctcatgggtaccaaatccaaggatgccaagttccttcggcatattttcgaacggttgttgggtgaatctgtggctatcagagatgccgagaaagcagggcgactaccgcacccggatagtggaatttcgagaccgggttgaccaaccgggttgtttctccatttggccaaattattctatatgcgtaatgtgtttggtccgcgattgccacgtgctaaagacgtatttccaccggtgatcggggttgctgcccataaaggtggcgtttacaaaacctcagtttctggttcatcttgctcaggatctggctctgaaggggttacgtgttttgctcgtgaaaggtaacgacccccaaggaaccagcctcaatggtatcgcgggagggggacccagctcttcataatcagtgcagaacacagctcttatgcctctcatatcttgttgaaaaggacgatgtcacttatgcaataaagcccacttgctggccggggcttgaccattattccttcctgtctggctctgcaccgtattgaaactgagttaaatgggcaaatttgatgaagggaaactgcccaccgatccacacctgatgctccgactggccattgaaactggggctcatgctcatgactatgatgtcatagttattgacagcgcgcctaacctgggtatcggcacgattaatgtcgtatcgcccccctgatgtgctgacccgttcccacgcctgttgagctatgtttgattacaccttccgcactggcagtttttcgatatgcttcgtgatctgctcaagaacgcgtgatcttaaaaggggtcaaccctcgtgtcccttttttgctttacccaatccagcaatagtaatggctctcaattcccggtggatggaggagcaaattcgggatgcctggggaagcatggttctaaaaaatgttgtacgtgaaaccggttgaagttggtaaagggtcagaatccggatgagaacctgtttttgaacaggccattgatcaacgctcttcaactgatacttcgttatcgacaccagctgccccgatggtggattcgttaattgcgcgcgtaggagtaatggctcgcggtaatgccattactttgcctgtatgtggtcgggatgtgaagtttactcttgaagtgctccggggtgatagtgttgagaagacctctcgggtatggtcaggtaatgaacgtgaccaggagctgcttactgaggacgcactggatgatctcatcccttcttttctactgactggtcaacagacaccggcgttcggtcgaagagtatctggtgtcatagaaattgccgatgggagtcgccgtcgtaaagctgctgcacttaccgaaagtgattatcgtgttctggttggcgagctggatgatgagcagatggctgcattatccagattgggtaacgattatcgcccaacaagtgcttatgaacgtggtcagcgttatgcaagccgattgcagaatgaatttgctggaaatatttctgcgctggctgatgcggaaaatatttcacaatgaatttgctggaaatatttctgcgctggctgatgcggaaaatatttcacgtaagattattacccgctgtatcaacaccgccaaattgcctaaatcagttgttgctcttttttctcaccccggtgaactatctgcccggtcaggtgatgcacttcaaaaagcctttacagataaagaggaattacttaagcagcaggcatctaaccttcatgagcagaaaaaagctggggtgatatccccacctgaagaagttatcactcttttaacttctgaaattaaaacgtcatctgcatcaagaactagtttaagctcacgacatcagtttgctcctggagcgacagtattgtataagggcgataaaatgtttatcacagttaaaattgctaaacgcagtcaggcaccgtgtatgaaatctaacaatgcgctcatcgtcatcctcggcaccgtcaccctggatgctgtaggcataggcttggttatgccggtactgccgggcctcttgcgggatatcgtccattccgacagcatcgccagtcactatggcgtgctgctagcgctatatgcgttgatgcaatttctatgcgcacccgttctcggagcactgtccgaccgctttggccgccgcccagtcctgctcgcttcgctacttggagccactatcgactacgcgatcatggcgaccacacccgtcctgtggatctacccactagtcaattcaccatcttgttga

SEQ ID NO: 21712 - DNA, 420 bp, Homo sapiens
  SIMILAR (114)..(365): 931254mologous to Homo sapiens similar to ribosomal protein L23a; similar to P29316 (PID:g132848),accession number AC004908,Smith-Waterman Score=402.
tttcgtccgagatggaccctgggctcggcgtcctccggaaaactgcactgtgaggcggggcgatggggaagggccgaagccccgccagcccagctaaagcagacggctcgcactgcgacccgaagacggcaccgaaagcgaaggaagctcctgctcctcctaaagccgaagccaaagcgaaggccttaaaggccaagaaggcagtgttgaaaggtgtccgcagccacacgcaaaaaagaagatccgcatgtcactcaccttcaggcggcccaagacactgcgactccggaggcagcccagatatcctcggaagagcacccccaggagaaacaagcgtcgccactatgctatcatcaaagttccgctgaccactgagtcggccgtgaagaagatagagaaaacaacacgcttgtgttcact

SEQ ID NO: 21713 - DNA, 414 bp, Homo sapiens
  SIMILAR (280)..(77): 761254mologous to Homo sapiens 09-MAR-1992 Human interleukin 9 receptor clone ph9RA5,accession number Q47838_cd1,Smith-Waterman Score=272.
ctgtttttaataatctgcttattacccgctctgtagtgtggaaacaaattattcatgcacaaggtcctccacgtgttccttgtctctggggagcctggaagcacacaggctggctccactcgctccactggcgtgtgtcacactccttctctgccacgtcaacctctggcatggccatctggacatgaagcctgccctcagggataaagccacagtccagctcaaaggcttcaagtaggatccaggtcgcaccgacaatgtgatccctgtgctgggcccgattcgggtcgcagtgcgagccgtatgcttaagctgggctggcggggcttcggccattccccatcgcaccgcttcacagtgcagttttccggaggacgccgagctcagggtccatatcgggctcgcatagtcgcg

SEQ ID NO: 21714 - DNA, 370 bp, Homo sapiens
  SIMILAR (198)..(362): 901254mologous to Homo sapiens Human RNA-associated protein- 22 (RNAAP-22),accession number Y70241,Smith-Waterman Score=249.
cggacttctggagaccttaactgagtcaagtgtatggtcttaaagttatttaagcaatatcatcagaagcctataaccagagtacctgtcatagtcttttctgtgagtctcagagggagtcctgtcttggagacgaacattctgacctgtagttgattgcaggagctttcaggaaagcatcagggggaaataatatcttcaggcggcccaagacactgtgactccggaggcagcccagatagcctcagaagagcacccccaggagaaacaagcttggccactatgctatcatcaagtttccgctgaccactgagtcggccgtgaagaagatagaagaaaccaacacgcttgtgttcactgtgctcgtgcc

SEQ ID NO: 21715 - DNA, 1773 bp, Homo sapiens
  SIMILAR (1)..(1020): 991254mologous to Escherichia coli K12 putative ATP-binding component of a transport system, fragment 1,accession number AE000424,Smith-Waterman Score=1715.
atgagcgtgctggtcgccaccgcctatatggaagaggccgaacgcttcgactggctggtagcgatgaatgccggagaagtgctggcaactggcagcgccgaagagctacggcagcaaacgcaaagcgctacgctggaagaagcatttataaatctgttaccgcaagcgcaacgccaggcgcatcaggcggtagtgatcccaccgtatcaacctgaaaacgcagagattgccatcgaagcgcgcgatctgaccatgcgttttggttccttcgttgccgttgatcacgttaatttccgcattccacgcggggagatttttggttttcttggttcgaacggctgcggtaaatccaccaccatgaaaatgctcaccggactgctgcccgccagcgaaggtgaggcgtggctgttcgggcaaccggttgatccaaaagatatcgatacccgccgtcgggtgggctatatgtcgcaggcgttttcgctctataacgaactcaccgtgcggcaaaaccttgagttacatgcccgtttgtttcacatcccggaagcggaaattcccgcaagagtggctgaaatgagcgagcgttttaagctcaacgacgttgaagatattctgccggagtcattgccgctcggcattcgccagcggctttcgctggcggtggcggtgattcatcgcccggagatgttaatcctcgatgagcctacttctggtgtcgatccggtggcgagggatatgttctggcagttgatggtcgatctctcgcgccaggacaaagtgactatcttgatctccacccactttatgaacgaagcggaacgttgcgaccgcatctcactgatgcacgccggaaaagtgcttgccagcggtacaccgcaggaactggttgagaaacgcggagccgccagtctggaagaggcatttatcgcctatttgcaggaagcggcagggcagagcaacgaagccgaagcgccgcccgtggtacacgacaccacccacgcgccgcgtcagggatgtagcactgcgcccatacagccgccacgaaggcagccacacgcaaaaaagaagatccgcatgtcactcaccttcaggcggcccaagacactgcgactccggaggcagcccagatatcctcggaagagcacccccaggagaaacaagcttggccactatgctatcatcaagtttccgctgaccactgagtcggccgtgaagaagatagaagaaaacaacacgcttgtgttcactgtggatgttaaagccaacaagcaccagatcagacaggctgtgaagaagctctatgacagtgatgtggccaagcatacagaagaacgaagacacgacgaacagaacaacatactaacacgagaagccaagaacagaaacgacaacacacgaaacagagcacgcacagaaacaaacacagagacgcagaagaattcagggtaccaagccctgataagttttcacagttactattcagacactagtgataataaagcccacctagtgagctatcaatcaggtcaatgcacctacgaccgcttagggtggaatttgctcattcgcatgacatgccgatcgctccaacatacatacgacatacagagtactcagattgcgtcgtgcttccaccccgtttcggtgcgagtaaatctccgcctctattgcgccaattacggtggtattagtgccgtgtttatgccgttacggaaggaattgttgattttaacaagaagtagcaatagcaaggtttctcaactgcgcatctga

SEQ ID NO: 21716 - DNA, 605 bp, Homo sapiens
  SIMILAR (356)..(595): 961254mologous to Homo sapiens Similar to ribosomal protein L23a,accession number BC000596,Smith-Waterman Score=390.
agtgcggtggaattccctggctgtgggtgtggtaccgaggcttcagcgggtgccgcccgcctagagggagtggagcggtgagcacgtcaggggtggggggcgcaggtcaagctttcaccagtttttaattctttgatggggtaaatttgagcaattttctcgacttgtcgacattcgttattaactgagcaggaatcaggagaggaacccggtcctctccacacagcccagcagagagcctacgactagatttgcatctttacgtcctgcgcggaggctgctacacacatgcagaagtcatgctggtggcctggacagtgaagggagagaagtggatttgggagacatttaggagatggcaccaaaagcgaaggaagctcctgctcatcctaaagccgaagccaaagcgaaggctttaaaggccaagaaggcagtgttgaaaggtgtccgcagccacacgcaaaaaagaagatccgcatgtcactcaccttcaggcggcccaagacactgcgactccggaggcagcccagatatcctcggaagagcacccccaggagaaacaagcttggccactatgctatcatcaagtttccgctgaccactga

SEQ ID NO: 21717 - DNA, 1727 bp, Homo sapiens
  SIMILAR (472)..(963): 551254mologous to Homo sapiens Human RNA-associated protein- 22 (RNAAP-22),accession number Y70241,Smith-Waterman Score=355.
ctgagcattccgtgtgtccagaggtagggttagcagggatagatggacttcctgcttattttctgttcacatttccactgaccttcaatcctgtagactgcaaagattgagccagctgagcccccaaagagactcagcagtgcagaatgtgggcctgagtgggaggactgcccagccgcacaccttccagctctgttcttcccgggccctggatgcttcttgccacgctgtcctctgaaatgacgctctgccccagcagacctgtgcgggcccagcacagggatcacattgtcggggtgacctggatcctacttgaagcctttgagctggactgtggctttatccctgaggccaggcttcatgtccagatggccatgccagaggttgacgtggcagagaaggagtgtgacacaggccagtggagcgagtggagccagcctgtgtgcttccaggctccccagagacaagacggcaccgaaagcgaaggaagctcctgctcctcctaaagccgaagccaaagcgaaggctttaaagcccaagaaagcagttgttgaaaggtgtccgcacacacacgcaaaaaagaggatccgcatgtcacccaccttcaggcggcccaagactctgcgactccggaggcagcccagatatcctcggaagagcacccccaggagaaacaagcttggccactatgctatcatcaaagtttccgctgaccactgagatcggccgggaaaaagaataaaaaaaacaacacgcctttggttcactgtgggtgttaaaggccaacaaggcaccagattcagacaggctgtgaagaaggctctatgacagtgatgtgggccaaggtcaccaccctgatttgtcctgataaagagaagaaggcatatgttcgacttgctcctgattatgatgctttggatgttgccaacaaaattgggatcatctaaactgagtccagctggctaactctaaatatatgtgtatcttttcagcataaaaaaataatgtttttcataagaatgacaacttaattagaatcaaatctataagctttaagattttacgtttctagtaagtataatattagcttatttgactagaactcaagcagaataggaatttatgcttgttttatattcaataatgataattttgaagatatagttgttttattacaccaaaaatactatattaatcttatttaactaagttttatccaaatcatgttaacttaagaaacatttgatcagttcctatatttctaggagtttggtgaatatttatttataaatgcttatttttttccaagccaagtttggaataggaggcacttttaggagggtttccataaatggaattttgtaatgctctctggagttaagaaaatatcacatatacataacgtacattaatagatacacaaacacaaatagagatttcatagctttcatcctgaaatttcagccatgaatcaggcataaatattctgatggttaatttcagacatctacttgatcggattgagagacacacatagctggtcaaacacgatttcagccatgaatcaggcataaatattctgatggttaattttagacatctacttgagtggattaagagacacacgtagctggtcaaacatgatttcagccatgaatcagccataaatattctgatggttaattttagacatctacttgagtggattaagagacacaccctgtatt

SEQ ID NO: 21718 - DNA, 333 bp, Homo sapiens
  SIMILAR (333)..(118): 761254mologous to Homo sapiens myo-inositol 1-phosphate synthase A1,accession number AF220530,Smith-Waterman Score=287.
tttttttttattttttgagggctgagtggcagcgctgttatttgtgggggccttcaaggtagggtcgtggggggcagcggggaggaagagccgagaaactgtgtgaccggggcctcaggtggtgggcattgggggctcctcttgcagatgcccattggcatcaccggtgcagccattggtggcagcgggtaccggtcctttcttgttcaacatagggtaggtggcagccacgggtccaactcgcttggcgctccattttgtgttccaggagcatgtggttctgtggcgggagcccacgcaggccctgaggatgttctcgatgcagctgcgctg

SEQ ID NO: 21719 - DNA, 1650 bp, Homo sapiens; identical to SEQ ID NO: 13319
  SIMILAR (838)..(1353): 891254mologous to Drosophila melanogaster Sog,accession number U18774,Smith-Waterman Score=783.

SEQ ID NO: 21720 - DNA, 751 bp, Homo sapiens
  SIMILAR (631)..(2): 891254mologous to Escherichia coli O157:H7 putative 2- component regulator,accession number AE005606,Smith-Waterman Score= 917.
cgcgaatttcaccacctttgctcagccactgttccagcgcgctacgctcaaaggagatatgaaccacttccatatcatgcagttttaacggtttttgcagcagtagagtcagagtggaagcagtaacgttaacaggaagttgatactgctgacgacggctgaaaatgccgcccagacgaattaccgttaaggctgttttatcgctttgttgctgctggagttgcaggtgacgttgcacaatcgcgccaaggcgagtcaacatcccttgctgttgccaggcgtgaccggtcatcaatacatcaatttgttgttgtatcaaattcaggctttgcgcgtcataccacaggcaatctttcagcaaaatgagatctaccggggcaacagcactgcgaccgctaaaaaaggcgctggcctgcaataatcggatcgcttttttccagcgacgatccgagacataaggcgcatccggtaatttatccagttgctggcgcagcataaaaatcagctcaaatacatgatcgggcagcgtaatttcacctatcgccgctacctgataccgaatatttgctgtgctatgatccgtccagtaataatgagctggcccaggtgatctatcaggcgatggagagctaccataatccgtggcaatacagcccaatgtctttattgccgtcagctctataacatgcaactggctgccttttgggaaatgtggctcaacatattggatgtgccaatccatgtagcctgc

SEQ ID NO: 21721 - DNA, 639 bp, Homo sapiens
  SIMILAR (425)..(294): 471254mologous to Xylella fastidiosa DNA repair system specific for alkylated DNA,accession number AE003963,Smith-Waterman Score=104.
tttttttcactgccacatagattttaatttgcctaaagatgatagcgattttgagctgtggttagggataactgttcccacagtagacctattaccaacatgagttgctggctttcatttaataggactccaagctggcaaacaaaccccaccatcttcccaacagccacatcatgagatctagcagcaccagcctcttgaagtggcttctcagtggaaggtttgctccgtttcagtgaagcttctctctcaaagctctgacgtcaccagggtgcccctcgagggtctggatagactgtccgaaaggtcaggttcactctcggttctctagagtggtattctttgggcactcgatgctgccagtcagcttgtgtcgctccttccatgattaacaaggtaccatgatccaagggtatcttcactctttccacatatgtgtagtctccattctcttcctagaaaacagcatttgttgtaataaatgttttgcctgtgtaatcaagatgcaacagaacctgacagaggtcaaaaaaaaatggaaacctctgctcagccagactgtgggaatccatatatagctctgtcatttggcagctgcttgactgttggcaagttacctcatctctctgtaccctgact

SEQ ID NO: 21722 - DNA, 1086 bp, Homo sapiens
atgcgtgtcgtcctcttgcttactctgaagacgctgcaattgaagtacccgaaggcagcttcgaagggcggttgtgctgcacttacattgctggtcggagtgagtaccggtcctggaagctttggactcatcctgcgtcgggcgaattcagagctgctgtctttgcggcttagagtagagatatttgcctgcgcatcgcatgctaacggggtgtatgtcttgccggaagatgatcgcatcaaagcgattaatgaaatccgcatggcgatccatcaggttagcccctttcgtgaagagccagtggattgcgttctgtgggttaaaaacagccaacttatgcctaatgattacaacccaaacaacgtggcaccacccgaaaaaaaactgctgcaaaaatccattgaaatagatggttttacccaacccattgtggtcacacatacggataaaaatgccatggaaatcgtggatggttttcaccgccatgaaattggtaaaggctcatcatcattaaaattacgcttaaaaggttatttgccggtgacctgtctggaaggtacgcgtaatcaacgcatcgccgcgactattcgtcataatcgcgctcgtggacgccatcaaatcaccgccatgtcggaaatcgtccgtgaacttagccagttgggatgggacgataataaaattggcaaagagctgggaatggacagcgacgaagtgctgcgcctgaagcaaattaacggcctgcaagcagtcgtatgccgaccgtcaatattcccgcgcctggacgctaaagctggcgcaggcgttcagctgctgccagcaacgtcgattccttcttggcaaaacagagacgaatcagtttatgtgggaaaggatcggccaacaccgacagcggaatcgccgtacgccgtgctcctgcgtcagccactggcaaaactcaacatcatccaggaccagtgatgaacatggttgagaatatgctcgatcaggcattcaaaaagcttaatcctcacgagcatcctgttctgcactctgaccagggatggcagtatcgtatgagaagatatcaaaatatccttaaagaacatg

SEQ ID NO: 21723 - DNA, 766 bp, Homo sapiens
  SIMILAR (1)..(24): 1001254mologous to Homo sapiens myo-inositol 1-phosphate synthase A1,accession number AF220530,Smith-Waterman Score=42.
agcggccgcaaggaggccaactactaacggttcgctgactcaggcgggcaccgtgagcctgggcctggacgccgagggccaggaggtgttcgtacccttcagcgcggtgctgcccatggtggcgcccaacgacctcgtgttcgatggctgggacatctcgtcgctgaacctggccgaggcgatgcggcgcgcgaaggtgctggactgggggctgcaggagcaactgtggccgcacatggaggccctgcggcccccggccttgctgtttacatccccgaattcatcgcggccaaccagagcgcgcgcgcggagcaaccctcatcccaggctcgcgtgcgcagcagctggagcagatccgcagggacatccgagacttccggtctagcgcggggctggacaaagtcatagtgctgtggacggcgaacacggagcgcttctgtgaggtgattccaggcctcaacgacacagccgagaacctgctgcgcaccattgagctcggtctggaggtgtcgcccgtccacgctctttcgccgtggccagcatcctgggagggctgtgcctttccttcaatgggtctccgcagaacaccctggtgcccggagctcttgagctcgcgtggcagcaccggattcttgtgggcggagatgacttcaagtcaggccagaccaaagtcaagtccgtgcttgtggacttcctcattggctccggcctcaagaccatgtccatcgtgagttacaaccacctgggcaacaacgatggggagaac

SEQ ID NO: 21724 - DNA, 2259 bp, Homo sapiens
  SIMILAR (1013)..(1165): 541254mologous to Brassica napus myo-inositol 1-phosphate synthase,accession number U66307,Smith-Waterman Score=159.
atggaaatcgtggatggttttcaccgccatgaaattggtaaaggctcatcatcgattaaaattacgcttaaaaggttatttgccggtgacctgtctggaaggtacgcgtaatcaacgcatcgccgcgactattcgtcataatcgcgctcgtggacgccatcaaatcaccgccatgtcggaaatcgtccgtgaacttagccagttgggatgggacgataataaaattggcaaagagctgggaatggacagcgacgaagtgctgcgcctgaagcaaattaacggcctgcaagagttgtttgccgaccgtcaatattcccgcgcctggacgctaaagctggcgcaggcgttcagctgctgccagcaacgtcgattccttcttggcaaaacagagacgaatcagtttatgtgggaagggatcggcgcaaaacaccgacagcggaatcgccgctacgccgtgctcctgcgtcagccactggcaaaactcaacatcatccaggctcggtaccccaatcaacatcgtcagcacgccggagagtgcaatccccactgccaggctggtggcgatatcgttgatcggtgtcccgcgcgatgcttcaccaagggtgatagtaaggatggttccccaccacaagccacctggcccttccataatagcgcgacgatgaccgcaaaacgcctgagcgaagcaagccagtgcggtagcaagaaaagcatattgcgtgagcgaattatctatcgtccgtcgattactcgatatccctttcaatcaacaatgaatcatccccttccggagcagacattgggctgtattgccacggattatggtagctctccatcgcctgatagatcacctgggccagctcattattactggacggatcatagcacagcaaatattcggtatcaggtagcggcggaagagaatggagagtacacatatgtggaaagagtgaagatacccttggatcatgggaccttgttaatcatggaaagagcgacacaagctgactggcagctggagcagatccgcagggacatccgagacttccggtctagcgcggggctggacaaagtcatagtgctgtggacggcgaacacggagcgcttctgtgaggtgattccaggcctcaacgacacagccgagaacctgctgcgcaccattgagctcggtctgggaggtgtcgccctccacgctcttcgccgtggccagcatcctggagggctgtgccttcctcaatgggtctccgcagaacaccctggtgcccggagctcttgagctcgcgtggcagcaccgggtttttgtgggcggagatgacttcaagtcaggccagaccaaagtcaagtccgtgcttgtggacttcctcattgggttccggcttcaaagaccatgtccatcgtgagttacaaccacctgggcatacaacgatggggagaacctatcggcgccattgcagttccgctctaaggaggtggtccaggagcaacgtggtggacgacatggttgcagagcaaccccagtgctctatacgcccggcgaagagcctgaccactgcgtggtcatcaagtatgtgccgtacgtgggtgacagctagcgcgcgctgggatgagtatacctcggagctgatgctgggcggaaccaacacactggtgcttgcacaacacgtgtgacggactcgctgctgggccgcacccatcatgctgggacctaggcgctgcttgaccgagctgttgccagcgcgtgactttcttggcacttgacattgggaccccgagccgcagacctttccaccccgtgcttgtccctgctcaagctttcttcttcaaaggcgccaccttaagtccgcccggcaagcccggttggtcaatgcggctttttccgccagcgcagctgcaatcgagaacattcctcagggcctgcgtggggctcccgccacagaaccacatgctcctggaacacaaaatggagcgcccagggcccagcctcaagcgagtttggaccccgtggctgccaccctaccctatgttgaacaagaaagggcccggttcccgctgccaaccaatggctgcaccggttgatgccaatgggcatctgcaagaggagcccccaatgcccaccacctgacggccccggtcacacagtttcttcggctctttcttcccgcttgccccccacggaccctacctttgaaggcccccacaaataaagggcgctgccacttcagccctccttccacctggggttcttggggcctgtgacct

SEQ ID NO: 21725 - DNA, 1908 bp, Homo sapiens
  SIMILAR (727)..(1275): 981254mologous to Escherichia coli OrfB protein,accession number X55034,Smith-Waterman Score=900.
atggactacatggtaccagtgggaatggactggctgtgcagagagactgcaggcatgcgagtgtccatcaagaaagggtctgttgtttttcctcttaaccctgaattggtcatgaaagtagttaggcaaagatccacaattgtaaccccttctggcttcaaagccggagcttttaactttgaacgcttcaaggaagcatcaaatcagacactggggagcacatttctatattctctaagctgtcctaagcctaatcttggatcccagcctctggactttgataccaaaaaatcctatacgctaaaggtagaggcagccaatgtccatattgacccacgcttcagtggcagggggccctttaaagacacggcgacagtcaaaatcgtggttgaagatgctgatgagcctccggtcttctcttcaccgacttacctacttgaagttcatgaaaatgctgctctaaactccgtgattgggcaagtgactgctcgtgaccctgatatcacttccagtcctataagactctacagaatccccggggacgatgccaaatgcgttcaattcaaccgtgaaggcgtgaaagcactgaaagccaaaccggttgaaaaagccgcgccagcacccgctgccgcagcaccaaaagcggctccaactccggcaaaaccaatgggggaacagctagcactctacaggatggccgggtccaatgccgatcgaattcaaggtcgtatggacccaacccgtgggcagtcagccgctgaatggctacaaaccgcagaagaagccgatatcgcctgggtattgaaaacctatggtgaagagcgttttgccaaacgcattgcccgcgccattgtcgagcgtaaccgcgaacagccgatgacccgcaccaaagaactggcggaagtcgtggctgctgcaacgccggtgaaagataagtttaaacatcccgcgacccgtaccttccaggcggtgcgcatttgggtaaacagtgaactggagaagatagagcaggcgctaaaaagctcgctcaacgtgctggccccgggtgggcggctttcgatcatcagcttccactcgctggaagaccgtattgtgaaacgttttatgcgtgaaaacagccgcggtccgcaagttccggcagggttaccgatgactgaagagcagctcaaaaaactgggtggccgtcagctgcgagcactaggcaagttaatgccgggcgaagaagaggtggctgagaaccttcgtgcccgtagttcagttctgcgtattgcacagcctgttggcagctttgcctgcagcttatgtcaaccgccatcccgggcagtaaaaagacgtaaactttcccagaatcctgccgatattatcccacaactgctggatgaacagagatggaaggatgatgtcgtgcttatcttattaggttacctggttgttctcggtacagttttcggcggttatttgatgaccggtggaagccttggagcactctatcaacccgctgaactggtgattattgccggtgcagggattgggtcgtttatcgtcggcaataatggcaaagcgattaaaggcacgctgaaggcgctgccgttgctgtttcgtcgctccaaatacaccaaagcaatgtatatggatctgctggctctgctttatcggttgatggcgaaatcgcggcagatggggatgttttcgctggaacgtgatattgaaaatccccgtgagagcgagatcttcgccagctacccacgcatcctcgcggatagcgtcatgcttgattttatcgtcgattatctgcgcctgattatcagcggtcacatgaacaccttcgaaatcgaagctctgatggatgaagagattgagacgcccgaaagcgaggagaaatcccccggaacagtctggcctggtcgg

SEQ ID NO: 21726 - DNA, 1833 bp, Homo sapiens
  SIMILAR (289)..(1083): 981254mologous to Escherichia coli glucose-specific enzyme II of phosphotransferase system,accession number J02618,Smith- Waterman Score=1328.
atggggtttcgccatgttggccaggctggtctcaaactcctgacctcagtctattattgtgcaaaaatccaacaatccaacaacaatgtcaaggtcagagtgtcgtcatggtgtatcttgagtagggaggaggtgaaagctgctggagttgaggtccaagagagaggctggcatgttggagagatcatcatccaggatggtgacttgctctcagtgggctgctacaagaaacccggtagtggcgttgccaatttacggtttcatcgaacgttgcctggtaccgtttggctgaaccacatctggaacgtacctttccagatgcagattggtgaatacaccaacgcagcaggtcaggttttccacggcgacattccgcgttatatggcgggtgaccggactgcgggtaaactgtctggtggcttcctgttcaaaatgtacggtctgccacgtgccgcaattgctatctggcactctgctaaaccagaaaaccgcgcgaaagtgggcggtattatgatctttgcggcgctgacctcgttcctgaccggtatcaccgagccgatcgagttctccttcatgttcgttgcgccgatcctgtacatcatccacgcgattctggcaggcctggcattcccaatctgtattcttctggggatgcgtgacggtacgtcgttctcgcacggtctgatcgacttcatcgttctgtctggtaacagcagcaaactgtggctgttcccgatcgtcggtatcggttatgcgattgtttactacaccatcttccgcgtgctgattaaagcactggatctgaaaacgccgggtcgtgaagacgcgactgaagatgcaaaagcgacaggtaccagcgaaatggcaccggctctggttgctgcatttggtggtaaagaaaacattactaacctcgacgcatgtattacccgtctgcgcgtcagcgttgctgatgtgtctaaagtggatcaggccggcctgaaaaaactgggcgcagcgggcgtagtggttgctggttctggtgttcaagcgattttcggtactaaatccgataacctgaaaaccgagatggatgagtacatccataaaaaaccttctcgtccggacgcttcgcaaccggacacgcagacggatgaacaggattttttaactcgccatcctgatgcggttgtattcagccctaaaaagcgccagtggggaacgcaggatgatttgacctgcgcacagtggctctggaaaaaaatcatcgccctgtacgagcaggccgccgaatgtgacggcgaggtggttcgtcccaaagaaccgaactggacagcctgggcaaacgaaattcgcgtgatgtgtgtgcaggatggtcgtactcacaaacaaatgtgcgagatgtacagccgcgtcagccgcgatccgttttggtgccgtaacgtgctcagcccgtcgaaggtgcgggaaaaatgggatgagctttccctgcggttatcgccgtccgtcagcacgtacacagaaaaacgcgaagacccgtacttcaaagccagttacgacaatgtggaatacagccagatcccggcaggattcaggggacctgtgcgcaatttctatgtcggcactaacgacccgcgggtgattttgtgcctgcaccgccaggcggaagaactggagtccaggggcttataccgtcgtgctgcaacggtgtggatggcggcattccgtgaaagccactcccagccagaacgaaacaattttctggcgcgtcgtgaacggtgtttacggaaaagcagtaagcgggctgcatcaggtgaagagtggtatctctcagggaattacgtgggggcttaa

SEQ ID NO: 21727 - DNA, 1560 bp, Homo sapiens
  SIMILAR (58)..(591): 811254mologous to Escherichia coli OrfB protein,accession number X55034,Smith-Waterman Score=743.
atgttccagctaatgaaggcttcgtccggcggggaggcagcttgtatgcctgcaggtctgatggaaaactataaacatactacggtgctgctggatgaagccgttaatggcctcaatatccgtcctgatggcatctacattgatgggacttttggtcgcggtgcttggcgaagaggggcgtttgctggcgatcgatcgcgacccgcaggctatcgccgttggaagactattgatgatccgcgcttctccatcatccacggacctttctccgcgctgggcgaatacgttgccgagcgcgatcttatcggcaagatcgacggcattctcctcgatcttggcgtctcttcaccgcaacttgatgatgctgaacgtggcttttcctttatgcgcgatggtccgctggacatgcgtatggacccaacccgtgggcagtcagccgctgaatggctacaaaccgcagaagaagccgatatcgcctgggtattgaaaacctatggtgaagagcgttttgccaaacgcattgcccgcgccattgtcgagcgtaaccgcgaacagccgaatgaccctgaactggaggagatagagcaggcgctaaaaagctcgctcaacgtgctggccccgggtggtggcgtttcgatcatcagcttccactcgctggaagaccgtattgtgaaggttttatgcgtgaacaccagttttgtgttgtcgtgcgttctggagtcggtctcaaaacatgatccgtcagataaaaaaccttctcgtccggacgcttcgcaaccggacacgcagacggatgaacaggattttttaactcgccatcctgatgcggttgtattcagccctaaaaagcgccagtggggaacgcaggatgatttgacctgcgcacagtggctctggaaaaaaatcatcgccctgtacgagcaggccgccgaatgtgacggcgaggtggttcgtcccaaagaaccgaactggacagcctgggcaaacgaaattcgcctgatgtgtgtgcaggatggtcgtactcacaaacaaatctgcgagatgtacagccgcgtcagcgcgatccgttctggtgccgtaaccccgtcgaagctgcgggaaaaatgggatgagctttccctgcgcttatcgccgtccgtcagcacgtacacagaaaaacgcgaagacccgtacttcaaagccagttacgacaatgtggactacagccagatcccggcagattcagggggttactcacggcagcgcgttctgcagtcagcaagcaagttacgtcagagtgggcgtgtggctcaccgttgtgaaggagatacacacagacatttcccgcgcctgactgagagagcgcaggatccggaaccacaaccagttcgtgaaaccagacctgtgcgcaatttctatgtcggcactaacgacccgcgggtgattttgtgccgctttcatgcctgcaggtccttgctcgtcgcccgctattcccatccgccgctagaccccactattccccactgtttccctactgaagccctgctgtacccccatcaaaacctgctgtaccccatctga

SEQ ID NO: 21728 - DNA, 1881 bp, Homo sapiens
  SIMILAR (670)..(1299): 981254mologous to Escherichia coli agmatine ureohydrolase,accession number U28377,Smith-Waterman Score=1102.
tcagaatttgtggcgggccgccgtggcttgtgagttgggcccttgggtgaaaaaggggaagccggggaagagaagggacacgggatgaatcgcgttacgaatcacctgccggaatgcctgcgcgagcgaatgactcaggcggcgattgcggtggtagaagatccgtttgagatccgtcttgagcgcctgaacgaagagtatttcttgcgtatgcatcatgattttacccacgcgtacggcgacgaacagggctggcaggagtattgcgaatacctgcatcacggactttcggcgattaagcgtcgggcttgggggccttgatcccaaaatggggccccgggggccgttaaaagtgagagaagccggggaatacgcttccacctgcacataatagatttttccggtgcgtttacccggctgggttaaacgcgcctgcaacgcgccgttattggtcagcaccagcaacccttcgctatcgcggtcaaggcgacctgctgcataaacaccctgaaccgggatgaattcttttaatgttttgcgtccggcttcatcggtgaactgcggaagaacatcgtagggtttattgaacaggatcacacgcgtgggctggttttcaggttgacgcctggtagaacgttgcgagctgaatcgcttaacctggtgatttgcctgccgatgaacttccagccgtatgacagcgatgcagactgggtgattactggcgtgccgttcgatatggccacttctggtcgtgcgggtggtcgccacggtccggcagcgatccgtcaggtttcgacgaatctggcctgggaacacaaccgcttcccgtggaatttcgacatgcgtgagcgtctgaacgtcgtggactgcggcgatctggtatatgcctttggcgatgcccgtgagatgagcgaaaagctgcaggcgcacgccgagaagctgctggctgccggtaagcgtatgctctctttcggtggtgaccactttgttacgctgccgctgctgcgtgctcatgcgaagcatttcggcaaaatggcgctggtacactttgacgcccacaccgatacctatgcgaacggttgtgaatttgaccacggcactatgttctataccgcgccgaaagaaggtctgatcgacccgaatcattccgtgcagattggtattcgtaccgagtttgataaagacaacggctttaccgtgctggacgcctgccaggtgaacgatcgcagcgtggatgacgttatcgcccaagtgaaacagattgtgggtgatatgccggttacctgactttatataactgcggaggaccgagctgacagtttcattcgcttcgacccgctcaatcacctttggatcgatgccgtgcccggtatctcgcaccgcaatgcgtacccgatttccgcactctgcaacgctgatggtgacaacgcctttacctttgcaaggctgaataccgtggacaatggcgttctccaccaacggctggatcagcaggctgggaatgcagcaattcacctcttcatcaatatcatagataaccgtcagcttgtcaccaaagcgggcctgctcaatggcaatatagtcgtttaaattttgatacagctcttttttgatatcgatttgctcatcgtcttttaattcaatgttatagcgcagataacgcgacagattaaagatcaactggcgagcggtatccggattcagacggattgacgatgaaatagcgttcagagcgttaaacagaaaatggggattaattttgctttgcagccgcccgaagctctgccttatttccatttcacgtagctgctcggcgcgtgaaacctccagttgcgtggagatgatttgcgacaggggatcctctagatcgacctcaggcat

SEQ ID NO: 21729 - DNA, 1842 bp, Homo sapiens
  SIMILAR (1177)..(1326): 391254mologous to Homo sapiens copine I,accession number AF314092,Smith-Waterman Score=85.
atgcagactttctttttctatccctttgaaagcctgctcagggtggacaagactggtgggacaatggcctggcacccgaacaggagggagtgcaaggcatgggaccaggtccctttccctggggaggaggctctgactgagcttgtacaactgacatccctcagccagtgcgacttcatccattcacagagcacgatgagcctgcacagcccaggcactgaccaggcacggagagaaggatgtgaactagacattgccgaccatcatcagtaccataccccggcatccacacaaaaggtgaacgcacactttcaaaagaggaggcatcacagcgagcctggcaaaaccaaaaatgtgtcaatcaactatgagggcctgaagaccaccaaagataactgctactgggaaggtctcccatggtttgccatcaacttcaaccccaccaaccccttctgctcagctttgagggattcatccttcattcttgggcaaggagaggaggcaatgcacccctctagtgtgaaggtgatcttgggcacactgaaggccaaggtcaatcggcatcatgtcccaggaaagggagacagaatttcggacccagggttgctggtaaacttcttggatcctcttcctgcctactttttcccccatgagcggctgacgggcccatttggtgctaggtgtgccctgaccctggcccgagtcccgccccacttccggcgacgtaatccatccgaggagctcttcctccccgggagcccgatggaaatccggatacctaaaacgagccggagagacttgattgggccattcacgcctcaggatgaggctagcgtggcacagtggcttacacgattgtccctacgctttgagaaccacgatccctgcaagtccaaacacctcaagttagaacccttccattatactttcctcagcatggaatggaagcagacaggcaaaactgttctgctgaaggtatacagctggaagaagctgactggatttgaggtaactgcctgtggggagttacacttggaaatgacagatctgagatggaagagacctccgggcactgacgatccatccccttccttcggacagggaaatattatgcccagtttacagatagggcaactaaggcagcaggaggaaacaagcaaagcagcggacaagcggcaagaatttcaatgcagcaaaagagaccttggccaaagcttgctggcggagctgccccaacaagttgtgcagtatttcaagcataaaaactgccccccaccaactcggagcccgcctgagctccagtgcccagcagcacatgctcaggcccagtttatgaaaccagacagaggacccctctctgaaagttcagccccgatccaggtccctcctttattccacataacacctctttctcctttatccacctgctcccgcttggacctccagatcacttcctcaggtgtggtggccgtggtccccacatcaggcttcatgtgggggcagatccagccatctctgctgtctgccccttcttgcctaacggtgggacctctttgggaagtcagacccctttctggagttttaaagccaggagacgatggcaagtggatgctggtccacaggactgaggtggtgatcaagtacacactggacctgtgtggaagccattcacagtgcccttggtgtccctgtgtgatggggactggagaagcccatccagctggagttcagtgcatcaaccccaagaagcagaggaagaagaagaactataaaaactcggcatcatcatcctgcgatcctgcaagccctggccaggcttctccagagtacgtgctgcggtga

SEQ ID NO: 21730 - DNA, 672 bp, Homo sapiens
  SIMILAR (472)..(522): 941254mologous to Homo sapiens Human secreted protein, SEQ ID NO: 7336,accession number G03255,Smith-Waterman Score=85.
atgcgttggttggtgtcaccgattgaggacacaggacacaaagcacttctgtttgcttgtcttgcattgcaccgggcctgcgtgagtggtcattgtctgagccctaagtgcgtgggcgttgacggtcggtcccacgaaatggttgcccctggactgtttctcgactggctacttgacgggacgggggtctgggacgggaccagcactaatgtggaaggggcccaggaacatgcagtactcatcctcctcatcatcacggacggggtcatcagtgacatggaggagaccggcatgccgtggtgcaggcttccaagctgcccatgtccatcatcatcggggcgtgggcaatgcggacttcgctgccatggagttcctggatggggacgccgcatgctgcgctcccacacgggggaggaggcagcccgcgatattgtcagttcgttccctttcgagagttccgcaacaatgtcagaggaggtttatgaccctcgatctctatatgaaaggctacaggaacaaaggacaggaagcagcaggactgcccgacaagaagctgtggtgggctccaaggtcacagtgagccaacctggacacagacaggagacgacagttttggaacatctagtccagtatgtgggattcagtatctgctgcaaggagcttatggtgtag

SEQ ID NO: 21731 - DNA, 2514 bp, Homo sapiens
  SIMILAR (1196)..(831): 451254mologous to Escherichia coli PENICILLIN-BINDING PROTEIN 1A (PBP-1A),accession number D90882,Smith-Waterman Score=172.
ctgttgtcgatccacggaatcaggctaccgccagcggcacgccaaagttatccaccggcagctcaccgctacgggtaaggttgtgactttgcgttcgatatcgagaatagcagaggacggggtcggagttcatctgccacatggccatacagatggcccatctgggttaataaccacgcatatgtcgcgcaccaccgccggaagcggcctgggtcgccggagtgaatttcacgttcagcaacgtaccgttaacagcagcgtgttatcgagcttactgactgacttcagtaccgctgttggccttgtgcgtcctggcccagcatgggtgacaagccgccgtctgccagctttctccggcaaaacgaccgtctggcgtcgcgccaaccaccgatcccaacggaccgcacacgctaggcgtataagcggcgatagtgcttgccaaggtcgatataatgttggtgtgtacttccagagggccatcgggttctttccggcagattcgcactgcgcgacatggggcgacgcgcggcaaggcactatccggcaagggttcgcttcatcagccataatccggcgaatgatccacgccgcccccgacgacttaaaggccgttcaagcagcggatcgtcaggctgtaagcgcaatttgccgccttgccgtggcgagcaaacgcggtatacgctgccgccatatcttccattttgcaccagcgccgccgagaatgagtgaaagattcggcgcagcaccgtgggcaaatataacggcaatccaacattgcgtaactttgccgcaaaccgttcggtccataggcttccagcacctgcacagcagttttgcgccagttcttccagacgtcgttgaagaccgcatccaacgtagtagtgattttgtcgcttttgcttttaccgagcatcatcgcgaaaacagcggtgccagttgcggcatttgtcggggggccagccagagggttcttcccttgactcttttacctgctcacgggaccacacaccttgccggccatccgttcgagcactttattacgcgcggcttcggcacgctccggcaacgatccgggcgaagacggctgggcgcttgcggcaaaaccgccagcatgccgcctcggaatagcttaaattcgcaggcgattttccgagataagccaattgccgaacgatccctgcaagtaccgcaaagggacgcgtcgtcatcccagcttcatcatcctcttcagcaatctcttcaagctgctggcgatgataatctcccacatgaattcgactttctctggctgtttcgcttcttcagcctgcagaccgggttttcaatgataaagatccggctggtaattgttgtccagctcgctgataataatacgcgcgttttcaacggatcggtgccgtcaatcggatcgatatcgatgaggtgcaacaggacgggcaacgttccaggtgcttcaggaagcgaatgcccagacctgcgccttcgcagcgccttcaatcagtcctggaatatcggcaacaacgaagctcttttgttgtccattcgtaccacacccagacttggcaccagagtggagcccaaggccaatgccggggctcgagccccaggcaaggccgtgacccaaatggaggcttttaaacccgagccagagagtttcacgaacgccaggtacagtgcgatgagaataatcggcaccagggtaatgccgccgccatcggcatattgccaatcgccccctgctgggaataaacatattgccgataaaatatcctggaggaccaaccagctgcgggacgataaatcgcccagtgtgagtgagaagtgtcagcagcgagccgaaatagacaatgccaaacacattagcgggccaagcagcagtaaaaacagccccagccccggattatccagaagaaaccggacaccttacccagacctggacgtgaaggtgattgcatacattcatcgccattcacctctcctcaaccagcggcaccatcacatccgcgaccaggaaaccatcacctgttgtccgggccggaatttctctgatctcgctctggctacctacgccgacgagcattacggggtgatctggccgcgggacaagaagaaccgcttatcgccaactcatgggttgcggtgtataccgtacaaggatggggaaaattcttttaaagaatggcgaacaaataacactgcatggcaacttattatattcttaaagccaatggatattcactcttatcactgtgaaggcagcaaaagagaccttggccaaagctgtgctggcggagctgccccaacaagttgtgcagtatttcaagcataaaaacctgccccccaccaactcggagcccgactgagctccagtgcccagcagcacatgctcaggcccagtttatgaaaccagacagaggacccctctctgaaagttcagccccgatccaggtccctcctttattccacataacacctctttctcctttatccacctgctcccgcttggacctccag

SEQ ID NO: 21732 - DNA, 693 bp, Homo sapiens
  SIMILAR (211)..(648): 571254mologous to Homo sapiens copine III,accession number AF077226,Smith-Waterman Score=465.
ggggagacgatggcaagtggatgctggtccacaggactgaggtgatcaagtacacactggaccctgtgtggaagccattcacagtgcccttggtgtccctgtgtgatggggacatggagaagcccatccaggtcatgtgctacgactatgacaatgacgggggccatgacttcatcggcgagttccagacctcaatgtcacagatgtgtgaggctcgagacagcgtcccgctggaagttcgagtgcatcaaccccaagaagcagaggaagaagaagaactataaaaactcgggcatcatcatcctgcgatcctgcaagataaaccgagactactccttccttgactacatcctggggaggctgccagcttcatgtttcaccgttgggaatagacttttacagcctccaacggggaatcccctcgacccttcctctttgcactatatcaaccctatgggcaccaacgaatatctgtcggccatctgggctgttgggcagatcattcaggactacgacagtgataagatgtttccagctctgggattcggggcccagttacccccagactggaaggtctcccatgagtttgccatcaacttcaaccccaccaaccccttctgctcaggtgtggatggtattgcccaggcggtactcaacttgcctgccccacatccgcttctacggtcctaccac

SEQ ID NO: 21733 - DNA, 2895 bp, Homo sapiens
  SIMILAR (1694)..(2221): 621254mologous to Homo sapiens copine III,accession number AF077226,Smith-Waterman Score=563.
  misc_feature (1)...(2895): n = a,t,c or g
atgtacagccaggaaggaaatcagttctgtaataggacagactgccaggaactcctgccaccgccaccggctcccatggcccacatacccagtgggggtgccccagcagcgggggcagcccccatgggcccccagtattgcgtgtgcaaggtggagctgtcagtgagtggccagaacctactggaccgggatgttacctccaagtccgaccccttctgtgtcctctttacagagaacaatggcagatggatcgagtacgacaggacagaaaccgcgatcaacaacctcaaccccgccttctccaagaagttcgtgcttgactaccacttcgaggaggtacagaagctcaagttcgcgctctttgaccaggacaagtccagtatgcggctggacgagcatgacttcctgggccagttctcctgcagcctgggcacgatcgtctccagcaagaagatcactaggcctctgctgctgctgaatgacaagcctgcggggaagggcttgattacgatcgctgcccaggagctgtccgacaaccgcgtcatcacactaagcctggcgtgcaggaggctggacaagaaggacctctttgggaagtcagacccctttctggagttttataagccaggagacgatggcaagtggatgctggtccacaggactgaggtggtgatcaagtacacactggaccctgtgtggaagccattcacagtgcccttggtgtccctgtgtgatggggacatggagaagcccatccaggtcatgtgctacgactatgacaatgacgggggccatgacttcatcggcgagttccagacctcagtgttcacagatgtgtgaggctcgagacagcgtcccgctggagttcgagtgcatcaaccccaagaagcagaggaagaagaagaactataaaaactcgggcatcatcatcctgcgatcctgcaaggtgaaccagcgtgggcaagcacgagccaggggccaggtttcaggccacacagaagggacagacagagcactggatctggagccagcgaggcctgtgttcaaatcccggctctgccacatcctggccctatggccttctgagcttcacctcaccaggcctcagtctcctcatctgtggaatggagatattaacgaggcagagcatgtccagggttactcttctctcacattcctgtgtggaggccagggaaggcacgagctgaccttccagggcctgtcctggtgggagaattgtcattgcgagttgctgccgcccacggtgggcatgcaaggggcagaggacattgggtggggacaccctgtcctctctggcatcagcgtcactgtgactcccatgataaaccgagactactccttccttgactacatcctgggaggctgccagctcatgttcaccgttggaatagactttacagcctccaacgggaatcccctcgacccttcctctttgcactatatcaaccctatgggcaccaacgaatatctgtcggccatctgggctgttgggcagatcattcaggactacgacaggccacgctcatttctcaagcctgatccttgggcaggcactgaggctgtaacggggcagcacgttatgttctctgtttatgagacccatgtggagtgggggagacagataggattgccagatgtcgcaaatcaaaatacaagacacccagttaagtttgaatttcaggtctcccatgagtttgccatcaacttcaaccccaccaaccccttctgctcaggtgtggatggtattgcccaggcgtactcagcttgcctgccccacatccgcttctacggtcctaccaatttctcccccatcgtcaaccacgtggcccggtttgcggcccaggccacacaacagcggacggccacgcagtacttcatcctcctcatcatcacggacggggtcatcagtgacatggaggagacacggcatgccgtggtgcaggcttccaagctgcccatgtccatcatcatcgtgggcgtgggcaatgcggacttcgctgccatggagttcctggatggggacagcccgcatgctgcgctccccacacgggggaggaggcagccccgcgatattgtgcagttcgttcccctttggagagttccgcaacgcagcaaaaagagaccttggccaaaagctgtgctggcggagctgcccccaacaagttgtgcagtatttcaaggcataaaaaccttgccccccaccaaacttnggagcccgcctgagctccagtgcccagcagcagcatgtcagctgagcctcctgccctcccccaggaaaaaggaaggctaattatgtttccttgtgggtggccttttttttaccggatcccctttttttattttttacaacccggacctccacccccaactttcctccaagcccaagctgggtttccttttgtttgggagttcaactggttgatgcttccaaggccaaactggcttcctctcctcctctccccacctttgccattcttaagtattgaatgtactttgtataattttagtggaattgttattgagaataaaatttttacaatcataactggctttttccaagtaactagctgcagactctgatgaaagaaacatgtccttggtgcatacgtgtcgtagcctgcacctaattaattcctgctgtttttttaatactgtgactgtgttctatttgttatatgctcagggtaacaaatgagtttcagacgtccctgcgtcagctccttcctcagcagggacctgacgggctcactgatctaagaaaggaaatggaaaatgaaaatccaccccacaagtctaataagttggtgtagtcacttctgcatggggacatgcattccagatgataacctgttaaatcactgccagttaacagtg

SEQ ID NO: 21734 - DNA, 984 bp, Homo sapiens
  SIMILAR (630)..(325): 971254mologous to Escherichia coli yejE,accession number U00008,Smith-Waterman Score=494.
ctatgtgtcccagcgacgttggactctagaggatagctgtttttccagggtatgcaatggatttaacgacaccatcggttcctgaaaaatcatggcgatcttattaccgcgtacaccgcgcaacgtttgatcgctggcgtgaagcagcgattcgccatgaaaacgaatatcgccggagagatattcaaccggcggggaagggagcaggcgtaaaattgacagcgcggtaacgcttttgcctgaacctgactcacccaccagcgccagcgtttcgccagcctcaatctgtagtgaaacatcattgactactgtacgtacggtttgcgccttattaggatcaaatgcgtcgcggacggcttcaccaataaagatcagcaaagacaataatatcgccaccgacaagaaggcggtgatcccaagccacggggcctgaaggttatttttcccttgtaacagcagttcaccgagtgacggtgaaccgagcggtagaccgaagccgaggaaatcgagcgaggtcagggtggttatcgaactacataaaataaacggtaaaaaggtgagggtcgcgaccatggcattaggcaacatatgacgcaggatgatactgcgatcgctgacgccagcgcttttttctagagttgctggcagccgtcttttctctggtttacagccattggtaagaagcacacatgacaacctggactttccatcaacattgaagcgggagcggtaccgaggccgttcgctcgccgctactgggggaatctcggttgatttcttttcctcggggtacttagatgtttcagttcccccggttcgcctcattaaccgccgtgaaagggcggtgtcctgggcctctagacgaaggggacacgaaaattgcttatcacgcgttgcgtgatattttcgtgtagggtgagctttcattaatagaaagcgaacggccttattctcttcagcctcactcccaacgcgtaaacgcat

SEQ ID NO: 21735 - DNA, 1371 bp, Homo sapiens
  SIMILAR (358)..(690): 971254mologous to Escherichia coli K12 putative fimbrial protein,accession number AE000322,Smith-Waterman Score=555.
atggtggaagagtattccggcgttacgctggacaagagtgaatcgcgcaccgactggctggccagaccgctgaccgaacgtcagtgtgaatacgcagcggcggatgtctggtatctgttaccgatcaccgccagcagcggtcaggcatttaccgtcaataaccctacgccgtactacgtgattatcagcaacgccagtgcgcagaaaaacggtaatccagctgcagggttctcgcctctggtcattgagccgaaaaccacggtaccgctgaatgtgaaaatggatagcgtaccggtgctgacttacgtcaacgactttggcgcacggatgccgctgttcttccagtgcaatggcaacagctgccagggcagccaggtagagttcggcaatatgattgctgataacgttgatggcaccaattatcggcaagatgcgaaatacacgttgaactgcacaaacagtcttgctaacgacttgcggatgcaacttaagggcaatacctcaacgattaacggcgaaacggtactcagtaccaatatcaccgggctgggcattcggatagaaaatagcgccgataactcattgtttgccgtcggtgaaaatagctggacgccatttaatatcaataaccagccacagttgaaggctgtacctgtgaaggcaagcggggcgcaacttgctgcgggcgacgccatagctcatgctgctgatgaagacatcacctttcacgggacattattgtcaccgccaacctgtagcatcagcggtggtaaaaccattgaagtcgaatttcgcgatctcattatcgacgacatcaacggcaactatggtcgtaaagaggtgccatatgaactcacttgtgactcgacgacccgtcatccagattgggagatgaccctcacctggactggtacacaaaccagttttaatgatgcagcaattgaaactgatgtacccggttttggtatcgagcttcagcacgatggtcagcgttttaaactcaatactccgcttgctatcaacgccactgattttacgcaaaagccgaagctggagaccgtacggtcgcttaacctcacaagccgaagatgtttctttcgattcatcatcgtgttgcgaaaatttgagagactcacgaacaactttgtgaccgaaaataactgttcttttggacactctctccgaacagattgtaacgatcaggcacccgcaggaattacaggtgctgatcatttctggtttggtcatacaccgttgcgacatcgcgtggatattggcaacctgcattatattgataccggtgctgtctttgggggcgaattgagagaagagaaactcatgattcccaaaattgtccagcttcctggctag

SEQ ID NO: 21736 - DNA, 564 bp, Homo sapiens
  SIMILAR (264)..(175): 731254mologous to Oenothera elata subsp. hookeri hypothetical protein,accession number AJ271079,Smith-Waterman Score=107.
atgtgctatcgagcatcagcagctcataaaacaaaaattgtgcgcaatgccgacggcaccgaatccgccagcgaacagctttaccaggtcgttggcgcagggtgcaagatgccctggcagtcagaggcgatgaaggacgtgctaatctgcgataagcgtcggttaatgaggcgaaccgggggaactgaaacatctaagtaccccgaggaaaagaaatcaaccgagattcccccagtagcggcgagcgaacggggaggagcccagagcctgaatcagtgtgctaatactcctgatgaccgatgtgaccagtacggggggacagcgaaaaaaacggggcaggcgttgcacaaactgtacgggcaagaccgcggggaccacccaggggaagggaacccgggaagggccgcaaatatcgacaagagatcccaaaggaccagggaacacttaggggcaacgcggaaaccaacgcgttacagagaaggggtccatgggaccacaatgaccacaaggcggcacaccggaaggtcctatgcaaaaataaactgtcaggttgtgatagcatag

SEQ ID NO: 21737 - DNA, 726 bp, Homo sapiens
  SIMILAR (120)..(320): 381254mologous to Sulfolobus solfataricus suppress-overlaps with RNA,accession number AL512966,Smith-Waterman Score=86.
tcccctattcgggtaaccttgctacagaatataagtcgctgacccattatacaaaaggtacgcagtcacacgcctaagcgtgctcccactgcttgtacgtacacggtttcaggttctttttcactcccctcgccggggttcttttcgcctttccctcacgggactggttcactatcggtcagtcaggagtatttagccttggaggaatggtcccctcatatttcagccagggattgcacgtgtagcggcttactcatcgagctccccagcacgggcatttttgtgtacggggctgtcaccctgtatcgcgcgcctttccagacgcttccagtaacacacgcactgattcaggctctgggttgctccccgtatcgctcgccgctactgggggaatctcggttgatttcttttcctcggggtacttagatgtttcagttcccccggttcgcctcattaacctatggattcagttaatgatagtgtgtcgaaacacactgggtttccccattcggaaatcgccggttataacggttcatatcaccttaccgacgcttatcgcagattagcacgtccttcatcgcctctgactgccagggcatccaccgttgtacggttagtcgcttaacctcacaacccgaagatgtttctttcgattcatcatcgtgttgcgaaaatttgagagactcacgaacaactttcgttgttcagtgtttcaattttcagctt

SEQ ID NO: 21738 - DNA, 5962 bp, Homo sapiens; identical to SEQ ID NO: 18152
  SIMILAR (5960)..(4521): 971254mologous to Rattus norvegicus synaptic vesicle protein 2C,accession number AF060174,Smith-Waterman Score=2505.

SEQ ID NO: 21739 - DNA, 1830 bp, Homo sapiens
  SIMILAR (513)..(37): 981254mologous to Escherichia coli TrkG protein,accession number X56783,Smith-Waterman Score=805.
ctatccaactgaatacccgtacagtagttcatcattcctgctaataacaatataccaaagagtgaagttgaaagccgatagcagggaaaaagaaccagccaccagcttatccaaatagttattaaaatatccgatactctcgctatgagttgagaaaccaccaagcgaaactgtggaaatcccgtgacaaatagcatcaaacaaaggcattcctgcaagtctataacagacaatacaagcaatacctaataaagaataagttatccacagtgtccgtgacgtatcggccaggcggggagtgagtttgtcatccttaaatggccccggcatttctgactgataaagctttgcaccaccaatacccaataatggcaatacagcaaccgccagaacaataactcctaaaccacctataaaatttaactgtgaccgatagtacaaatatgcccgaggtaatgaactaacatcatcaattacagttgctcctgttgttgttattccagaaaccccttcccctgtgggaaaataaaacctcttaaggggggcctgatagttgcattgccattcatgatgatcccctggcattcgtccattcagccattcaccattcacccattcaactggaattttggttgaatgccggaattgtgtccacaaattgtggatggatagttggttggctggctggatggctggctggatggctggctgatagttgcattgccattcatgacgatcccctggcattcgtccattcagccattcaccattcacccattcaactggaattctggtagaatgccggaatagtgtccacaaattgaggatggatagttggttggctggctggatggctggctggatggctggctgatagttgcattgccattcatgatgatcccctagcattcgtccattcaggcattcaccattcacccattcaactggaattttggttgaatgccggaattgcgtccacaaattgtggatggatagtgggatggctgactggatggctggctggatgactggcttgataccagctggagcctcctgtaataaggaacttatgacccctgtttgggagtctctcccattaagggagaccggggcaaggaacggcttttggaggatcttgtcaataacaaaacgttgcactgtctggggaatcccttgtaagtgtgcaagtagttcatcagtggtaaagtaaaatattaacactttaccgacggccagaataaccggcagcatggttgcggtgtgcgcagacaggctggcaaacaggtagtgtgcaaagtagaacaccagaaccagtacaatcaccgttgcgtttggtgagaatccttccaggtgcgtactcatggtaccggcgaaccagtcaataaaaccagaacgagtcaggccgttagccatcacaaccagagttgccaggttgaccagtgtgttccatgcgctgttatagcgggtaatgtctttccaaggcacaacgtgcagggccagcattagcgaaactgccagcagaccaaccgcagtagcattaatgacttcactgccaaatacccacaaacctgaagctgagtcaggagcagacgacatgactgctcgctgggaaagagattgctgagagttgcattgccattcatgatgatcccctggcattcgtacattcagccattcaccattcacccattcaactggaattttggttgaatgccggaattgtgtccacaaattgtggatggatagttgtgtggctggctggatggctggctggatggctcgctggatggatggagaatggctggcggcggctcggctgctttgaagcat

SEQ ID NO: 21740 - DNA, 942 bp, Homo sapiens
  SIMILAR (942)..(364): 1001254mologous to Escherichia coli, K12, Peptide, 378 aa AppB=cytochrome d oxidase, subunit II homolog,accession number S63811,Smith-Waterman Score=1024.
ctgccagctaaggttattaagaatggggcgatcgttataagaaaccacgccattgttcagcacaatgcgcggttcgttggcgggtaaggcgtgacgtgctgaaggttcatccggctccggcagttgcacaccttcaagctgttcactatcgccagttgcgcgacgagtgcttgttggagcagttcctcttgactcaccccgtttgttcttgatccgtttgcgattcgccagatcgacgcggtactggcgactcacgatcacaacgatcatatcgacgttaacgtcgctgctgccgtgatgcagaattgtgccgatgacgtaccgtttatcggaccgaaaacctgtgtggatttgtggattggcaacagttttcagttgtaaccagacgccaccttgcaaaatcaccatcccaaggctgagcaatccgcacaataaagggaatggcgtcagcagttgccagaagctgccgagatactccacgcgtaattgcggtgtgaaggcaaacggcacgccgagcaacaagttgccgaaggcgataccgaagactaccggcggcaccagactgccgatgaccagaccggcgtcccacattttacgccagcgtgcatcggcgatttttccgcgataatcaaaggccagcgggcggaagaacagtgagcacagcaccaggatcatcgccacataaaagccggaaaacgccgctgcatacactctgggccaggcggcaaataatgccccaccagcgaggatcaaccagacctggttgccttcccagtgtgcaccaacgctgtttatcactatccggcgttcatcatcattacgcgccaccagcggcagcagacagccgatccccatgtcaaatccgtcggagatcataaagaccaccaggatcacgccaatcagcagccaccagatgaagcgcaatgtttcataatcaaacat

SEQ ID NO: 21741 - DNA, 1522 bp, Homo sapiens
  SIMILAR (961)..(1521): 1001254mologous to Escherichia coli RNase PH,accession number L10328,Smith-Waterman Score=948.
atgctgctggcatgggcgctgcttcccggcgtccatgagtttatcaatcgcagcgttgcggcgtttgcccgcgtggaccaacagggtatagaacgctttattcagtcttacggcgcactggcggcagttgtctcgttcttgttgatgattttgcaggccattgctgcaccgctacctgcgtttttgatcacctttgccaatgcgtcgctgtttggcgcgttctggggcggcttgctgtcgtggaccagttcgatggccggcgcggcgctttgcttttttatcgccagagtgatgggccgcgaagtggtggaaaaattaaccggcaaaaccgtgcttgacagtatggacggctttttcactcgctacggcaaacacaccattctggaacagcggatcgcccattaccgggcggttgagcagccaggaagaactgaccggatagcggctcatcacatccacttcggcgtgtggattgagaatgttgatggcatcaagtcccgagcacagaaccgtaggtcggataaggcgttttacgccgcatccggcaaccgttgcctgacgcgacgctgtgcgtcttatcaggcctacaagcggaacataaccgtaggtcggataaggcgtttacgccgcatccgacagccgttgcctgagtgcgacgctgtgcgtcttatcaggcctacaaaccggaacataacctcgagctatcacgaatcctgggttttagaagaccgcattattaaagatggttcttacaacatcgatcagggcgttggtgtgcgtgcaatcagcggtgaaaaaaccggattcgttacgctgaccaaatcagcctgtgcgtggaacagagtcgcaactgcgcgcaccatcgtccgtgatagtggtgatggcgagaacgaatacgctcgcgaacgacaggttcaaggctacggaactgctccggcagacgaaaccggagatttcaatatgcgtccagcaggccgtagcaataatcaggtgcgtcccgttaccctgactcgtaactatacaaaacatgcagaaggctcggtgctggtcgaatttggcgataccaaagtgttgtgtaccgcctctattgaagaaggcgtgccgcgcttcctgaaaggtcagggccaaggctggatcaccgcagagtacggcatgctgccacgttctacccacacccgtaacgctcgtgaagcggcgaaaggtaagcagggtggacgcacaatggaaatccagcgtctgatcgcccgtgctcttcgcgcggcagtagatttgaaagcgctgggtgagttcaccattacgctggactgcgacgtgcttcaggctgatggtggcacgcgtaccgcgtcgattacgggtgcctgcgtggcgctggtagatgcgctacagaagctggtggaaaacggcaagctgaaaaccaatccgatgaaagggatggtagccgcagtttctgtcggaattgtgaacggcgaagcggtttgcgatctggaatacgttgaagactctgccgcagagaccgacatga

SEQ ID NO: 21742 - DNA, 5145 bp, Homo sapiens
  SIMILAR (2515)..(3093): 1001254mologous to Escherichia coli yjjJ,accession number U14003,Smith-Waterman Score=989.
atgctgacatatcgcagtgttgaaatagacatcgatggagagaggagacgaaaaaatcagtccgcctttactcatgtgctgctgctgaaaagcccacaggagatccgcccaaccatcgacacacaaaaggcgttactactggtgcgtttcccggctgacttctcgcgcaaactggataccttccagaccgcgcctttgcagttgatcctcgacgggcgtaactccaacagtgcgcaaattgccgccaactacctgcaacagatcgtcaaaaattatcagcaggagctgctggaaggaaaaccgaaacctaacaacagcgagctggtggtacgcaactggtataacccgaatctcgactacaaatggtttgtggtgccgtcactgatcgccatgatcaccactatcggcgtaatgatcgtcacttcactttccgtcgcccgcgaacgtgaacaaggtacgctcgatcagctactggtttcgccgctcaccagctggcagatcttcatcggcaaagccgtaccggcgttaattgtcgccaccttccaggccaacattgtgctggcgattggtatctgggcgtatcaaatccccttcgccggatcgctggcgctgttctactttacgatgatggggaaacggtttagaaaggaccccggaaagagcaggcggagaaagctagctcggtaccatctctatcagttatcggcgtggccatcgccaggatgcggtacaacacgcccagcaattgctgaagatgatggggtacggcgtgtagcgtttcacctctttcaccaactgtgccgcaaccacctcggcactgacgcgcttttcaccgacgacaaaaaagcgttcggtgatattttcactttcgacttcaagcgagacggtattacccggcccctggtcgcgcggcagggttatgtcagtaccgaagagctggtagagcatttctccgtcagcccgcagactattcgccgcgacctcaatgagctggcggagcaaaacctgatcctgcgccatcatggcggtgcggcgctgccttccagttcggttaacacgccgtggcacgatcgcaaggccacccagaccgaagaaaaagagcgcatcgcccgcaaagtggcggagcaaatccccaatggctcgacgctgtttatcgatatcggcaccacgccggaagcggtagcgcacgcactgctcaatcacagcaatttgcgcattgtcaccaacaatctcaacgttgctaacacgttgatggtaaaagaagattttcgcatcattctcgccggtggcgaattacgcagccgcgatggcgggatcattggcgaagcgacgctcgattttatctcccagttccgccttgatttcggcattctggggataagcggcatcgatagcgacggctcgctgctggagttcgattaccacgaagttcgcaccaaacgcgccattattgagaactcgcgccacgttatgctggttgtcgatcactcgaaatttggccgtaacgcgatggtccatatgggcagcatcagcatgaacgatcaacaggtgacgtttaattatctgttagcgcaaggggagtaccgtatttccacattgctggcggtattgtttgctgcggggtttgctatcggttggttgatttgtggcctgttctggctgcgagttcgtgtttccctggcgcgcgctgaacccgctgcctatggctggtatatgggccgcagaagtgcgcaacaaaacaagcaagatgaagccaaccgcttgtcgcgtgattacgtagcgggggttaacttcctgcttagtaatcaacaggataaagcggtagacctgtttctcgatatgcttaaagaggatacaggcaccgttgaagcccaccttacgctcggaaacctgttccgttcgcgtggcgaagttgatcgcgctattcgcatccatcagaccctaatggaaagcgcctcgctgacctatgaacagcgtctgttggcgattcaacaactggggcgtgattacatggccgccgggttatatgaccgcgcggaagacatgttcaatcagctgaccgatgaaactgacttccgcattggcgcgctgcaacagttgctacaaatctaccaggctaccagtgagtggcagaaagcaattgatgcttgccgaacgcctggtgaagctggagaagatcgggtgattcgctttggtaaagcacgggcaacgcgatatgcactgctgcgtccttatcgcggaattgagcgtattcccgtctggcgggtggacgataccggaaaggcgcataaattcgccgacatccggttgtgctggccgcagggaagttgtctggaagaagatgtgctctacgccctgaccgtatttaacggtgaatatactggcggttggttggtcggggaggggaattatcagcgatggattactgcacaacaccctgcggaaattcctctggatcaaaaactcacccattacgaacagctggcaagtgatgcactggcaggagaaatcctaaccgcggtcagccaacgttggggtgacctgctaattgctgaatctattgccgcgcaaatcctgcgtgacggtgggatccacgccatcgagtcaacggtgcttgtaacaagtaacaggcaggtattcctcgaagcggaacgctttgactgcaaaggtaacgatggtcgcttgcctattgtgtcgctggaggcggtgcagagtgagtttatctcttctccgggatcgtggccgcaggcaatgcgccgtttgtgtgagcaacaacttgtcactcaccagagcgtggcgcaaacagaagtgatctgggcatttgggcgacttatcgccaacagcgatatgcacgcaggtaatttatcgttttatttatctgaaccgccatttgcgctgacgcccgtctacgacatgctgccgatggtctatgcaccaaacagcgctggaatgctgcgtgatgctgccattgaggtgaagtttgatcttaacgtcagtaaaagcgcttggttaacggcgatcccgctggcgcagcagttctggcaaacggtcgccagagatccgcgtatcagcgaggcgtttcgccacattgctgtcgactctagaggtcccccacaccgtgtggttgtactactaggtgcacactctggaagtccattctcgattggcggtaaccactggtggcggggaaatccacgctgcgactgcaaacgctgtcgcaaactggcccagcagatgtccacgctgtatgtcaccggcgaagagtcgctgcaacacggtcggcaaatgcgcgctcatcgccttggcctgccgactgacaatctcaatatgttgtcggaaaccagcatcgaacagatctgcctgattgccgaagaagagcaaccgaagctgatggtaattgactcgatccaggtgatgcatatggcggatgtacagtcatcgcctggtagcgtggcgcaggtgcgtgaaacggcggcttatttgacacgcttcgccaaaacgcgcggtgtggcgattgtcatggtggggcacgtaaccaaagatggttcgctggctggcccgaaagtgctggaacactgtatcgactgttcggtgcttttggatggcgatgccgactcccgttttcgcaccttgcgcagccataaaaaccgcttcggcgcggtgaatgagctgggcgtcttcgcgatgaccgaacaggggctgcgtgaagtcagcaacccttcggcaattttcttaagtcgcggcgatgaagtgacctccggtagctcagtgatggtggtatgggaaggaacgcgtccactgctggtggagattcaggcgctggtcgatcactcgatgatggcgaacccacgccgtgtggcatggggctggaacaaaagcgtcatgggaatcctgctggctgtgttgcaccgtcaaggtggtcttgaaatgggcgatcaagatgtgtttgtgaacgtggtcggcggcgtgaaggtgaccgaaaccagtggcgacttagagttactgctggcgatggtttccacaccgggcgaaagaacgctggcgcaggaacctgggacaaaaaaaaggcgactcatcagtcgccttaaaaatcagtttgccagcgccgccttctgcgtcgctacaatggattcgattccccctcgggccagagccaacaagatgagtagctcttcatgggtgaacggctcgccttctgccgtcccctgcacttcaatgatgcgcccgtcttcggtcatcactacgttcatgtcggtctctgcggccgagtcttcgacgtattccagatcgggggaaatatttctccagcgcgaggggcatatccaacaacaaatggggggaataaatgcccgcgcaaaagttgctggcttgatgatgcgccaggacgatagcgacacgctgaattctctgggcgtttttgtctgggcatggccggatggaccgcagttaatgtctgatcgtttaaaagagctggctaccgcaggttttactctaacgcagacgtatacccgtgcggtgaaaaatgctgatgaagttgcgcgcgtacgcaatgagtggtggaaagcggaattacccttcgtcaccgatggcgtagttgtacgagcggcgaaagagccagaatcccgccattggctaccgggccaggcagagtggctggtggcctggaaatatcaacctgtagctcaggttgccgaagtgaaggcaattcagtttgcggtgggtaagagcggtaaaatatcggtggttgcgtcactcgcacctgtcatgctggatgataaaaaagtccagcgggtgaatattggttccgtcaggcgctggcaggagtgggatattgcgcctggtgatcagattctcgtcagccttgccggtcagggtattcctcgcattgatgatgtggtgtggcgcggtgcagaacgtcaaaaccgacacgcagaaaaccgctttaactcgttgacctgctactttgcttctgatgtccgtcaggaacagtgcattccacgcttagtctggctgcggccaaaacaggtacttgggctggctgacatcggtgacgccgaacgccgcgcgctgcatcacagtcatcgctcagaacatatatcccactggctcacatcaaagcaaccctgcgcagtgtgtcagttttag

SEQ ID NO: 21743 - DNA, 1648 bp, Homo sapiens
  SIMILAR (140)..(733): 921254mologous to Escherichia coli K12 orf, hypothetical protein,accession number AE000491,Smith-Waterman Score=993.
aaaatctttccatataaaatcaacaacaccttccctggcaaaaagttcaaaaaatggtcattgcattcctgaaaaaatagtgtcaggattaatcaaaaccaatcacatattgattcgaattgaactatcataaaggtaaatggcgatgagtaaagtgaaaagtatcacccgtgaatcctggatcctgagcactttcccggagtggggtagttggttgaatgaagaaattgaacaagagcaggtcgctcctggcacatttacgatgtggtggcttggctgcaccgggatctggttgaaatcggaaggtggcaccaacgtttgcgttaatttatggtgcggcactggcaaacaaagtcacggtaacccgttaatgaaacagggtcaacagatgccgcccatggctggcgtgaaaaaactgcagccaaacctgcgtaccaccccgtttgttcttgatccgtttgcgattcgccagatcgacgcggtactggcgactcacgatcacaacgatcatatcgacgttaacgtcgctgctgccgtgatgcagaattgtgcagatgacgtaccgtttatcggaccgaaaacctgtgtggattcgtggattggctggggcgtaccgaaagagcgttgcatcgtggtcaaaccgggcgatgtagtacaagtgacagcacttgaaattcatgcgcctgatgctttcgaccgtacggcaccgatcacctggctggccgatcaaaagcggcggcgtaccgtcaaagggaggacgacgcgcccttgtaacaggtcagttaccgtccgtccacgccgccgcgatgctgttattggtcgcttttatcgtcatcagtctattactcaaaaaggccttttgctcatggttatgcccggttgtgcattccctttatggattgactcagaacttaatttaacgttcattgatgctctgtttgaaggggtttctggaataacaacaacaggagcaactgtaattgatgatgttagttcattacctcgggcatatttgtactatcggtcacagttaaattttataggtggtttaggagttattgttctggcggttgctgtattgccattattgggtattggtggtgcaaagctttatcagtcagaaatgccggggccatttaaggatgacaaactcactccccgcctggccgatacgtcacggacactgtggataacttattctttattaggtgcaggacttaaaaacagagtctttgaaagttacagatttgaacttgacccctatgaatctgcccacacacagaaaaatcctattcatccaggcgtgtgccccaaggtccaagaagttcccacttttagaatgaaggatgcgctacagaagctggtggaaaacggcaagctgaaaaccaatccgatgaaagggatggtagccgcagtttctgtcggaattgtgaacggcgaagcggtttgcgatctggaatacgttgaagactctgccgcagagaccgacatgaacgtagtgatgaccgaagacgggcgcatcattgaagtgcaggggacggcagaaggcgagccgttcacccatgaagagctactcatcttgttggctctggcccgagggggaatcgaatccattgtagcgacgcagaaggcggcgctggcaaactga

SEQ ID NO: 21744 - DNA, 392 bp, Homo sapiens
  SIMILAR (16)..(57): 421254mologous to Homo sapiens A bone marrow secreted protein designated BMS242,accession number Y53639,Smith-Waterman Score=37.
gtggaggtttatgactttccaataagtgaaatgttaatgagggttattaaccctcactagtgtctgtttggaagtagtgacattcttccaaaaatcttggaaaagttgttttgtagtgtgaatgagcatgagtcactgatctaagccctttcactggatgaagtgaaaagattttttttcaacaaaagagggagagagagaatcaagactctgataaacatagtactatttttaaaagaaatccaataacaataaagattgttctattctctgccttcccatttagatagggtttaaaccagcaggaggcatccgcagtgcaaaggattcccttgcttggctctctcttgtaaaggaggagcttggagatgagtggctgaagccagaactct

SEQ ID NO: 21745 - DNA, 495 bp, Homo sapiens
  SIMILAR (100)..(492): 841254mologous to Homo sapiens CGI-26 protein,accession number AF132960,Smith-Waterman Score=551.
atgggccaaacagcagggggagaagcagtgtcaggggaaataattcctgaaaaaggtggtacctgtgctgaaccccaagatgtggagttatttgggcaaaaggcattccgggcaggaggcacagaacgtacaaagactcaaaaggttggatggcaccatctgcagagaagtgcaagatcagattttattaagacctctactggaaaagaaacagtaaatgccaccttcccggtagctatagtaatgctgcgggccattagagatttcttctggaaaactggaaacaagatagggtttaaaccagcaggaggcatccgcagtgcaaaggattcccttgcttggctctctcttgtaaaggaggagcttggagatgagtggctgaagccagaactctttcgaataggtgccagtactctgctctcggacattgagaggcagatttaccatcatgtgactggaagatatgcagcttatcatgatcttccaatgtcttaa

SEQ ID NO: 21746 - DNA, 1158 bp, Homo sapiens
  SIMILAR (70)..(567): 981254mologous to Escherichia coli 5-methyltetrahydrofolate- homocysteine transferase (AA 1-1200),accession number X16584,Smith- Waterman Score=841.
atgtgcaaaatcacaccaaaccttattgcaatattgaagcagtatcacatcaaggaggtatttttttatttgatcttgattgaaaccgttttcgacacccataacgccaaagcggcggtatttgcggtgaaaacggagtttgaagcgctgggcgttgagctgccgaatatgatctccggcaccatcaccgacgcctccgggcgcacgctctccgggcagaccaccgaagcattttacaactcattgcgccacgccgaagctctgacctttggcctgaactgtgcgctggggcccgatgaactgcgccagtacgtgcaggagctgtcacggattgcggaatgctacgtcaccgcgcacccgaacgccgggctacccaacgcctttggtgagtacgatctcgacgccgacacgatggcaaaacagatacgtgaatgggcgcaagcgggttttctcaatatcgtcggcggctgctgtggcaccacgccacaacatattgcagcgatgagtcgtgcagtagaaggattagcgccgcgcaaactgccggaaattcccgtagcctgccgtttgatcaggcactgttctggatatgaggaatatagccgtgtacaaatcagaaaacaaccctacctttctaaaggttacattccagtaagacaaaaaaccaaggctgcttggctcctgaaagctgttacctttatagatcttactacactttcaggtgatgatacatcttccaacattcaaaggctctgttataaagccaaatacccaatccgggaagatctcttaaaagctttaaatatgcatgataaagtggccgctggatttccagctggacagactcatttgaagacacgattagaagagatcagattggctgtggaagatggagctacagaaatcgacgtggtaattaacagaagcttggtgctgacaggccagtgggaagggcatactccccagttgtttattcagcattaccatgcaacatatgacacagcagactgttccttccttctggtaatgctttgttgttgtggctttggtgcctacattcctgaggtcttcctttctgtttctgattacccctgcgtctcatttgcaagctccttcacctcctctgtcatccctgaagtgtccatgtttctcagaatctga

SEQ ID NO: 21747 - DNA, 1757 bp, Homo sapiens
  SIMILAR (351)..(1058): 501254mologous to Homo sapiens CGI-26 protein,accession number AF132960,Smith-Waterman Score=406.
  misc_feature (1)...(1757): n = a,t,c or g
ggcccgctccaacatcagaatggtaacagctttcaggagcctaccagccggcagctccggagctgcacgcgccagtgtccgcgcacaatcggggcaccgagctcgaccttagctggatctccaaaatacaagtgaatcacccggcagttctgaaggcgtgcggaacaaatccaggctcgcagaactcgtgaaaaaggactggcaggctgcttggctcctgaaagctgttacctttatagatcttactacactttcaggtgatgatacatctttcaacatttaaaggctctgttataaagccgggtacccaatccgggaagatctcttaaaagctttaaatatgcatgataaaggcattacttacagccgccgtttgtgttttatcccgcccgggtgttgtgatgctgtaaaaggcacttcaaggcctgcaggcttgttaatatccctgtgggcatcagtngggccgctggattttccagctgggacagactcattttgaagacacgattagaagagattcagattggctgtggaagatgggagcctacagaaaatcgacgtgggtaattaacagaagcttgggtgcctgacaggcccagtgggaaagccctgtatgatgagattcgtcagtttccgcaaggcctgtggggaggcttcatcttaaaactatattagccgacaggagaacttggaactcttactaatgtctataaaagccagtatgatagcaatgatggcaggatcagatttttattaagacctctactggaaaagaaacagtaaatgccaccttcccggtagctatagtaatgctgcgggccattagagatttcttctggaaaactggaaacaagatagggtttaaaccagcaggaggcatccgcagtgcaaaggattcccttgcttggctctctcttgtaaaggaggagcttggagatgagtggctgaagccaggaactctttcgaataggtgccagtacttctgctctcggacattgagagggcagatttaccattcatgtggactgggaagatatggcagcttattcatggatctttcccaatgtctttaaattcagttcacccagtttcccaggaaaagttcctttacgacaatgtttaaaaattatttttctacgtaattgctaaaattatttacattaaaaaattgggcagtaggtaactcggcattccctctcttttaaaatttcctacccgaacttaatgggaatgggaaaaggccaacctcatcccacatgtggtactccatttcaggcaccatctgaaatggatcttaattacttagaagatcctgcacctattaactttgtgaaagagtttctccctaaaaactttaagtaaaatgttaatggtagcctttgataacatcaaattcctaagggagaaaaaaaccaatattaaaccgcccaaagcagtgtgccctaggcagagggaaaatgcaacatgctcggcaaggcgctgctgttaacgacttcagggagtcactgattcaggcactaatttccctgctgtggaaaactcatcttttcatttttggcccgtgggatagggcgcttttattaattgttggtccctaatgaaatttctggacattgtcatatacaacgatgaatatcattaaaatttttaaaataataaagttcctatagtttatttttttaaaaaaacttaaaaattgttacaatacataatgaaaaaataatccattaaacataaaaagaggtttgatcaaaaaa

SEQ ID NO: 21748 - DNA, 1071 bp, Homo sapiens
  SIMILAR (546)..(800): 341254mologous to Lycopersicon esculentum cell wall hydroxyproline-rich glycoprotein,accession number M11759,Smith- Waterman Score=84.
tcagtctcgttggagcaggggatccacccattttccgcgagaaactgcctgtgtcgcatggatccctaagcagaactgggcagctgtcggccccagtgcctccagggtgggcgtcagcgtgcggtgatagtccgaggtctcccgccgcaaactgctggtccaccggattccccgcagctcggccgtgtggtccacgtggaagccgtgactgtgtggtttgatgtactccttgtctggttgttgtgtttgtgtgttgtatgtcatatattcgtgtgtggtgttgtcgctgtttgttcgtgggtgttgttggtacattcctccatctgcgtgttttgtgtgcttgcgtctcgctattattctctcgtcgatgttggtgtcgatcctcgtcgtttggtgtagtgttctacttcccgcttgattgtgtgtgttgtcgatgatacttagtgtcgtcgcgcagggtaagcaacgcaattgctgcaagccgttaggtcgccggcaggcgtaggcgcgtttacagcatattggtgcagtgggtgggtagggttccttgccgcggccccccccccccatgaattcgcccaccgccgccgcaatgtgaatccgcggagccccccaggtaaggaataccgtccaaccctcccgcgcggcgcagtagcccagctggaaaccgtttaaatcccgcgtctggcgtaggcagtcattcctcccaaatcctgtcgttgggaggtggtgtgccaagcttcccccaactgcccctactatgggaaaccccgtggtttcaatggtagccaccgccgattgcggcatgtcgttacatcgcgggaaggcgaagacgggtttacagcaaatccggcaaagcgaatagttcggcccgtggcgtaggcgggtgttcagcaaatcctgtaacacataggtgttgaggcaaggattttgcgaacacgggcgctgtagtcgcacaaattgccgtatgcctgcgcccgctagttcaatggagtagatgggtgaaatacggcgtcggcgtgtgtaggagggtaggtagtacgtgaccggtggccccccccccccccccat

SEQ ID NO: 21749 - DNA, 594 bp, Homo sapiens
  SIMILAR (309)..(593): 1001254mologous to Escherichia coli 6- phosphofructokinase,accession number L19201,Smith-Waterman Score= 492.
atgattaagaaaatcggtgtgttgacaagcggcggtgatgcgccaggcatgaacgccgcaattcgcggggttgttcgttctgcgctgacagaaggtctggaagtaatgggtatttatgacggctatctgggtctgtatgaagaccgtatggtacagctagaccgttacagcgtgtctgacatgatcaaccgtggcggtacgttcctcggttctgcgcgtttcccggaattccgcaacgagaacatccgcgccgtggctatcaaaaacctgaaaaaacgtggtctcgccgaagttgctggttatcgagcggtgacggttcctacatgggtgcaatgcgtctgaccgaaatgggcttcccgtgcatcggtctgccgggcactatcgacaacgacatcaaaggcactgactacactatcggtttcttcactgcgctgagcaccgttgtagaagcgatcgaccgtctgcgtgacacctcttcttctcaccagcgtatttccgtggtggaagtgatgggccgttattgtggagatctgacgttggctgcggccattgccggtggctgtgaattcgttgtggttccggaagttgaattca

SEQ ID NO: 21750 - DNA, 831 bp, Homo sapiens
  SIMILAR (40)..(642): 411254mologous to Homo sapiens Human serine protease 67 (SP67),accession number W22987,Smith-Waterman Score=446.
atgcagtctttgcttggtagcatagccaatcggaccagggatcagcctgtgaggttccaagacccgacgaagtgggtggcctacgtgggtgcgacctacctcagcggctcggaggccagcaccgtgcgggcccaggtggtccagatcgtcaagcaccccctgtacaacgcggacacggccgactttgacgtggctgtgctggagctgaccagccctctgcctttcggccggcacatccagcccgtgtgcctcccggctgccacacacatcttcccacccagcaagaagtgcctgatctcaggctggggctacctcaaggaggacttccgtaagcatcttcctcggcctgcaatggtcaagccagaggtgctgcagaaagccactgtggagctgctggaccaggcactgtgtgccagcttgtacggccattcactcactgacaggatggtgtgcgctggctacctggacgggaaggtggactcctgccagggtgactcaggaggacccctggtctgcgaggagccctctggccggttctttctggctggcatcgtgagctggggaatcgggtgtgcggaagcccggcgtccaggggtctatgcccgagtcaccaggctacgtgactggatcctggaggccaccaccaaagccagcatgcctctggcccccaccatggctcctgcccctgccgcccccagcacagcctggcccaccagtcctgagagccctgtggtcagcacccccaccaaatcgatgcaggccctcagtaccgtgcctcttgactgggtcaccgttcctaagctacaaggtattttcggggcagaaaggtag

SEQ ID NO: 21751 - DNA, 2405 bp, Homo sapiens
  SIMILAR (2083)..(2163): 511254mologous to Homo sapiens Human peptidase, HPEP-1 protein sequence,accession number Y90284,Smith-Waterman Score=71.
atgaacgccgcaattcgcggggttgttcgttctgcgctgacagaaggtcggaaaccgttggtacagctagaccgttacagcgtgtctgacatgatcaaccgtggcggacgttcctcggttctgcgcgtttcccggaattccgcgacgagaacatcccgccgtggctatcgaaaacctgaaaaaacgtggtatcgacgcgctggtgttatcggcggtgacggttcctacatgggtgcaatgcgtctgaccgaaatggcttcccgtgcatcgaatcgtgcgtgcgtctatcctgcttgcaggatcgacgggatgtacgactgccgctaccacatgaagtggatgctcagagaagcggtggcagagaaaagtgatgcgaaaaataagggggagcatgagcgggaggcaactggtgcacctgtacacaagtcgagtgcgtgtaggtacccggtcatctacttccttgcctttagtcgaaaccggcctgccagccacacacgcaaagcaagctctggtgagcgggcagctgaaagactgcgccacggtcctctgggctccggaactggcactttccacgactggtgtgtctcgcaagggcagcttggcggtcagcaaattgttcagatgttgacaaaacaacatggcagggcaaaacggcatttaaagatacggtatcgacatggcgcgttacaaaggcaatgtcgatacgctgaagattgttgtaacgatattcgctacaaagccgacagtttcatctttaacgtcgccggtcgccagaagagggctaaggcgcttaccctctccctactgtgccccatcagcgaccgggacagggacagcatccgttaccccaatgttggggttgctcccaatacttacgcgcgcattaaccgcaatttccacgcgcatcattaccacatgctgttcagcccgttcatcacctctatgctccgtacgtgcttgcgtccttgccgtgtgcccttttggtttggggttacccgtactgctgcctgtgcgtgcgccgtatgcgctggaggatctgtaaatgtggtgccttccatggccaaagcgactctgcaagtgggacgagtgaagggcatggagatgggagataatcctgatgatctggcgggcctatatccccacagtgttctcatgagaggaggtgggagggacaaccaaggaagtcccgctctggatgccgcgtgctgtcgagcggccagcattggcgtggtggccccagccttgtcgtcctcaccctgggagtccttttggggcttccacgtggaccacacggccgagctgcggggatccggtggaccagcagtttgcggcgggagacctcggactatcaccgcagctgacgcccaccctggaggcactgggatgggaactccagtgtcctcgtacatttccagctgcactttctgctgcgacccctccagacgctgagcctgggcctggaggaggagctattgcagcgagggatccgggcaaggctgcgggagcacggcatctccctggctgcctatggcacaattgtgtcggctgagctcaagggaggttccaggccttgtgcagtttggtggccgtccgagcctggggctggccgctgtccagggaactccttttcctgcgggaacagccagtgtgtgaccaaggtgaacccggagtgtgacgaccaggaggactgctccgatgggtccgacgaggcgcactgcgagtgtggcttgcagcctgcctggaggatggccggcaggatcgtgggcggcatggaagcatccccgggggagtttccgtggcaagccagccttcgagagaacaaggagcacttctgtggggccgccatcatcaacgccagcctctgaggagctgaaaccacaggttccaagacccgacgaagtgggtggcctacgtggtgcgacctacctcagcggctcggaggccagcaccgtgcgggcccagcaagaaggcctgatctcaggctggggctacctcaaggaggacttccgtaagcatctcctcggcctgcaatggtcaagccagaggtgctgcagaaagccactgggagctgctggaccaggcactgtgtgccagcttgtacggccattcactcctgacaggatggtgtgcgctggctacctggacgggaaggtggactcctgcagtgtcctgttcttgtttcgtggtaccatttctttctttttctctgaggatcgtaatttaatccgttatgttcttctatattctatatttgtggttaactgtatttcaggcaaaccacagcctggcccaccagtcctgagagccctgtgtcagcacccccaccaaatcgatgcaggccctcagtaccgtgcctcttgctgggtcaccgttcctaagctacaaggtattttcggggcagaaag

SEQ ID NO: 21752 - DNA, 1308 bp, Homo sapiens
  SIMILAR (639)..(16): 991254mologous to Escherichia coli 100 pct identical to sp:YI5B_ECOLI,accession number AP002527,Smith-Waterman Score=1079.
tcaattggagtcagagccttttaatttcaggctaattcttctgctgttgtagtattcaatatattccgtaacagcatccttcagttcgcttatattactgaactcatcaagataaaaacactccgactttaaggttccaaagaaacactccaccacagcattatccagacaattgccttttctggacatgctttgtttaataccatgttctttaaggatattttgatatcttctcatacgatactgccatccctggtcagagtgcagaacaggatgctcgtgaggattaagctttttgaatgcctgatcgagcatattctcaaccatgttcatcactggtctttccgaaaggctgtaagaaataacttcgttgttgaagagatctattactggagacaaatacagcttgcgcccattgactgcaaattcagtaacatcggtaacccacttctcgtttggccgcgtagccttgaaatctctttggagaacattaggggcggtttgccctacctctcctctgtaagagcggtatcgcttgaccttaatcgctgctttaagtgagagggttcccatcaggcgctgaacagctttatggttaatctgtttcccttctcgatgaagagacagcgttacctttttcgtgggatgagctaaggctttcagctcttttagatacataagccgcgtttcaagaaatcgaacttgcctttcaagatcctcaatgcgtcggtcttttgacagctccaatgctgatgccgctttttctggatcaactgatattgcaatgtttcttttggtgccaatcttgagcgcgcgtaaaccagcttctccgcgctcttcatagaccttcagccacctggctacagaaccactaccagcaagcataaagtgagcagcagcctgattaagggacatgtgctgctcgatcacagctttcacgaccttaatacgcaactctggatcagcactaacgcctttaggtttgggaattaaacctttttctccatgtttttcatagagggcaacccatgtcctgacctgggttcgggggacaccaaaacgtgccgagatgatcctgtaaccatcatcagttgtgaagtagtgattcacgacttcaggcgcttgaggacatatggtcccggatgagcggaccttctccatggttgtcttctctctatcttgacctccattccgtcccctacatgtcaccttttcatgaaccaagtccaaataatcgacatgtaaaagcattcctatttctcgcctaaccagcagtcggggatcctctagatcgattaacggcatcat

SEQ ID NO: 21753 - DNA, 1059 bp, Homo sapiens
  SIMILAR (971)..(936): 831254mologous to Escherichia coli K12 putative histone,accession number AE000348,Smith-Waterman Score=58.
ttacttcgcttcgccgtttttcatttcgcccatagctttcagctttttggagatatcgcggcgttctttggagagctcggcatttttgatgatgtaatcgtcaacgcgatcttcatagtcacctttcatgctggcgatgatgccctggattgcttcaacgctcatccccggcttgatgtaatcgctcaggttgtccagcagcaggacgcgcttctggttgtcacggatctttttctcaacgtcctgaatttcacgttgcagtttgttcttacgacggaacagacgaacaaattccagtacgtcctggaatgaaggcttggtagtttccatttttatacccccttcccgccgattaggatcacccaactggggccacggatcgctaacaataacttgtgagtcatcggacaccacgctttgtcttatctcccgagctttcagcgcgcttaaacctggtttttgggcataatcccccgccagctgatgggccacggtaccgcccgtctccagcggtaacaccactttgcctatgcacttatcaaataactccgcagcccgatgaaatgctttaaaggcaacgttttcattttcagacatgatagattttccccagaaaaaagagattgaggcgaacataaggtgtgccttgaaaatgtcattaatggaaaatggctcgataacaagaggtaaaaacgtttccttggtaaggtttgaacttagatttttccagcattcttgagctggatcatataattcagggtattcttcctttatctccagttgcccattcactgtatggggccttgtttcccatgggacatcgcaggaatataacctcacacgagtacctattttctcagagctccagaattgctctcgcattctgcctagctcaatccgtatttccggatgatctttctctaagaacatcaatattccaccgcccattcgcattcggacatgggataggcgaagaacaccgcgctttcttgccagatccagattaaaatagatagctgacattccatgaaagggccaccggccacccagggacttcat

SEQ ID NO: 21754 - DNA, 432 bp, Homo sapiens
  SIMILAR (34)..(204): 871254mologous to Escherichia coli 100 pct identical to sp:YI5B_ECOLI,accession number AP002527,Smith-Waterman Score=266.
tcaatgggccaaagctgatagtgtctccagggaatagatgtcttcaacaatagagttatttcttccagcttttcggaaagaccagtgatgaacatggttgagaatatgctcgatcaggcattcaaaaagcttaatcatcacgagcatcatgttatgcactctgaccagggatggcagtatcgtatgagaagatatcaaaatatccagttgagttcctgcctgcacaagccaatattgctgggcataatgatgcaccagaagaacgagagccttttcaatggtaactatggttacttctgccaaacttctaacttcaggagaaatgttctccaacactgtgtcattttttaagtcgacgaacacaatctgagttcccatcctccacagctgcaggaaatctgtcagtttctctcctttacccttgcaagtcat

SEQ ID NO: 21755 - DNA, 1011 bp, Homo sapiens
  SIMILAR (337)..(993): 1001254mologous to Escherichia coli 100 pct identical to sp:YI5B_ECOLI,accession number AP002527,Smith-Waterman Score=1147.
atgccacagagtagagtttatgaccctatctgctacagctttaggtggtcagacaaccagaaagctgcaactggcaagcacgcaagcaagcacgcagcacagctaacacaggctacagcgcgcagagcagcatgcacaagcgaacaggcaggcacacgcagacagcacacagcagcaggcagcacgcaaagcagggcgcagcagcgcgcacaggcacgcagcaggaaggcagcagcagaaggagcagcgcgcacgcacgcaaaggcagcaaatagcagacgcaccacgatagttgctggtacacaggtgcatgaaagtactgttatgactggaccgctgtctcttcatcgagaagggaaacagattaaccataaagctgttcagcgcctgatgggaaccctctcacttaaagcagcgattaaggtcaagcgataccgctcttacagaggagaggtagggcaaaccgcccctaatgttctccaaagagatttcaaggctacgcggccaaacgagaagtgggttaccgatgttactgaatttgcagtcaatgggcgcaagctgtatttgtctccagtaatagatctcttcaacaacgaagttatttcttacagcctttcggaaagaccagtgatgaacatggttgagaatatgctcgatcaggcattcaaaaagcttaatcctcacgagcatcctgttctgcactctgaccagggatggcagtatcgtatgagaagatatcaaaatatccttaaagaacatggtattaaacaaagcatgtccagaaaaggcaattgtctggataatgctgtggtggagtgtttctttggaaccttaaagtcggagtgtttttatcttgatgagttcagtaatataagcgaactgaaggatgctgttacggaatatattgaatactacaacagcagaagaattagcctgaaattaaaaggtctgactccaattgaatatcggaatcagacctatatgcctcgtgttaactgtccaactttttag

SEQ ID NO: 21756 - DNA, 1353 bp, Homo sapiens
  SIMILAR (1)..(804): 1001254mologous to Escherichia coli formate channel B,accession number M63654,Smith-Waterman Score=1379.
atgagaaacaaactctctttcgacttgcagttgagcgccagaaaagcggcaatcgctgaacggattgccgcccataaaattgcccgcagtaaagtgtcggtctttttaatggcgatgtccgctggcgtgtttatggcgatcggatttactttttacctttccgttatcgccgatgccccgtcttcacaggcattaacccatctggtgggcggcctttgctttacactcggctttattttgctggcggtttgcggcaccagcctgttcacctcgtcggtaatgacggtgatggcaaaaagtcggggcgttattagttggcgaacttggctgattaacgcacttctggtggcctgcggtaatctggcaggtattgcctgtttcagtttgttaatctggttttccgggctggtgatgagtgaaaacgcgatgtggggagtcgcggttttacactgcgccgagggcaaaatgcatcatacatttactgaatctgtcagcctcggcattatgtgcaatctgatggtttgcctggcgctgtggatgagttattgcgggcgttcgttatgcgacaaaatcgtcgccatgattttgcccatcaccctgtttgtcgccagtggctttgagcactgtatcgccaatttgtttgtgattccgttcgccattgccattcgccatttcgcccctccccccttctggcagctggcgcacagtagcgcagacaattttccggcactgacggtcagccattttattaccgccaatctgctcccggtgatgctgggtaatattatcggcggtgcggtgctgcgtcgccacatggacgtgacccggtacaaattgggtgaacgagttcacaaccgcgataatcggcttaccgaaatcggcgtcggtcattccggtggcgcgccacagcgcacgagcacccgccatattacgaccatgagtggtggtggcggaacggtcggaacgatccatacccggtttacgcgctacgcctgcagagataagaacgacatctgcgccttccagcgccggagtcgcatcttcaccagaaaaacctttgattttcacagcaatcgacagccacaccgggagtcactggagcgatatcatacacgtctgcgcaaagaaattgcagaattacgtgccaaaattgaacgcgtcccttttattgacaccttcgatttacgttacaagaactacgagaagcggcccgatccctccagccaggcagtgatgttttgcctgatggacgtttccggttcaatggatcaatccactaaagatatcgtggccgaaccggatcgccaacggctgttaccgctatcaggggcaggaatatcagttacccattaa

SEQ ID NO: 21757 - DNA, 735 bp, Homo sapiens
  SIMILAR (549)..(4): 961254mologous to Escherichia coli 100 pct identical to sp:YI5B_ECOLI,accession number AP002527,Smith-Waterman Score=913.
ttaaacacgaggcatataggtctgattccgatattcaattggagtcagaccttttaatttcaggctaattcttctgctgttgtagtattcaatatattccgtaacagcatccttcagttcgcttatattactgaactcatcaagataaaaacactccgactttaaggttccaaagaaacactccaccacagcattatccagacaattgccttttctggacatgctttgtttaataccatgttctttaaggatattttgatatcttctcatacgatactgccatccctggtcagagtgcagaacaggatgctcgtgaggattaagctttttgaatgcctgatcgagcatattctcaaccatgttcatcactggtctttccgaaaggctgtaagaaataacttcgttgttgaagagatctattactggagacaaatacagcttgcgcccattgactgcaaattcagtaacatcggtaacccacttctcgtttggccgcgtagccttgaaatctctttgaggagctactagaggcctctgggagctgacttcatctacactggtgctttcaaaaacatcatcatggcacatggcactggtgctgccattctcatccaccgtcattggctcaggacccataaagtcacaggaattctctggcaggggaaggttgggaatctgactggccaggtccatctgaatatgctgccacaacatcacagcaccggtgaacttctt

SEQ ID NO: 21758 - DNA, 845 bp, Homo sapiens
  SIMILAR (1)..(609): 961254mologous to Homo sapiens Eag-related gene member 2,accession number AF311913,Smith-Waterman Score=1039.
atgccggtccgcaggggccacgtcgctccccaaaacacttacctggacaccatcatccgcaagttcgagggccaaagtcggaagttcctgattgccaatgctcagatggagaactgcgccatcatttactgcaacgacggcttctgcgaactcttcggctactcccgagtggaggtgatgcagcaaccctgcacctgcgacttcctcacaggccccaacacaccaagcagcgccgtgtcccgcctagcgcaggccctgctgggggctgaggagtgcaaggtggacatcctctactaccgcaaggatgatgtggtgcccgtgaagaacgaggacggggctgtcatcatgttcattctcaacttcgaggacctggcccagctcctggccaagtgcagcagccgcagcttgtcccagcgcctgttgtcccagagcttcctgggctccgagggctctcatggcaggccaggcggaccagggccaggcacaggcaggggcaagtacaggaccatcagccagatcccacagttcacgctcaacttcgtggagttcaacttggagaagcaccgctccagctccaccacggagattgagatcatcgcgccccataaggatattttgatatcttctcatacgatactgccatccctggtcagagtgcagaacaggatgctcgtgaggattaagctttttgaatgcctgatcgagcatattctcaaccatgttcatcactggtctttccgaaaggctgtcctgtccctgggcgcggatgtgctgccggagtacaagctgcaggcgccgcgcatccaccgctggaccatcctgcactacagccccttcaaggccgt

SEQ ID NO: 21759 - DNA, 2100 bp, Homo sapiens
  SIMILAR (613)..(2097): 991254mologous to Homo sapiens nitric oxide synthase,accession number M93718,Smith-Waterman Score=2598.
atggctgtttccaagatcaggacaggaaagctagccaaagtcaccatcgtggaccaccacgccgccacggcctctttcatgaagcacctggagaatgagcagaaggccagggggggctgccctgcagactgggcctggatcgtgccccccatctcgggcagcctcactcctgttttccatcaggagatggtcaactatttcctgtccccggccttccgctaccagccagacccctggaaggggagtgccgccaagggcaccggcatcaccaggaagaagacctttaaagaagtggccaaagtgcagaacaggatgctcgtgaggattaagctttttgaatgcctgatcgagcatattctcaaccatgttcatcactggtctttccgaaaggctgtaagaaataacttcgttgttgaagagatctattactggagacaaatacagcttgcgcccattgactgcaaattcagtaacatcgaccttcagccacctggctacagaaccactaccagcaagcataaagtgagcagcagcctgattaagggacatgtgctgctcgatcacagctttcacgaccttaatacgcaactctggatcagcactaacgcctttagcgccgtgaagatctccgcctcgctcatgggcacggtgatggcgaagcgagtgaaggcgacaatcctgtatggctccgagaccggccgggcccagagctacgcacagcagctggggagactcttccggaaggcttttgatccccgggtcctgtgtatggatgagtatgacgtggtgtccctcgaacacgagacgctggtgctggtggtaaccagcacatttgggaatggggatcccccggagaatggagagagctttgcagctgccctgatggagatgtccggcccctacaacagctcccctcggccggaacagcacaagagttataagatccgcttcaacagcatctcctgctcagacccactggtgtcctcttggcggcggaagaggaaggagtccagtaacacagacagtgcaggggccctgggcaccctcaggttctgtgtgttcgggctcggctcccgggcatacccccacttctgcgcctttgctcgtgccgtggacacacggctggaggaactgggcggggagcggctgctgcagctgggccagggcgacgagctgtgcggccaggaggaggccttccgaggctgggcccaggctgccttccaggccgcctgtgagaccttctgtgtgggagaggatgccaaggccgccgcccgagacatcttcagccccaaacggagctggaagcgccagaggtaccggctgagcgcccaggccgagggcctgcagttgctgccaggtctgatccacgtgcacaggcggaagatgttccaggctacaatccgctcagtggaaaacctgcaaagcagcaagtccacgagggccaccatcctggtgcgcctggacaccggaggccaggaggggctgcagtaccagccgggggaccacataggtgtctgcccgcccaaccggcccggccttgtggaggcgctgctgagccgcgtggaggacccgccggcgcccactgagcccgtggcagtagagcagctggagaagggcagccctggtggccctccccccggctgggtgcgggacccccggctgcccccgtgcacgctgcgccaggctctcaccttcttcctggacatcacctccccacccagccctcagctcttgcggctgctcagcaccttggcagaagagcccagggaacagcaggagctggaggccctcagccaggatccccgacgctacgaggagtggaagtggttccgctgccccacgctgctggaggtgctggagcagttcccgtcggtggcgctgcctgccccactgctcctcacccagctgcctctgctccagccccggtactactcagtcagctcggcacccagcacccacccaggagagatccacctcactgtagctgtgctggcatacaggactcaggatgggctgggccccctgcactatggagtctgctccacgtggctaagccagctcaagcccggagaccctgtgccctgcttcatccgggggtaa

SEQ ID NO: 21760 - DNA, 2196 bp, Homo sapiens
  SIMILAR (301)..(771): 951254mologous to Escherichia coli L-rhamnose isomerase,accession number X60472,Smith-Waterman Score=768.
ttaagaagcgtcccaaggtggaaaaatgcaggctgtttccgtatgataccacccttggtaataccagttgtacacgaaagtagttgttgtgtgttgttgctgttgtgctgtttttttgtgcactggcctgcggtgtggggattgtgacgatgtggctggggtgctgcatatggccctatggacaatgttgctacggctacggtaatatggggagttgttgcctgtgcactgccagtaagggtggttgatgatggactgctggactgtgccaatggaccccagctgccttgctggacccggcatttcacccgacgagttgattccgaccagatttccgccgccatgctgtatgtgccgcagttgctgctgcacgtcagccgtccggttcgctgggacagcgatcacgtagtgctgctggatgatgaaacccaggcaattgccagtgagattgtgcgtcacgatctgtttgaccgggtgcatatcggccttgacttcttcgatgcctctatcaaccgcattgccgcgtgggtcattggtacacgcaatatgaaaaaagccctgctgcgtgcgttgctggaacctaccgctgagctgcgcaagctggaagcggcgggcgattacactgcgcgtctggcactgctggaagagcagaaatcgttgccgtggcaggcggtctgggaaatgtattgccaacgtcacgatacgccagcaggtagcgaatggctggagagcgtgcgggcttatgagaaagaaattttgagtcgccgcgggtaaacactgccggatgcggcgcgagcgccttatccggcctacgggtcggcaacagttgtaggcccccacaaacggggtctttttggggaaaaaagaaactccctccccctttttgcgggtctgtgactcccccccggggggatgggccttcccccctgctaaggatttatcatgaccgcgtattggctggcccagggcgtgggtgtcatcgcctttctgattggtatcacaacatttttcaatcgtgacgaacgtcgcttcaaaaagcagctttcggtctatagcgccgttattggcgtacatttttttcttctgggcacctatcccgctggtgccagtgccatcctgcagcatgcaagtgcctctttgctcgcccggggcctttctgcgggacctgctgtcatgtcgattgctcagcactgtgtgcatgtagcgctctgcacacgctgctgaatctgatggaacgcaaagacgttcagtttggtctggcgacgatgtgtatcggtctgggtcagggtattgcgacggtgtttgagcgggtttaaccacttgccggatgcggcgtgaacgccttatccggtctaccgatccggcaccaatgtaggcgtgggcgtacacacagagggttccagacccggatgtttctgtggggataaagcctttttgaaagcccctgattcgagccatatttctcaacccaggttcaatcactggttctttcccgaaagcctgtaagaaataacttcgttgttgaaagagatctataactggagacaaatacagcttgcgcccattgactgcaaattcagtaacatcggtaacccacttctcgtttggccgcgtagccttgaaatctctttggagaacattaggggcggtttgccctacctctcctctgtaagagcggtatcgcttgaccttaatcgctgctttaagtgagagggttcccatcaggcgctgaacagctttatggttaatctgtttcccttctcgatgaagagacagcgttaccctacggtatccgtatcggcctctattctcgtgataaatctcactaatacgctttttaacgtccgcatacttgtcaggcttgctgagagcctttagatgataataaaacgtactgcgcggtatctccgcagcctttttcgtgggatgagctaaggctttcagcttttttagatacataagccgcgtttcaagaaatcgaacttgcctttcaagatcctcaatgcgtcggtcttttgacagctccaatgctgatgccgctttttctggatcaactgatattgcaatgtttcttttggtgccaatcttgagcgcgcgtaaaccagcttctccgcgctcttcatagaccttcagccacctggctacagaaccactaccagcaagcataaagtgagcagcagcctgattaagggacat

SEQ ID NO: 21761 - DNA, 2109 bp, Homo sapiens
  SIMILAR (517)..(1266): 971254mologous to Escherichia coli 100 pct identical to sp:YI5B_ECOLI,accession number AP002527,Smith-Waterman Score=1281.
atgtcaaagccaaaatacccttttgaaaagcgccttgaagtcgtgaatcactacttcacaactgatgatggttacaggatcatctcggcacgttttggtgtcccccgaacccaggtcaggacatgggttgccctctatgaaaaacatggagaaaaaggtttaattcccaaacctaaaggcgttagtgctgatccagagttgcgtattaaggtcgtgaaagctgtgatcgagcagcacatgtcccttaatcaggctgctgctcactttatgcttgctggtagtggttctgtagccaggtggctgaaggtctatgaagagcgcggagaagctggtttacgcgcgctcaagattggcaccaaaagaaacattgcaatatcagttgatccagaaaaagcggcatcagcattggagctgtcaaaagaccgacgcattgaggatcttgaaaggcaagttcgatttcttgaaacgcggcttatgtatctaaaaaagctgaaagccttagctcatcccacgaaaaaggctgcggagataccgcgcagtacgttttattatcatctaaagggtttcaggaaggctgacaagtatggggacgttaaaaagcgtattagtgagatttatcacgagaatagagggcgatacggataccgtagggtaacgctgtctcttcatcgagaagggaaacagattaaccataaagctgttcagcgcctgatgggaaccctctcacttaaagcagcgattaaggtcaagcgataccgctcttacagaggagaggtagggcaaaccgcccctaatgttctccaaagagatttcaaggctacgcggccaaacgagaagtgggttaccgatgttactgaatttgcagtcaatgggcgcaagctgtatttgtctccagtaatagatctcttcaacaacgaagttatttcttacagcctttcggaaagaccagtgatgaacatggttgagaatatgctcgatcaggcattcaaaaagcttaatcctcacgagcatcctgttctgcactctgaccagggatggcagtatcgtatgagaagatatcaaaatatccttaaagaacatggtattaaacaaagcatgtccagaaaaggcaattgtctggataatgctgtggtggagtgtttctttggaaccttaaagtcggagtgtttttatcttgatgagttcagtaatataagcgaactgaaggatgctgttacggaatatattgaatactacaacagcagaagaattagcctgaaattaaaagcatcgagctgcatgctgtgcgcgcccacgcgcctggccccccgccgcggactccccgcgttgcccacgcagtccggtctcctgccccgcgacgcgcgcgcaccgccctctcgccagggctccgtgcgcttcgaccggcgccgcggccttctctacctgcggccgccgccgcccccgcccgggccgcgcaaggcccgcgccccgccgcccccgccgcctctgcgcctgggccgcccgctgtcgcgccgcttgtcgctggccagcccggcctgggtcttcaacgctgccgtggcgctggcggtgctggtggccgcgggcctcgtggtctcgggcgtctacatcttcttcctcatcccgcacgccacctcctccggccccccgcggccccagctcgtggcgctcgctccagcgcctggcttctcttggtttccgccgaggcccccgccggggtcgccctgggcccccgcctggacgccgcgccccacgggccctgacctggacacggccctgccaggaactgcagaagatgcgctggagcccgaggcgggccccgaggacccggcggaggccgagaggacgctggacaggcgatcggatggcacggaccatcaaaccccagacaatcctattttggtgggaaatctagcagatagagaagccaaacaagtagccctacaacctgtacaaggccagtttctgtgcctgtcctcgttctctcctctttactctccagaagaaaaggaggactaccaagcccaaaaccttcaaaaacaaggaccatgtctgactgcagaatacagccatatttttcttctcacagacagcctatggatggacgtgtga

SEQ ID NO: 21762 - DNA, 2001 bp, Homo sapiens
  SIMILAR (1590)..(730): 861254mologous to Escherichia coli 100 pct identical to sp:YI5B_ECOLI,accession number AP002527,Smith-Waterman Score=1254.
tcaatcaggcgaccaaagcgtgccagacccatcagaatcaaaaagatccccgagcagcaaggtcgcaaccagcagtcctgccagtccaaactgttgcgacacgggatagagaattaccacaaatgccgcagtcggaccggaaacgctaaagcgtgacccacccgtcagagcaatgacaatccccgcaacagctgcggtatataaaccgtactggggtgccacaccactaccaatagccaacgccatcgccagcgggatagcaataatcccgacggttatcccggcaatcaggtcacgggtaaaccgtgcggcagtatatttttctgacagggtcagagtacgcacgttcggcagtgatttgatttcatcgctcagcggaatggtatcgcagacaacgacttcatcaattacagagttacgcaggttgttcgccgcgttgccagagaagatcgggtgagtcgcgtacgcaaatacacgtttagcaccacgttctttcagagcttcagcagctttacacagcgtaccgccagtgtcgatcatatcatcgaccagtacgcagtcacgacctgcaacgtcaccgatgatatgcatcacctgtgaaacgttcgcacgcggacgacgtttgtcgatgattgccatatcggtatcgttcagcagcttagcgatagcgcgggcacgcacaacgccgccgatgtccggaatccttagagtatcaaaaagtggacagttaacacgaggcatataggtctgattccgatattcaattggagtcagaccttttaatttcaggctaattcttctgctgttgtagtattcaatatattccgtaacagcatccttcagttcgcttatattactgaactcatcaagataaaaacactccgactttaaggttccaaagaaacactccaccacagcattatccagacaattgccttttctggacatgctttgtttaataccatgttctttaaggatattttgatatcttctcatacgatactgccatccctggtcagagtgcagaacaggatgctcgtgaggattaagctttttgaatgcctgatcgagcatattctcaaccatgttcatcactggtctttccgaaaggctgtaagaaataacttcgttgttgaagagatctattactggagacaaatacagcttgcgcccattgactgcaaattcagtaacatcggtaacccacttctcgtttggccgcgtagccttgaaatctctttggagaacattaggggcggtttgccctacctctcctctgtaagagcggtatcgcttgaccttaatcgctgctttaagtgagagggttcccatcaggcgctgaacagctttatggttaatctgtttcccttctcgatgaagagacagcgttaccctacggtatccgtatcggcctctattctcgtgataaatctcactaaatacgctttttaacgtccgcatacttgtcaggcttgctgagagctttttcgtgggatgagctaaggctttcagcttttttagatacataagccgcgtttcaagaaatcgaacttgcctttcaagatcctcaatgcgtcggtcttttgacagctccaatgctgatgccgctttttctggatcaactgatattgcaatgtttcttttggtgccaatcttgagcgcgcgtaaaccagcttctccgcgctcttcatagaccttcagccacctggctacagaaccactaccagcaagcataaagtgagcagcagcctgattaagggacatgtgctgctcgatcacagctttcacgaccttaatacgcaactctggatcagcactaacgcctttaggtttgggaattaaacctttttctccatgtttttcatagagggcaacccatgtcctgacctgggttcgggggacaccaaaacgtgccgagatgatcctgtaaccatcatcagttgtgaagtagtgattcacgacttcaaggcgcttttcaaaagggtattttggctttgacat

SEQ ID NO: 21763 - DNA, 699 bp, Homo sapiens
  SIMILAR (41)..(3): 1001254mologous to Escherichia coli FORMATE HYDROGENLYASE TRANSCRIPTIONAL ACTIVATOR,accession number D90878,Smith-Waterman Score=67.
tcaattgcgcgattcatatggcgcgccattttttgcgtgaacatgttttgctaaaagagggatatcttccggacggtcgcgtagcggcggcaattccagtgggaagacattcaggcgataaaagagatcgctgcgaaactggcgatcttcaaccatttgccacaaatcacggttggtggcggcaatgactctgacattcaccgggatcgttctactcccgccgagacgctcaatctcccgctcctgcaatacgcgcagcagtttaggctgaagttcagtaaacgcccctttgtcatgaccgaataactcactttccagaagactggcggggatggcagcgcagttgattttgaccagcggcttgtcgcgtcgcgggctctttgcccgttccggtttcaccacaaattcaacacccgtactgtcgctcttcggcacaatatcttccttgtggagccggtcttcccttgcctggctttgatagattatgtccccgttccctattccaaggactggccgtaaccgggggttcttgcggaccttcttgaatggcctgagaccagcttgatgtccaggaatagatggacgaaatgtgggacgggattccccaaaaggtaggttccaaagtcccgttttcacagggtttgacatacggggcaataaacgggtcaaaaacttgcagcgtacttctactgtggccat

SEQ ID NO: 21764 - DNA, 1970 bp, Homo sapiens
  SIMILAR (1300)..(1968): 1001254mologous to Escherichia coli phnI protein,accession number J05260,Smith-Waterman Score=1130.
atgtttatggttctgccggttctgaccacgtacggcatggctctgcaaggtgccagcgaagcattaatcggtattgccatatttggtattacgctcgatcctgaagagcaatggcaacaaaaaccaaaagttgacaaatgggatctaattaaactgaagagcttctgcacagcaaaagaaactttttacgatattgatgaaggcgaaatcctgatggatggtcacgatctgcgcgagtataccctggcgtcgttacgtaaccaggttgctctggtgtcgcagaatgtccatctgtttaacgatacttcactaaaatcagccctgagcaataaccaaattgctgactggttacagattgccttatgggccgggcaagataaacagggtattaccgtttacaaccggtaccgtcatcaaaaattaccagcgcgtggttatgcagctgtcgccgtcgcttatcgtaacctgcaacaatggcaaaactcgcttacactgtggcaaaaggcgctctctctggagccgcaaaataaggattatcaacggggacaaattttaaccctggcagatgctggtcactatgatactgcgctggttaaacttaagcagcttaactctggagcaccggacaaagccaatttactcgcagaagcctatatctataaactggcggggcgtcatcaggatgaattacgggcgatgacagagtcattacctgaaaatgcatctacgcaacaatatcccacagaatacgtgcaggcattacgtaataatcaacttgctgccgcgattgacgatgccaatttaacgccagatattcgcgctgatattcatgccgaactgagcatcccccgcggctggcaaccgctgaatatcgccaccaccagcgtgctgctgacgctggccgataacgacacgccggtgtggctttctaccccattaaagaacgatatcgtcaaccagagcctgcgttttcataccaacgcgccgctggtcagccagccggaacaggcgaccttcgcggtgacggatgaggcgatttccagcgaacagctcaacgccctttccaccggcaccgccgttgcgccggaagcgggtcgccagcctgatcggcggacgcatgttgcgccttactggtgcgggtattgccgaagaacgaatgatcgctccgcagctgccggagtgcattctgcacgaactcaccgagcgcccgcatccgttcccgctcggcatcgacctgatcctgacctgtggcgagcgcctgctggctattccgcgaaccactcatgtggaggtgtgctgatgtacgttgccgtgaaagggggcgagaaggcgatcgacgccgcccacgccctgcaagagagccgacgccgaggcgataccgatttgcccgaactgagcgtcgcccagattgaacagcagcttaacctcgcggtagatcgcgtgatgaccgaaggcggcattgccgaccgcgaactggcggcgctggcgctgaaacaggccagcggcgataacgttgaagcgattttcctgctgcgcgcctaccgcaccacgttggcgaagctggcggtaagcgagccgctcgacaccaccgggatgcgtctcgaacgccgtatctccgccgtttataaagacattcccggcggccagctgcttggcccaacctacgactacacccatcgcctgctcgattttaccctgctggcaaacggcgaagcgccgacgctgaccaccgccgacagcgaacagcagccgtcgccgcacgttttcagcctgctggcgcgtcaggggctggcgaagtttgaagaggatagcggcgcacagccggatgacatcacccgcacgccgccggtttacccctgctcacgctcctcccgtttgcagcagttgatgcgcggcgacgaaggctatttgctggcgctggcctactccacccaacgcggttacgggcgcaatcacccgttcgcaggcga

SEQ ID NO: 21765 - DNA, 2448 bp, Homo sapiens; identical to SEQ ID NO: 7178
  SIMILAR (660)..(115): 1001254mologous to Escherichia coli capsule synthesis regulator component C,accession number M28242,Smith-Waterman Score= 925.

SEQ ID NO: 21766 - DNA, 3453 bp, Homo sapiens
  SIMILAR (3353)..(3264): 281254mologous to Escherichia coli K12 aerotaxis sensor receptor, flavoprotein,accession number AE000389,Smith-Waterman Score=43.
ctatgcctgaccaatagcactctgttcctgatagcgccagccgttatggagcagttgaataagtaacgcctggcagcgtatcagcaactgatgagcagtagacggcacaggcaaaacgctggcagaaggtagcggtgccacaggcgtagtttctgcgtccagcgcccaggcacgggtttttgtcatcatcacccgtggttccagtgtcaattgcccttcaacaaaactgacaaagccagaaaccagacacacggggtcgtctgtttgttgcaaaagcgccgccatgcgttcaacggcataaggtgcgctggctgaggctggtaatgataacgtcagcacattatcttccccttcgccgctaatgacctgcgcatccagcgtctggcggctgctgtcccaaccgagcgaaatacactcagcgaccggcagaataaataagttatcgacctgattaagaagcagtacggtaaagccgtgctcctgccaaagtgacacaatcaaatcctgcatctcgagtcgcgttaaggcgtccagcgccccgagcggttcatcaagcaacaataatcccggtcgatgaatcaacgctcttgccagcgccactcgctgtttctgcccgccagaaagtgcggcaggccattcccctgcgcgattctccagtccgcagaccaacgctcgacgtgcggcatcgcgccactggcctttaaggcctaacccaacgttatcaatcaccgatttccacggtagcagacgcgcatcctgaaacatcattcgcgtgtcttcctgaatttcagaccagcggtgatggtgcccgctaacacatcgcctgcggttggcgtttccagacctgccagcaggcgcagcagggtacttttgccaccaccgctgacggcccaccaccgccacaaactgacctgccggaatatgtaaatccagttggttcaggacgatattttccgcgtaatgtttgcttactgcattgagcaacaatggcgtgcccgtggcctccttcaaatgataagccgggttccagcgcaaccagaggcgctctaacagctgcgcgctgacgtcagccagttggccgagcagggcgtaaagaataatagcgactaccaccacgtccgtttgcaaaaactcccgcgcattcatcgccagataaccaatgcctgaattggcagaaatggtttcggcaacaatcagcgtcagccacatcaggcccaacgcaaaacgcacgccgaccataattgagggcagggcaccaggcaggatcacatggataaacagcggtatgccggataatccatagctacgcgccatctccaccaacccgcgatcgatattacggatgccatgccaggtgttgatataaatggggaatagcgtaccgagcgccaccagaaagatttttgcggattcatcaatgccaaaccacaaaatcaccagcgggatcagcgccagatgcggcacgttgcgcaacatctgaattgaggtatccagcagccgttctccccagcgagatagcccgctaatcagtcccaaaatcaaccccagcgatccgccaattgaaaagccaatcagcgcccgccaggagctgatcgccagatgcatgcaaggtgatgccggcggcgaggccgacggacgccgctgggacggagccccaaaaagtggacagttaacacgaggcatataggtctgattccgatattcaattggagtcagaccttttaatttcaggctaattcttctgctgttgtagtattcaatatattccgtaacagcatccttcagttcgcttatattactgaactcatcaagataaaaacactccgactttaaggttccaaagaaacactccaccacagcattatccagacaattgccttttctggacatgctttgtttaataccatgttctttaaggatattttgatatcttctcatacgatactgccatccctggtcagagtgcagaacaggatgctcgtgaggattaagctttttgaatgcctgatcgagcatattctcaaccatgttcatcactggtctttccgaaaggctgtaagaaataacttcgttgttgaagagatctattactggagacaaatacagcttgcgcccattgactgcaaattcagtaacatcggtaacccacttctcgtttggccgcgtagccttgaaatctctacggtatcgtatcggctctatctcgttacagggatcggcgctgggacgtccgtggctacctccaacggagtaggtcgttgaggggaattccgcatttctcacacaatttataacgtaactgtcagaattgggtattattggggcaggttgtcgtgaaggaattcccgtcaccgcgtcttccagtcggctggcgcggtgtttcaccatcgccgacacctgcgcactctcttccaccagctcggcatttttctgggtgatcaggttaagctcatccactgcacgggtcaggctggaaagcccatcggcctgttccagcgttgaatggctaatctgggcgatcaactgggtgacgtttttcacctgctgcgaaccggattgcaccttatcagcactggcatcaatcagcttgcgaatatcgttggcagcattagcgctgcggctggctaaatgacgcacttcccctgccaccactgcaaaacctttgccctgttcgccggcacgcgccgcttccaccgccgcattcagggccagaatattggtctgaaacgcaatatcgttaatcagcgaagtaatggtgccaatgcgctgggtactgtcggcgatatcgtccattgtcttgatcaccgtggtcatcgcctccccaccctgcactgccgcattactggcagtgattgacagtttatcggcagccgacgccgtggcagagttctgtttcaccgacgccgccatttggttcatggtcgccaccgtttgctgaacgttatcaactgtctgctgggtatgttcgttcagttcatcggtgcctttcgccagcgtctcactgccatttctgacactggacacctggcttgagacatcgttaattagccaacggcacatcaggccaagttgccgttctccggtcgccaccttcagtgcctgatgggcaacattttctatcgggcgcacaatctgccacttcaagaacaggcgcttgccaacaataccactaacgcacagaggatatacgtcaccaccggggcagcaacaaaccaaagcatggccgccagcaagataaacatcagggtcatcactccacagcgcccgccagcgaagcggtaatgaaggcagtttacccagccagcctgtacgcaccaccaggcctttatgaatacgcttactggtacgtccggcgttcaacgctttgtacagcggctccaccgccgcgatctcttcatccgtcgcccgggtacgaatcgacatatagccactgatttttccctcgcgcaccat

SEQ ID NO: 21767 - DNA, 2491 bp, Homo sapiens
  SIMILAR (423)..(4): 1001254mologous to Escherichia coli 100 pct identical to sp:YI5B_ECOLI,accession number AP002527,Smith-Waterman Score=742.
ttaaacacgaggcatataggtctgattccgatattcaattggagtcagaccttttaatttcaggctaattcttctgctgttgtagtattcaatatattccgtaacagcatccttcagttcgcttatattactgaactcatcaagataaaaacactccgactttaaggttccaaagaaacactccaccacagcattatccagacaattgccttttctggacatgctttgtttaataccatgttctttaaggatattttgatatcttctcatacgatactgccatccctggtcagagtgcagaacaggatgctcgtgaggattaagctttttgaatgcctgatcgagcatattctcaaccatgttcatcactggtctttccgaaaggctgtaagaaataacttcgttgttgaagagatctattactctcctctgtaagaagcggtatcgcttgaccttaatcgctgctttaagtgagagggttcccatcaggcgctgaacagctttatggttaatctgtttcccttctcgatgaagagacagcgttaccctacggtatacacgatcagaatggaacccgtaggcaatcgctacaccgtattcgccatcttccacgcggttgaggatgtaagccgtcgctacgcgggtatccggcgtgacgaggaacacaatggcgctgacggtggtaatggcgcgcacaaagctgtaaatcagcgccgagaggatcgccgggcgcagcagcggcagcaggatgtgcgtaatggtacgcagggaaccggcgcgcaggctgagtgaggcttcatcgagcgatttatcgatttggcccggtaatgactccaagtgcagctttcccttcaggcgggattcatacagcggccagccatccgtcatccatatcaccacgtcaaagggtgacagcaggctcataagacgccccagcgtcgccatagtgcgttcaccgaatacgtgcgcaacaaccgtcttccggagactgtcatacgcgtaaaacagccagcgctggcgcgatgttagccccgacatagccccactgttcgtccatttccgcgcagacgatgacgtcactgcccggctgtatgcgcgaggttaccgactgcggcctgagttttgttaagtgacgtaaaatcgtgttgaggccaacgcccataatgcgggctgttgcccggcatccaacgccattcatggccatatcaatgattttctggtgcgtaccgggttgagaagcggtgtaagtgaacgggccgttgatggtcatcgctgtttcgcctttattaaaggcagcttctgcgatggagtaatcggtgtctgcattcatgtgtttgtttttaatcaggtcaaccaggaaggtcagacccgctttcgcgccagcgttatccacgcccacgtctttaatgtcgtacttgccgttttcatacttgaacgcataacccccgtcagcagcaatcagcggccaggtgaagtacggttcttgcaggttgaacatcagcgcgctcttacctttcgctttcagttctttatccagcgccgggatctcttcccaggtttttggcgggttcggcagcagatctttgttataaatcagcgataacgctttgaatttcaggctaattcttctgctgttgtagtattcaatatattccgtaacagcatccttcagttcgcttatattactgaactcatcaagataaaaacactccgactttaaggttccaaagaaacactccaccacagcattatccagacaattgccttttctggacatgctttgtttaataccatgttctttaaggatattttgatatcttctcatacgatactgccatccctggtcagagtgcagaacaggatgctcgtgaggattaagctttttgaatgcctgatcgagcatattctcaaccatgttcatcactggtctttccgaaaggctgtaagaaataacttcgttgttgaagagatctattactggagacaaatacagcttgcgcccattgactgcaaattcagtaacatcggtaacccacttctcgtttggccgcgtagccttgaaatctctttggagaacattaggggcggtttgccctacctctcctctgtaagagcggtatcgcttgaccttaatcgccttgttgaacaggctggcattacgcattttctgttgcagttcgtcaggcattgctgccccgcgctgataatgccgggcgtagcgagcgaatacctgcggatgcgttgcccagtgttcgttgatttgcgacggaaattcgacaaaatcacgcggcgtgttggtgccggaaagcgtggcataacgctggcgggcaaaaaggccgtgcagcgtatgaccaaattcatggaataaggttatgacatcatcccagagtaacaacgcaggctcaccggcagcgggtttctgataattgcagacgttataaattaccggatgtgttttattaagcgttgattgctcaacaaaattgcccat

SEQ ID NO: 21768 - DNA, 1794 bp, Homo sapiens
  SIMILAR (848)..(883): 751254mologous to Escherichia coli Bacteriophage n4 adsorption inner membrane protein NfrB,accession number D90699,Smith-Waterman Score=45.
atgttcatcagcgggctggacgatttttttattgatgtcgtctactgggtacgccgcattaaacgcaagttgagtgtttatcgccgctacccgcgaatgagttaccgcgaactgtataaaccagatgaaaaaccgttagcgattatggttccggcgtggaatgaaacgggcgtcatcggcaatatggccgagctggcggcgaccacgctcgactacgaaaactatcatatctttgttggcacctaccccaacgaccccgatactcagcgtgatgttgacgaagtgtgcgctcgcttcccgaatgtgcataaggtagtctgcgcgcgtcctggccccaccagcaaagccgactgtctgaacaacgtgctggacgccatcacccaatttgagcgtagcgccaatttcgcttttgctggttttattctgcatgacgccgaagatgtgatttcaccgatggaattgcgtctgttcaactatctggtcgagcgtaaagatctgattcagatcccggtgtatccgttcgaacgcgaatggacgcacttcaccagcatgacttacattgatgagttttcagagctgcatggcaaagatgttccggtgcgtgaagccctcgccggacaagtgcccagcgccagggtcggacctgtttcagccgcgcgccgtgaaccggctgtagctgaggatattttgatatcttctcatacgatactgccatccctggtcagagtgcagaacaggatgctcgtgaggattaagctttttgaatgcctgatcgagcatattctcaaccatgttcatcactggtctttccgaaaggctgtaagaaataacttcgttgttgaagagatctattactggagacaaatacagcttgcgcccattgactgcaaattcagtaacatcggtaacccacttctcgtttggccgcgtagccttgaaatctctttggagaacattaggggcggtttgccctacctctcctctgtaagagcggtatcgcttgaccttaatcgctgctttaagatcatctcggcacgttttggtgtcccccgaacccaggtcaggacatgggttgccctctatgaaaaacatggagaaaaaggtttaattcccaaacctaaaggcgttagtgctgatccagagttgcgtattaaggtcgtgaaagctgtgatcgagcagcacatgtcccttaatcaggctgctgctcactttatgcttgctggtagtggttctgtagccaggtggctgaaggtctatgaagagcgcggagaagctggtttacgcgcgctcaagattggcaccaaaagaaacattgcaatatcagttgatccagaaaaagcggcatcagcattggagctgtcaaaagaccgacgcattgaggatcttgaaaggcaagttcgatttcttgaaacgcggcttatgtatctaaaaaagctgaaagccttagctcatcccacgaaaaaggctgcggagataccgcgcagtacgttttattatcatctaaaggctctcagcaagcctgacaagtatgcggacgttaaaaagcgtattagtgagatttatcacgagaatagaggccgatacggataccgtagggtaacgctgtctcttcatcgagaagggaaacagattaaccataaagctgtgtcacggacggaccccattgtgttctccaagagagatttcaaggctacgcggccaaacgagaagtgggttaccgatgttactgaatttgcagtcaatgggcgcaagctgtatatgtctccagtaatagatctcttatcatcagcttcg

SEQ ID NO: 21769 - DNA, 668 bp, Homo sapiens
  SIMILAR (215)..(655): 951254mologous to Escherichia coli 100 pct identical to sp:YI5B_ECOLI,accession number AP002527,Smith-Waterman Score=725.
aggtctatgaagagcgcggagaagctggttacgcgcgctcaagattggcaccaaaagaaacattgcaatatcagttgatccagaaaaagcggcatcagcattggagctgtcaaaagaccgacgcattgaggatcttgaaaggcaagatcgatttgttgaaacgcggcttatgtatctaaaaaagctgaaagccttagctccttccccgaaaaaagtgaaagtactcaacgagttaaggcagttttatcctcttgatgagcttctcagggctgcggagataccgcgcagtacgttttattatcatttaaaggctctcagcaagcctgacaagtatgcggacgttaaaaagcgtattagtgagatttatcacgagaatagaggccgatacggataccgtagggtaacgctgtctcttcatcgagaagggaaacagattaaccataaagctgttcagcgcctgatgggaaccctctcacttaaagcagcgattaaggtcaagcgataccgctcttacagaggagaggtagggcaaaccgcccctaatgttctccaaagagatttcaaggctacgcggccaaacgagaagtgggttaccgatgttacaaaattagcagtcaatgggcgcaaccagtatttgtctacagtaatagatctccgggtaccgagct

SEQ ID NO: 21770 - DNA, 1535 bp, Homo sapiens
  SIMILAR (363)..(184): 851254mologous to Escherichia coli 100 pct identical to sp:YI5B_ECOLI,accession number AP002527,Smith-Waterman Score=256.
ggacgggcgtgaaggggtctatatcgagaagattgaaggcaagctggccgccatcgcctattcacgcatcggccgccgcctgccggtgcacgccaccgccatcggcaaggtgttgattgcctggctgggcgaggccgagctgaacgccctgctgtgtactgaccccaaaaagttggacagttaaacacgaggcatataggtctgattccgatattcaattggagtcagaccttttaatttcaggctaattcttctgctgttgtagtattcaatatattccgtaacagcatccttcagttcgcttatattactgaactcatcacagataaagaacactccgcactttaaggttccacaagaaacactccaccacacgcattatccagacaattgccttttctggacatgctttgtttaataccatgttctttaaggatattttgatatcttctcatacgatactgccatccctggtcagagtgcagaacaggatgctcgtgaggattaagctttttgaatgcctgatcgagcatattctcaaccatgttcatcactggtctttccgaaaggctgtaagaaataacttcgttgttgaagagatctattactggagacaaatacagcttgcgcccattgactgcaaattcagtaacatcggtaacccacttctcgtttggccgcgtagccttgaaatctctttggagaacattaggggcggtttgccctacctctcctctgtaagagcggtatcgcttgaccttaatcgctgctttaagtgagagggttcccatcaggcgctgaacagctttatggttaatctgtttcccttctcgatgaagagacagcgttaccctacggtatccgtatcggcctctattctcgtgataaatctcactaatacgctttttaacgtccgcatacttgtcaggcttgctgagagcctttagatgataataaaacgtactgcgcggtatctccgcagccctgagaagctcatcaagaggataaaactgccttagctcgttgagtactttcactttttcgtgggatgagctaaggctttcagcagcaagcataaagtgagcagcagcctgattaagggacatgtgctgctcgatcacagctttcacgaccttaatacgcaactctggatcagcactaacgcctttaggtttgggaattaaacctttttctccatgtttttcatagagggcaacccatgtcctgacctccatagcctgggctaagcgttcttctagtgccatgtaggtaaggaactgaggatccacatatgaaatagcttcagcaactcctagtccatctgcaaagccatcaaataggtccccttctcccatgagcaggccccagtccaacccaaagcccaactcactccacagctgctgaccatgaggaaacctaaggtcaacaccggagtcaggcaaataagccacccccccacccccacccgcatacacacttgttttatttaaactggccaatccacaactgccagaggaaagcccgtgggccttcat

SEQ ID NO: 21771 - DNA, 4222 bp, Homo sapiens
  SIMILAR (3724)..(2888): 881254mologous to Homo sapiens CHD1,accession number AF006513,Smith-Waterman Score=1317.
ctactctcttgcatgggatatttcaagctgttttactatgggcaaggagcagggaccaaaatgctgccagggcttaaaaagagccgtgatcagattaaacagaagttggagaagtggagggatgtgggccacacacgagaagaaaatgttgaaggaggctgagatttcaactggacttataggaggcataggtggatgcaggaggggctccacggatgtcagagaacaggattcaggagcagccttggtgctggccacgccgatctccggccctgcgttgatgtggacgccgcagtcggtctcgcgagagatggagctgcccacggtgttggtgacgcccacggtgagagcgccgcggtccttacagtagcgcagcgccaggagggtgtccgcggtctcgccttttaatttcaggctaattcttctgcgtgtgtagtattcaatatattccgtaacagcatccttcagttcgcttatattactgaactcatcaagataaaaacactccgactttaaggttccaaagaaacactccaccacagcattatccagacaattgccttttctggacatgctttgtttaataccatgttctttaaggatattttgatatcttctcatacgatactgccatccctggtcagagtgcagaacaggatgctcgtgaggattaagctttttgaatgcctgatcgagcatattctcaaccatgttcatcactggtctttccgaaaggctgtaagaaataacttcgttgttgaagagatctattactggagacaaatacagcttgcgcccattgactgcaaattcagttacatcggctaaccacttctcggttgggccgcgtagccttgaaatctctttggagaacattaggggcggtttgccctacctctcctctgtaagagcggtatcgcttgaccttaatcgctgctttaagtgagagggttcccatcaggcgctgaacagctttatggttaatctgtttcccttctcgatgaagagacagcgttaccctacggtatccgtatcggcctctattctcgtgataaatctcactaatacgctttttaacgtccgcatacttgtcaggcttgctgagagcctttagatgataataaaacgtactgcgcggtatctccgcagcctttttcgtgggatgagctaaggctttcagcttttttagatacataagccgcgtttcaagaaatcgaacttgcctttcaagatcctcaatgcgtcggtcttttgacagctccaatgctgatgccgctttttctggatcaactgatattgcaatgtttcttttggtgccaatcttgagcgcgcgtaaaccagcttctccgcgctcttcatagaccttcagccacctggctacagaaccactaccagcaagcataaagtgagcagcagcctgattaagggacatgtgctgctcgatcacagctttcacgaccttaatacgcaactctggatcagcactaacgcctttaggtttgggaattaaacctttttctccatgtttttcatagagggcaacccatgtcctgacctgggttcgggggacaccaaaacgtgccgagatgatcctgtaaccatcatcagttgtgaagtagtgattcacgacttcaaggcgcttttcaaaagggtattttggcttgaactgggaaagcaattcatctcctacagttaaaggacctggttcattttcatgagtttcagctctcttcaagatttcatctatatccatttcctggggctcttgttcttctccttcaggttccttaaaaagttcttcagcaccaaactttaaaatggctgataactcttctttattgaaaggagtagaacccttcagcagccaaggcagcccctgtttttgcatgtatttattacctacggcaacactgaagaataagtttggtccattccatttctctggatcctgtaagtgctccaagctcctagataaagctgctggcataaggaggatatagaggtcgttatgcccgggcaaaatgctggaacatagtcgctgaaccagcgtcggatcgtccgggtcatttattttttcataggagagagtgaactctgcaggaccttgccaccaaggtcccccccagggatgggatagagacaccccaggttcccgagcctgacacgggagcataagggtgatttccgatatgtcatttctttttgcttctcgccttgaggaaatacaagcccagggattctggtgggaggtgtttggatcactggggtgaatccctcttgaatggcttagcgccatcctcttggtgctagtcagttcttgctctgagttcatgtgagatctggttgtataaaagtgcatgacatcttctccctctctctccatgtcacatgctggttctccttcaccttctgccatgcttgtaagcttccttgaggcctcaccagaagcagatgcactagcatctgcttctgtacatacctgctttctttcttctggatcagaaggaatggatttgtgcaaaggtattaattcttcttcatgggagatgactagtttggcattcacctgtactcctgatattcggaatgttggacccttcacttttccgagtctaccacctgttcgttctgttcctgaagaactatcctttaatgctttaatgcaaccattatgtaccaattctcccagtcgtctaaggtctgtttctgacttatcaactaactcagcatctcgagcaattgcatctaattttctccattgcttaatttgttcaggatttgtatactcttttagacattctgtgatatggtctccaatttttattaaacattgtctagtatgctctagttgttctctttctgaaaggcctttctcaggcctatcaagttgtttcaaagctgctttaacaggcctcattctttctttacatttgcaatctttaaaaggagtggtttttgattggttcctgctaaaatactcatcaatgcatgcttgaaactttttggaaatgagagctccatcttcccagctgcactctgagtatggaaggccctgccatttgcagtaataatcaggataaccagctgctgacttttgattggaatgagcaattatacgttccactatttgatactgtttatgtagatcatctgtaagttcttgctggcaattataatattccacatcttctggagaggcatttttcaaccatctttttgtttcctgatcttttttcttataattatccaattttttcattcctctaacattctgctgcttgagggtttcttctgtctcccaagtgttgtggatatgggaccatcctttccatttaattaaatactgaatctctcctggttctttgtttttttcaaagcctgcatttgggtcaccatctgcttcaactgcatagatggttgtagtagcaccagtagctccttttctcccaatccgacaatccataaatctttctatggtttcaaattcctcttcctcaggttgaggaacatcctctccacagacttccagtaggtcatcagaatctgttttcatttcttcatcctccttatagctaacattaacagttgcttggcgacgagaacttcttttatcattatcataatcttcttcatcatcatcctctctcagatgaatccatctgtctctttttttgtccaagaatcttctttccattttttgacttagatctcgccccttggtgcttccatcatgaaaaggaagacacaactccgcaagggcatcgacagcgataatgccgcaggaccgccgcttcccgtacaccacgcaaacgaacccaaaccgcacccacgcacgcaacaaacaaaccacaaaagccgcaaacaagcacagacagaggaaaccggagagaaccggaaaagaccgaacccagctagcacctccgaccaaacccgcaggaaccggggcgacgcggacagacacaacaagacaccagcgccaagacaccaaccacccaagccccaaggggaaccgacgacaccccaaaaacaataaccctagtttatcctctcttttggatgctccaggggtcctctgtaccatccaagagctggggtacatgaggtagagaaagtgaggcatccctctttctttatttatatccctgagtcccggtgaccacaacaccgggtggtcaccagcacacgggtgctgcccatgagtgtcaaagcagctttcacccat

SEQ ID NO: 21772 - DNA, 5491 bp, Homo sapiens
  SIMILAR (1819)..(2493): 981254mologous to Escherichia coli similar to,accession number D90870,Smith-Waterman Score=1179.
atggagagccacacagtcacagactacaactttggcagacttttaaatgaaagttttgccaactgtgaaacagacaggaattacctggggatcttcaaatgcggattctggctcagtggaacccgcaagtctgcatttcttacaaaatctcaggtgacgctgacgcgacctgtggaccacacattaaggaatgaggttttaggttctaccaagtaccaggttcccggctaccggagaaaaacaaacacaaatttggaagaatccaatgtactaataggctatgatgttgcacctggtgggggaaaacagattgacggcaagaaggcggagggccgcgagctcatggtcccagtggcaggacgtccgttatgcaggtccagcagtatggagttgctcctgctcctgcccctccacatccccagggaacagatgcttctggcagatgcctactggaacctccatcagtcgtgccaatcaaaaacatctccagatactgccaaatgtcctctggacaggtgcccaagagtatttaaaagccaaagctacaaggccagcacatttgatggattgtctatggatactgaagtcatcaagagtaatggcaagcagggatggagacaaagacggttagcaaacatgaaagacatagacaagcagacgcaggctgccacgttcgttctttctcagggtatgcagaggtcaggcaatgatcgcattatcctggtgacgggagccagcgatggtattggtcgtgaagccgcgatgacgtatgcacgctatggtgcgacagtgattctgttgggccgtaatgaagaaaaattacgtcaggtagccagccacataaacgaagaaactgggcgtcagccacagtggtttattctcgatttgctgacctgcacgtccgaaaattgccaacaactggcacagcgcattgccgttaattatccgcgtctggatggtgttttgcataatgccggattgctcggcgatgtttgcccaatgagcgaacaaaatccgcaggtctggcaggacgtcatgcagctcttccgcgctggcattattaatgctgacccgggtgccttcttcgtcactggctttcgccggtactgctgctttactttgtgctgcaggagcttccgctttggtttctaccgccgtcggtttcgccacagaagctgccgccagcgcgctatgagacattccggcacaggccagggacagggtaatgagcagtgctttaattccgtgtttcatactgttttctccttgtttgttaacagtggaatcaccttaacggcagtgaaaacagtaaacaaatggcaatgttcagaaatggaaaaggccgcgaaagcgaccttttcttgttacagctgcaacgcatttttttgcgaggcggcttcaggattattgctgttccagcgcatcgccaattttgattttcgcctctttacgcaggttactcatcagagcttcaaagacgatttgggtataaaaatggaaactaccaagccttcattccaggacgtactggaatttgttcgtctgttccgtcgtaagaacaaactgcaacgtgaaattcaggacgttgagaaaaagatccgtgacaaccagaagcgcgtcctgctgctggacaacctgagcgattacatcaagccggggatgagcgttgaagcaatccagggcatcatcgccagcatgaaaggtgactatgaagatcgcgttgacgattacatcatcaaaaatgccgagctctccaaagaacgccgcgatatctccaaaaagctgaaagctatgggcgaaatgaaaaacggcgaagcgaaccgtaaagaacgatcttctatgttccgcgatcggccattaaaacgaatgaagtcaaaacgtgacgacgattcttatgacgaggatgtcgaagatgatgagggcgttggtgaggttcgtgttcaccgcgtgaatcatgccccggctaacgctcaggagcatgaggctgctcgtccgtcgccgcaacaccagtaccaaccgccttatgcgtctgcgcagccgcgtcaaccggtccagcagccgcctgaagcgcaggtaccgccgcaacatgctccgcatccagcgcagccggtgcagcagcctgcctatcagccgcagcctgaacagccgttgcagcagccagtttcgccacaggtcgcgccagcgccgcagcctgtgcattcagcaccgcaaccggcacaacaggctttccagcctgcagaacccgtagcggcaccacagcctgagcctgtagcggaacctgctccagttatggataaaccgaagcgcaaagaagcggtgattatcatgaacgtcgcggcgcatcacggtagcgagctaaacggtgaactgcttcttaacagcattcaacaagcgggcttcatttttggcgatatgaatatttaccatcgtcatcttagcccggatggcaagcgcccggcgttattcagcctggcgaatatggtgaaaaccggacctttgatcctgaatgaagatttactactccgcccgcgacgcgacaagccgctggtcaaaatcaactgcgctgccatccccgccagtcttctggaaagtgagttattcggtcatgacaaaggggcgtttactggtgcgattaatacccatcgtggtcggttttgaaattgccgatggcggcacgttgtttctcgatgaaattggcgatctgccgttagaacttcagcctaaactgctgcgcgtattgcaggagcgggagattgagcgtctcggcgggagtagaacgatcccggtgaatgtcagagtcattgccgccaccaaccgtgatttgtggcaaatggttgaagatcgccagtttcgcagcgatctcttttatcgcctgaatgtcttcccactggaattgccgccgctacgcgaccgtccggaagatatccctcttttagcaaaacatttcacgcaaaaaatggcgcgccatatgaatcgcgcaattgacgccatcccgaccgaggcactacgccagttgatgtcgtgggattggccgggcaacgtgcgcgacgtggaaaacgtgattgagcgggcgcagttactgctgacgctaaatgaagattcagcgcttcgcagttcaaatggcgcagtaaactgcacccgacgacgccagagaatgacgaagaagaacgtcagcgcattgttcaggtattgcgagaaaccaatggcattgttgccgggccccgtggcgcacgacgcgattagggatgaagcgcaccacgctgctgtcacgaatgcagcggctggggatctcggagtatgcatgagaaacaaactctctttcgacttgcagttgagcgccagaaaagcggcaatcgctgaacggattgccgcccataaaattgcccgcagtaaagtgtcggtctttttaatggcgatgtccgctggcgtgtttatggcgatcggatttactttttacctttccgttatcgccgatgccccgtcttcacaggcattaacccatctggtgggcggcctttgctttacactcggctttattttgctggcggtttgcggcaccagcctgttcacctcgtcggtaatgacggtgatggcaaaaagtcggggcgttattagttggcgaacttggctgattaacgcacttctggtggcctgcggtaatctggcagctgaaagccttagctcatcccacgaaaaagtgaaagtactcaacgagctaaggcagttttatcctcttgatgagcttctcagggctgcggagataccgcgcagtacgttttattatcatctaaaggctctcagcaagcctgacaagtatgcggacgttaaaaagcgtattagtgagatttatcacgagaatagaggccgatacggataccgtagggtaacgctgtctcttcatcgagaagggaaacagattaaccataaagctgttcagcgcctgatgggaaccctctcacttaaagcagcgattaaggtcaagcgataccgctcttacagaggagaggtagggcaaaccgcccctaatgttctccaaagagatttcaaggctacgcggccaaacgagaagtgggttaccgatgttactgaatttgcagtcaatgggcgcaagctgtatttgtctccagtaatagatctcttcaacaacgaagttatttcttacagcctttcggaaagaccagtgatgaacatggttgagaatatgctcgatcaggcattcaaaaagcttaatcctcacgagcatcctgttctgcactctgaccagggatggcagtatcgtatgagaagatatcaaaatatccttaaagaacatggtattaaacaaagcatgtccagaaaaggcaattgtctggataatgctgtgcactggatgtccgtgctggcgcacagccaaccggctgaactgtttgcacgcctgttcgcgctaaacattaccggcgactatgatgggatccgcgccgctgaaactggcctggtacagattcaggcgcggatgggcggcaccggcgaacgtttttttgccggcgacgccacgctgacccgcgccgccgtgcgcctgactgacggcacgctcggctacagctgggtgcaggggcgtgataaacagcacgccgaacgctgcgcgctgattgacgcgctgatgcagcaatctcgccactttcaaaacttatcagaaacccttattgccccgctggacgctgaccgtatggcacgcattgccgcacgccaggccgaagtgaacgccagccgggtcgacttctttacgatgctcaaacgcggctggcaaccgctgaatatcgccaccaccagcgtgctgctgacgctggccgataacgacacgccggtgtggctttctaccccattaaataacgatatcgtcaaccagagccctgcgttttcataccaacgcgccgctggtcgccagcctgagcggcggacgcatgttgcgccttactggtgcgggtattgccgaagaacgaatgatcgctccgcagctgccggagtgcattctgcacgaactcaccgagcgcccgcatccgttcccgctcggcatcgacctgatcctgacctgtggcgagcgcctgctggctattccgcgaaccactcatgtggaggtgtgctgatgtacgttgccgtgaaagggggcgagaaggcgatcgacgccgcccacgccctgcaagagagccgacgccgaggcgataccgatttgcccgaactgagcgtcgcccagattgaacagcagcttaacctcgcggtagatcgcgtgatgaccgaaggcggcattgccgaccgcgaactggcggcgctggcgctgaaacaggccagcggcgataacgttgaagcgattttcctgctgcgcgcctaccgcaccacgttggcgaagctcttttttccgtggattgaaaaacaggggctaagtatcgggataatcattctgacgattggcgttatggcccccatcgccagcgggacgtaccgccctcaaccttga

SEQ ID NO: 21773 - DNA, 282 bp, Homo sapiens
  SIMILAR (243)..(214): 1001254mologous to Homo sapiens Amino acid sequence of a human secreted peptide,accession number Y10930,Smith-Waterman Score =66.
ccctggcgccccaatacgcaaaccgcctttccccgcgcgttggccgattcattaatgcagctggcacgacaggtttcccgactggaaagcgggcagtgagcgcaacgcaattaatgtgagttagctcactcattaggcaccccaggctttacactttatgcttccggctcgtatgttgtgtggaattgtgagcggataacaatttcacacaggacagctatgaccatgattacgccaagctctaatacgtgatggtacgcctgcaggtaccggtccggaatt

SEQ ID NO: 21774 - DNA, 928 bp, Homo sapiens
  SIMILAR (203)..(81): 901254mologous to Homo sapiens Protein sequence encoded by clone p199-7 (PL mutet.rsT4),accession number P93373,Smith-Waterman Score=192.
taaggcggcagggttcgggaacaggagagcgcacgagggagcttccagggggaaacgcctggtatctttatagtcctgtcgggtttcgccacctcttgacttgagcgtcgatttttgtgatgctcgtcaggggggcggagcctatggaaaaacgccagcaacgcggcctttttacggttcctggccttttgctggccttttgctcacatgttctttcctgcgttaatcccctgattcctgtggataacccgtattacccgcctttgagtgagctgatacccgctccgccgcagccgaacgaccgagcgcagcgagtcagtgagcgaggaagcggaagagcgcccaatacgcaaaccgcctctccccgcgcgttggccgattcattaatgcagctggcacgaacaggtttcccgactggaaagcgggcagtgagcgcaacgcaattaatgtgaggttagctcactcattaggcacccccaggctttacactttatgcttccggcctcgtatgttgtgtggaattgtgagcggataacaatttcacacaggaaacagctatgaccatgattacgccaagctctaatacgactcactatagggaatttggccctcgaggccaagaattcggcacgaggttcattttctaggaacaaaataccctcttagacattaaaaagccgcatgcctgttccctcagctatagttaactggaccatggtggtacaactgactcaacccttctctaagcagggatttgtaattgggatttataatgaaattcctgatctgggaaaacgggaggctgggaatgctatgtctaggtcatcagcggagaaagttggtttgtagagaatgaacaagaatgaaacctaagtgcaaagaaaataaagattatcctgctttaatagttcaaaaaaaaaaaaaaaaa

SEQ ID NO: 21775 - DNA, 2483 bp, Homo sapiens
  SIMILAR (1019)..(2008): 401254mologous to Cloning vector pCALc lac operon repressor,accession number U36452,Smith-Waterman Score=387.
  misc_feature (1)...(2483): n = a,t,c or g
aaaccaccgctaccagcggtggtttgtttggccggatccaagagctaccaactcttttttccgaaggtaactggtttcagcagagcgcagataccaaaatactgttcttctagtgtagccgtaggataggccaccactttcaagaactctgtagcaccgcctacatacctcgctctgctaatcctgtttaccagtggctgctgccagtggcgataagtcgtgtcttacccgggttggactcaagacgatagttaccggataaggcgcagcggtcgggctgaacggggggttcgtgcacacagcccagcttggagcgaacgacctacaccgaactgagatacctacagcgtgagctatgagataagcgccacgcttcccgaagggagaaaggcggacaaggtatccggttaagcggcagggtcggaacaggagagcgcacgagggagttttccagggggaaacgcctggtatctttataggtcctgtcgggtttcgccacctctgacttgaacgtcgaatttttgtgatgctcgtccaggggggcggagcctatggaaaaacgccagcaacgcggcctttttacggttcctggccttttgctggccttttgctcacatgttctttcctgcgttatccccttgattcttgtggataaccggtattaccgcctttgagtgagcttgataccgctcgccgcagccgaacgaccgagcgcagcgagtcagtgagcgaggaagcggaagagcgcccaatacgcaaaccgcctctccccgccgcgttggccgattcattaatgcagagcttgcaattcgcgcgcgaaggcgaagcggcatttacgttgacaccatcgaatggcgcaaaacctttcgcggtatggcaatgataagcgcccggaagagagtcaattcagggtggtgaatgtgaaaccagtaacgttatacgatgtcgcagagtatgccggtgtctcttatcagaccgtttcccgcgtggtgaaccaggccagccacgtttcttgcgaaaacgcgggaaaaaagtggaagcggcgatggcggagctgaattacattcccaaccgcgtggcacaacaactggcgggcaaacagtcgttgctgattggcgttgccacctccagtctggccctgcacggcgccgtcgcaaattgtcgcggcgattaaatctcgcgccgatcaactgggtgccagcgtggtggtgtcgatggtatttaagaagcgggctcgttgcctgtcatacagcgccgcacaatcttcttggcgcaaacggggtccagctgggctgatcattaactatccgctggatgacccaggatgccattgctgtggaagcttgcctgcactaatgttccggcgttatttcttgatgtctctgaccagacacccatccaacagtattattttctcccatgaagacggtacgcgactgggcgtggagcatcttggtcgcattgggtcacccagcaaatcggcgctgttagcgggcccattaagttctgtctcgggcgcgtctgcgtctggctggcttggcataattttctcactggcaattcaaattcagccgatagcgggaacggggaaggcgactggagtgccatgtccggttttcaacaaacccctgcaaatgctgaatgagggcatcgttccccactggcgattgctggttgcccaacgatccagaatggcgctgggccgcaatgcgccgccattacncggagtccgggctgcgcgttggtgccggatatcctccgggtaggtgggaatacgacgatacccgaagaccagctcatgttatatccccgcgctttaaccacccatcaaacaggattttcgcctgcttggggcaaaaccagcgtggaccgctttgctgcaactctctcagggccaggcggtgaagggcaatacagctgttgcccgtctcacttggtgaaaagaaaaaccacccttggcgcccaatacgcaaaccgccctctccccgcgcgttgncccgattccattaaatgcagctggcagcgacaggtttcccgactggaaagcgggcagtgagcgcaacgcaattaatgtgagttagctcactcattaggcacccccaggctttacactttatgcttccggctcggtatgttgtgtggaattgtgagcggataacaatttcacacaggaaacagncttatgacccatgattacgcccaagctctaatcacgcatcactatagggaaagcgtggtacgcctgccaggtaccggtcctggaattcccgggtcgacccacgcgtccgctttatagtactgacaacacattagaatcaaatgggaaactctacagagtaataaacagaaatactatatgactgagcctaacctttaaaaaacaaaaacattctctggagggagaccccatagactgtgttttaaaaaaaggtcctctaagtgattttgatgcaagatctggcttaaaaaaaaaaaagtcgacg

SEQ ID NO: 21776 - DNA, 1201 bp, Homo sapiens; identical to SEQ ID NO: 17902
  SIMILAR (58)..(837): 811254mologous to Escherichia coli K12 putative transport,accession number AE000192,Smith-Waterman Score=1064.

SEQ ID NO: 21777 - DNA, 492 bp, Homo sapiens
  SIMILAR (328)..(489): 661254mologous to Homo sapiens FLJ00026 protein,accession number AK024436,Smith-Waterman Score=183.
atgggttgtggtgcctgcgtcgtcatcgttgggcgatcctttatgctctatcattatgctttgtctgtaccattgcctgttgattccctgccgttatacgacgttgactgccagacaaatggcaatctggaatatgacacctattcccaaccggaatggaaacataacttgttcgaccattatctggcggtgctttaccgctttaaagatgaaagtggcaaagaacaatttagcggcgcagtggtgaaaacgcgtgaagcaacgccgggtaaagaaatagaagcgatcactcgccgaatgcttgatttcagcccacgactgaaaaaactcgcgggtgtgccatgtcagaacatctcatccaacgtgctagaggagtccgccatctccgacgacatcctgtcgcccgacgaggagggcttctgctccgggaagcacttcactgagctggggctggtagggttgctggaacaggcagccggctacttcaccatg

SEQ ID NO: 21778 - DNA, 1306 bp, Homo sapiens
  SIMILAR (1304)..(1104): 681254mologous to Escherichia coli K12 putative transcriptional regulator,accession number AE000370,Smith-Waterman Score=206.
ttatgtgtttaacaactcatatttcttaatcttgcgatagagcgtagcaatgccgatgcccagttcatcagcaacttgcttcttgctgttatgacgtgaaagcgcctcgcggatcatttgcttttccatctcctccagcgccgtgccgcccgcatcatcgagtgacaggtgcgcctcactgacctctgttacatcactttgctccgttgtgccattattcagcagatttggcggcaatagcgtgctgtcgataacttcacctgaaggaaccacgttaaccagatattccatcaaattgcttaactcgcgcaggtttccgggccaacgatgcttacgcaatatttcgacgacatcgggagcaatgccaggataaaccgatcccagacgacgggtatgcagatgtaaaaagtaatgcaccaatagttcaatatcttcctgacgttcacgcagcggtggcagagttatcgggataacattaagtcggtagaagagatcttcgcggaatttaccttcggcaatgaactggggcaaattctgattagttgcagaaatgatgcgaatgtcgacttgtattgggctactggcaccaatcggcagaatttcacgtgcctcaatagcgcgcagtaatttagcctgcaacattaatggcatatcacctatttcatcgagaaacagcgtgcccgtattcgccgcctgaatcaaccctgttttaccgttggcagaagcgccagtaaatgcacctttaacataaccgaacagttcgctctccagaagctgctccggaatcgcggcacagttgatagcaataaagggtttattccgtcttccgctcaacttatggattgcacgggcgacgacttctttacccgtgccgctttcaccaaccaccataacgctggatgggctgggtgcaatacggctaatgagtcgttttaattgccgcataacacggcactcgccaaccaattgttcaatatgcggttcatcaggtgcatttgctacagaaaaactggtatgcgattggtgaaacgccattaaaaataattggtcgcccctgaatgttatgcaattgaccaaggattaatttccttttatcggcccattgaaacaatatggctggatatgggccatgggtaaaattactctcaaatgttaatggtctgaaacggataggggtgccgaataatattattttgcacaacaccaagtgtttttaaggcagtctgattaacaaactgaacccgattttcatcatctacaactaatacgccctgatccatattatcgmtcatggtcgaaaatattt

SEQ ID NO: 21779 - DNA, 1716 bp, Homo sapiens
  SIMILAR (217)..(795): 801254mologous to Escherichia coli similar to,accession number D90870,Smith-Waterman Score=794.
atgctgtgtacaaagtgggataaactgggcttggagaaaaacgcgggtaaaaataaaaacgcgtacaaatggtatgggtggcccgcaaatgcacctgatgaaccgcatattgaacaattggttggcgagtgccgtgttatgcggcaattaaaacgactcattagccgtattgcacccagcccatccagcgttatggtggttggtgaaagcggcacggcgatacctgttgtatctcatgcagaatttaaaggcggttttgcagatatcggcgtgcattatctggactggaccagccggactaccgaaaaatcgtcgaccaaatcacacaaagatgattttggttatcttgaatttgaaggtggcgctaactttagttggggagaaatgtacgggttcttcgactgggaaaacttctataacggtcgccataataaaccaggtagcgagcagcgttatacctttaaaaataccaagccgtatttatcctgggttgacaccggatttagtctctacttgcatgcgtatggcacctacggttctgcgaatcgcgtgaatttcctcgacgatatggttcttggccgggttcgggttccaattttaaccggcgggggggtggggggttcaaacccgttctttgctaagccgttataccagatcaaaaccttattacacttggcgacaacggctatgttcgccggctgggttgcaggttacaactttatgctgggcagcgagaaattcactcttaccaactggaacgagtacgagtttgaccgtgacgctacctatgcagcggatttcctgccgttatacgacgttgactgccaggacaatggcaatctggaatatgacacctattcccaaccggaatggaaacataacttgttcgaccattatctggcggtgctttaccgctttaaagatgaaagtggcaaagaacaatttagcggcgcagtggtgaaaacgcgtgaagcaacgccgggtaaagaaatagaagcgatcactcgccgaatgcttgatttcagcccacgactgaaaaaactcgcggactgtccatccccacggcctgtgtttgaggccctgtgcatctgctctatgttagacgccttacttctcctttgtccactggactatcatgcctcctgtgacaattacagctatgcccttctggacccccaaggctttcctctaccacatcgccgactctggggcccctacatcgatgtggacgtccctatgctccacttaatacagcatgcttgggcacaagatgcgctactgtcttgcctatactctgacttactgtacatgtcctccttcccatatcctgcgggtaccctgaccagactgatgggcgtgacgagctacaaccataagaacacactgctgacttactgcatcacactcatgagcacaatcagattcgcttatgacggcgatgaagaaattgcgatgaaatatacggactttctcaaaggagagttatcaatgaatattcgtccattgcatgatcgcgtgatcgtcaagcgtaaagaagttgaaactaaatctgctggcggcatcgttctgaccggctctgcatcggctaaatccacccgcggcgaagtgctggctgtcggcaatggccgtatccttgaaaatggcgaagtgaaaccgctggatgtgaaaattggcgacatcgtatttttcaacgatggctaccggggtgaaatctga

SEQ ID NO: 21780 - DNA, 2835 bp, Homo sapiens
atgattgatgtcttagggccggagaaacgcagacggcgtaccacacaggaaaagatcgcaattgttcagcagagctttgaaccggggatgacggtctccctcgttgcccggcaacatggtgtagcagccagccagttatttctctggcgtaagcaataccaggaaggaagtcttactgctgtcgccgccggagaacaggttgttcctgcctctgaacttgctgccgccatgaagcagattaaagaactccagcgcctgctcggcaagaaaacgatggaaaatgaactcctcaaagaagccgttgaatatggacgggcaaaaaagtggatagcgcacgcgcccttattgcccggggatggggaacgaaccgatgactggatggatggccgccgcagtcgtcacactgatgatacggatgtgcttctccgtatacaccatgttatcggagagctgccaacgtatggttatcgtcgggtatgggcgctgcttcgcagacaggcagaacttgatggtatgcctgcgatcaatgccaaacgtgtttaccggatcatgcgccagaatgcgctgttgcttgagcgaaaacctgctgtaccgccatcgaaacgggcacatacaggcagagtggccgtgaaagaaagcaatcagcgatggtgctctgacgggttcgagttctgctgtgataacggagagagactgcgtgtcacgttcgcgctggactgctgtgatcgtgaggcactgcactgggcggtcactaccggcggcttcaacagtgaaacagtacaggacgtcatgctgggagcggtggaacgccgcttcggcaacgatcttccgtcgtctccagtggagtggctgacggataatggttcatgctaccgggctaatgaaacacgccagttcgcccggatgttgggacttgaaccgaagaacacggcggtgcggagtccggagagtaacggaatagcagagagcttcgtgaaaacgataaagcgtgactacatcagtatcatgcccaaaccagacgggttaacggcagcaaagaaccttgcagaggcgttcgagcattataacgaatggcatccgcatagtcttttgcttaagttgcatgatttgctgctctgtcatatcagtcgtactggcttcattcttgtcgggcaatggtggaagcactttatattcataattcaccggcgaccaggtagcccactcacctgttgccacatccaccagcgtgaaacgtaccaggtagcgcagggagatagcgtcaagcacagtggggatgattcaggtaatcaagtcatcccgcccccccgagaaggtgacgataaaaccgatggtccacagcatcgcagaatggaacacgatgcggccctgatacatggtgaacagccagttgaagatcttcaccccggtcgggatggcgataatcattgtggtgataccaaagaaggcgtttacgttcgcgcccgcacccatcgtaaagaagtggtgcagccaaacgatgaacgacagcacggtgatacagacggttgcccataccagcgaggtataaccaaacagacgtttacgcgagaaggttgccgcaatttcggagaacacaccgaaaacaggcaggatcaggatgtaaacttccgggtggccccaggcccaaatcaggttgatgtacatcatcatgttgccacccatatcgttggtaaagaaatgggtgcccagatagcgatccagggtcaacaacgcgacggtaaccgtcagaattgggaaggaagcaataatcaaatggtaacgaagaagttgataccgctgaataccaaccaagaacctaaacccgttaatattatttccattcttcccgcaaaagttgccgtagacaactcccaaaataaacggaacgcacaagcttccggcgcgcttattggcgcagtcgctggcggtgttatcggccacaacgtcgggtctggcagcaattccggaccgacggcaggtgcagttggcggcggagctgtaggcgcggcagcgggttctatggtgaatgataaaaccttagtggaaggtgtttctttaacctataaggaaggcaccaaagtgtatacctctacccagctatccggctatcgcctcatcattgcaggatcaactctctgctgtcgcagaagcggaacagcaagaccgttttcaagattccgttgggctgctttccgacggcattgtccgcaaaccattaattgccgtgtgctgccggtgtttgccgccggtagcgttatcgctgcgctttccgactccatctgggaaattattctgggccgggcgctacaaggctctggagcaattgccgccgccgttatggcgctgctttccgatctcacgcgcgaacaaaaccgcaccaaagcgatggcgtttatcggcgtgagctttggcattacctttgccattgcgatggtgcttggcccgatcatcactcacaaacttgggctgcacgcgctgttctggatgatcgctattctggcaacgaccggcattgcgttgaccatttgggttgtgcccaacagtagcactcacgtacttaatcgtgagtccggaatggtgaaaggcagtttcagtaaagtgctggcggaaccgcggctgctgaaactcaactttggcattatgtgtctgcatattttgctgatgtcgacgtttgttgccctgcccggacaactggctgatgcagggttcccggcggctgaacactggaaggtctatctggcgacaatgctaatcgcctttggctcggtcgtgcctttcattatttacgctgaagttaagcgcaaaatgaagcaagtctttgtcttctggtcttag

SEQ ID NO: 21781 - DNA, 1377 bp, Homo sapiens
  SIMILAR (814)..(1218): 641254mologous to Escherichia coli o252,accession number L10328,Smith-Waterman Score=396.
atgtcgactttaccaacgccacatctgtacatcaagactcttctattgcattccggcgactctcagcaaaaagtttacatccgcgccacgcccgcgtctcttcccgcggccgctgcctctccacaccgaagacccccgataacattcgccacgctcacacataaactatgctcagtacttcgccatctatcatcctcagctattaaagtgttccctacagtactgaggctccagccgcgttatgctcctatgaaactaaatcctcgactgacgatacccatccggaactcgccgtgtcttcaggcccacgggacccagcaccctccgccaggtctgttctctaatcagttgtcacataaggggctggttcgcgactcatccagcgctttcctattcagagttcaaatccaacgtataagcccttgtattcagcttattgttcggtcagcgtttgccagcggccagctgtccccacacatcaagtcttttggcagactcaatattttaaatcgtgaattgaccgaattgaggcccttggtatttttcgttcggcggctgtttagggatctgcagcatatcagggcgtgtaatatgagagacgccagaacagacgtggcaaagcaagctgccaccttgaaacttgaagacacagagacatccaaaaagttacatcaatggagatctactcaccaggagcagaaggccctggagccacaaactgtaaggcctggtattcatgcacagaagcggctgcgcgttggccgattcattaagccagctggcacgacaggtttcccgactggaaagcgggcatgtcatcaagaagcccgaaacattccccctcatcgtcaaagccgttttctggcgtccagaggtttactcgcagaactgatgttcatgctgtatggcattggcgaattgccggaaatcgtcaccctgccgaaaggtaaaccggttttcagtgataaaaatttgccttcgttttccatttcctatgccgggaatatggttggcgtggcgttaacaaccgaaggtgaatgtggcctcgatatggaactacagcgtgcgacgcgcgggtttcatagcccacacgcgcccgataaccacaccttttccagcaatgaatcgctatggatcagtaaacaaaacgatcctaacgaagcgcgggcgcagctcatcacgctgcgccgaagcgtgctaaaactaaccggagatattaatttcttcatcagaaccgatagtcccgctgtcattgaaatgagctgtgtggtgaatattaggagcatccgtgctcagccacaccctcggaaactgctgcaaatgctgccattgacaggaggcagtgacactactggattgctgtcacctgagccttag

SEQ ID NO: 21782 - DNA, 2001 bp, Homo sapiens
  SIMILAR (912)..(55): 901254mologous to Escherichia coli RNA polymerase beta subunit,accession number U76222,Smith-Waterman Score=1316.
tcacccggacaacccggcattggtaaaccagggttctggtagaacgggtgaattggtcaggttgtagatgtcgatacctgcttcacccggatacatctcgtcttcgttaactttgataacgatacgggaagcatccacgtactgaacgacaccaccacgtttagctaccgcagttacaccggagtcaacggcaacagcacgttccataccagtaccaaccagcggcttatcagcgcgcagagtcggaacggcctgacgttgcatgttcgcacccatcaatgcacggttggcgtcatcgtgttccaggaacgggatcagggacgcaccgacggataccacctgctgggtggatacgtccatgtagtcaacctggtcgcggctgaacaagctggattcgcctttgctacggcaagttaccaggtcttctacgaagtggccttcttcatccaagttggagttcgcctgggcgataacgtagttgccttcttcgatagcagacaggtagtgaatttcgtcagttacaacaccgtcggtcactttacgatacggagtctcaaggaagccgtattcgttagtctgtgcgtacacggacagagagttgatcagaccgatgttcggaccttcaggggtttcgattggacagacgcgaccgtagtgagtcgggtgtacgtctcgaacttcgaagcctgcacgttcacgggtcagaccgcctgggccgagtgcggagatacgacgtttgtgcgtaatctcagacagcgggttgttctggtccataaactgagacagctggctggaaccgaagaactctttcactgctgcggaagtcaggatcctcaacagccatgggggtggaacctccgggtcaatccgctggctcaaacgacgggtcatgcccatgaagcccagcgcaaacagtggcataaaggcaacgaagaagccgatgatccagaaccagaacgcgcgtttaccccaggtttcgttcagtttgaaaccgaacgctttaggccaccagtaggtcatccctgcgaagcagccgaagaccacgccgccgatgatcacgttatggaagtgcgcaatcaggaacaggctgttatgcagaacgaagtccgcgcccggtacggccagcagcacgccagtcatcccgcccaccgagaaggtgacgataaaaccgatggtccacagcatcgcagaatggaacacgatgcggccctgatacatggtgaacagccagttgaagatcttcaccccggtcgggatggcgataatcattgtggtgataccaaagaaggcgtttacgttcgcgcccgcacccatcgtaaagaagtggtgcagccaaacgatgaacgacagcacggtgatacagacggttgcccataccagcgaggtataaccaaacagacgtttacgcgagaaggttgccgcaatttcggagaacacaccgaaaacaggcaggatcaggatgtaaacttccgggtggccccaggcccaaatcaggttgatgtacatcatcatgttgccacccatatcgttggtaaagaaatgggtgcccagatagcgatccagggtcaacacgcgacgtaccgtcagaatgggaaggatctgtagagtaaccgtggggtggcgagcggtaatccccagtgccgtcatcgcgcccatcgacgcgccaccgactgccagacggtcatcaagcagccagttttcttcggctattgccgcacgtaaagtagtgaattcctgcatactttgtagcaagatttgccagaattgatttaaccgccgcgctgcgtcaccactaaaacggctaccgtgatcgggcgcatccggcatgatcacccgcaaaccagcctgcgccagcgcaacggcaaaatagctatacaccagactggatgaagtaaagccgtgataaaaaattacgcacggtaacggggtatctttttgcccgacaggataagcatgaagaacgggaatatctgccagctcgcgtgattctatttcaatcat

SEQ ID NO: 21783 - DNA, 2511 bp, Homo sapiens
  SIMILAR (1228)..(2499): 971254mologous to Escherichia coli HyfR,accession number M63654,Smith-Waterman Score=2111.
atgggcagcttatgccccgttcttgatgcggcttacgaattcccgcttggaccaagataccgtgaccgtttgatcttgtttcaacgccagccgtggcattgccggaagtgtggcccgcatcttgaatgggtaagtcatggtgaacatgcggaacaagagtcggcattacaggcagctatcgcacagttaaaaatgggcaaaattgtcgccatcaaagggattggcggatttcatcttgcctgcgatgcacgtaacagtaacgcggtggcgacacttcgggcgcgcaaacatcgcccggcgaaaccgctggcggtcatgttgccagtggctgacggtttaccagacgctgcgcgccagttgcttaccacgcccgccgcgccgattgtgctggtggataaaaaatacgttcctgagctttgtgatgatatcgcccctgaccttaacgaagtcggggtaatgttgcctgcgaacccgctccagcatttgctgttacaggaactgcaatgcccgctggtgatgacctccggcaacctgagcggtaaaccaccagctatcagcaacgaacaggcgctggcggatttgcagggcattgccgacggattcttgatacataaccgcgacatcgtgcagcggatggatgattcggtggtgcgcgaaagcggcgaaatgctgcgccgttcgcgggggccaggtggtaaacttcggcgccacaagggtgctgaagaaaccctgtgtgggaacacgcgggtactaatagcaccgcagttgcctgctgtgataattgcgacgctgagcggttcccgtagccagactggaagacgggaagggccaactccgaccacggtcatgatccaggaccacacaggttcttcgaccgatgacgagtgttccgctaacgtgcaacgcatcttcaacaggatcatgctttgctcgatcgtatcgcggccacgtacaatccccttccacgacctggcgcagagtttccgtcagtttcgcaacgtcaaatgtctctggtgcgcctttgaaggggcgcaattgatgcgcatccagccagctattgtaatggtgaaaaccatccatcgggagcgtctgaatagcgggcagttccggtgtcatcaagaagcccgaaacattccccctcatcgtcaaagccgttttctggcgtccagaggtttactcgcagaactgatgttcatgctgtatggcattggcgaattgccggaaatcgtcaccctgccgaaagagatcaggggaaatgtcgataattcgcgtcacgccgtctttctcgccaatagtggaatgccggagctacgctttattcgcacccacggcagtcgttttacttcccaggattgcacactgtttaactggctggcgcggataatcaccccggttctgcaatcatggctcaatgatgaagaacagcaggtggcgctgcgtttgctggagaaagatcgcgatcatcatcgggtactggttgatattactaatgcagtgctgtcacatcttgatctcgacgatctgatcgctgacgtcgctcgtgagatccatcattttttcggtctggcttcagtcagtatggtactgggcgatcatcgaaagaacgagaagttcagcctgtggtgcagcgatctttctgcctcacattgtgcgtgtctgccacgctgtatgcctggcgaaagtgtattgctgacacaaacgctacaaacccgacaaccgaccttgacgcaccgtgcagatgatctgtttctctggcaacgcgacccgttattactcttacttgcatctaacggctgcgaatctgcgctccttataccgcttacctttggcaaccatacaccgggtgcattgttgctggcgcatacctcttccactctctttagtgaggaaaactgccagctactacaacacatagccgatcgcatcgctattgccgttggcaatgccgatgcctggcgtagcatgaccgatttgcaggaaagtttgcagcaagaaaaccaccagcttagcgagcagctcctttcgaatctgggcatcggtgacattatctatcaaagccaggcaatggaagacctgctccagcaggtagatattgtggcgaagagcgacagtacggtgttgatttgtggtgaaaccggaactggcaaagaggtgatcgccagagcgatccatcaacttagcccgcgacgcgacaagccgctggtcaaaatcaactgcgctgccatccccgccagtcttctggaaagtgagttattcggtcatgacaaaggggcgtttactggtgcgattaatacccatcgtggtcgttttgaaattgccgatggcggcacgttgtttctcgatgaaattggcgatctgccgttagaacttcagcctaaactgctgcgcgtattgcaggagcgggagattgagcgtctcggcgggagtagaacgatcccggtgaatgtcagagtcattgccgccaccaaccgtgatttgtggcaaatggttgaagatcgcggagtgatctaa

SEQ ID NO: 21784 - DNA, 2860 bp, Homo sapiens
  SIMILAR (2806)..(2141): 891254mologous to Escherichia coli Bacteriophage n4 adsorption inner membrane protein NfrB,accession number D90699,Smith-Waterman Score=1050.
ctatatttgggggcaaaatccccatatctttatcctggactctagaagttgacatgatacactcgatctcggtacccgatttacatgagcacatttcaggcgtccggcaatgggcagcagctgcagatcgcgcggatcgtcattcaaaacatcaccggttagttttagcacgcttcggcgcagcgtgatgagctgcgcccgcgcttcgttaggatcgttttgtttactgatccatagcgattcattgctggaaaaggtgtggttatcgggcgcgtgtgggctatgaaacccgcgcgtcgcacgctgtagttccatatcgaggccacattcaccttcggttgttaacgccacgccaaccatattcccggcataggaaatggaaaacgaaggcaaatttttatcactgaaaaccggtttaccctttcggcagggtgacggatttccggcaattccgccaatgcccatacagcatgaacatcagttctgcgagtaaacctctggacgccagaaaacggctttgacgatgagggggaatgtttcgggcttcttgatgacactgggaggggagacgaacagaaatcagatgtccttccgttaaaatccctcgggcaaagtgagtcgccatttttcgctccatgcttaatggtccattatgaatacaagagtaatcatttactggaagccgtcgttcgcggtggtgcggacgttgtgcgtctgccgaaaaccgataccgctcaggatgttgcttccgagcgtttgatcggtatcgccctcggtgcagaagactatgtgcgcaacctgcgtacagaacgctccccggaaggaactgaactgctgttcgcacgctgttccattttgcaggccgcgcgctctgcgggtaaaactctgccgaggctgccagtttgaaggtgccgccctcttgcagataacgactcaggtcggcaagcgaagtgagtttatttttctctgccacatcctgacgcacggcgatagtccaggtgttatttgcaggcgcgggcgtcagccagattaacttgttgtgctccgaatcgagctttttgactttctcgtaaccttgctgcgcgtttttccacgctgcatcgttttcatctttaaagaagaaagcgccattgccggtatattccggatagatatccagttcaccggaagtaatcgccccgcgcaccacaggagtcgttccgagttgcactttattcaccgtcggtacgccgtggctttccagcacctgcaaaatgatattgccgagtagcgcaccttcggtatcgatttttgaaccgactttaacgggggaagccgcctgtagcggcaggctcacggctgccaacataaccagtgaacggcagctttcataataggcctgaatctccatcatgcgagtgcgatgacgctggtaacgacgccaggcatgtacgccattgtaaatggcgctacccagcatcgtcagtagcagcaatgtggtgctgagatagcgccacaggccggaacgatccgggatcggatgaaggccaatatgctgcgtaccattggcgtcagtgaagatttttgtgacgataccctcggcgttaaacggcgtatgcatcagcatttgtgccagtttctggaaagcgttccactgttcttgcggcgggtagtcgtaaagtgatgccgaaggccagggctgatcaacaaaatcgctgccttcgtcgctgacaatcaggaatccgccgggggccggactgtttagtgattgtgccgctcgcgccgtttcatgcgtgataaacggcgcggtggaggttgccaccaggttatccagcgattccgcactcaccgggcgtaataacacattcacgccatcgagcttcccggcgttggcgcgttttaccagcgcgtcccagtctttactgttgccgagattgaccagcgcatttttcagtcgcacacagtcatcatggcttcggcagcggcgggtagtaacagctgggtacaggtgaaaacacaccgcaccattggcgatgccgtcgctcatctcaaaggccagggcatgcagattctggcaacccatctttctgataacgctgtcgatttccgcgaaattgattacactcgcccgacctgcattttgatgggacaggagaaaacgggcatcacgcaggaagcattggccctggcggatcaggacatcatcattccgatgatcggcatggtgcagtcgctgaatgtttccaatgtaagtcatgctggtgaagtgcgtccattcgcgttcgaacggatacaccgggatctgaatcagatctttacgctcgaccagatagttgaacagacgcaattccatcggtgaaatcacatcttcggcgtcatgcagaataaaaccagcaaaagcgaaattggcgctacgctcaaattgggtgatggcgtccagcacgttgttcagacagtcggctttgctggtggggccaggacgcgcgcagactaccttatgcacattcgggaagcgagcgcacacttcgtcaacatcacgctgagtatcggggtcgttggggtaggtgccaacaaagatatgatagttttcgtagtcgagcgtggtcgccgccagctcggccatattgccgatgacgcccgtttcattccacgccggaaccataatcgctaacggtttttcatctggtttatacagttcgcggtaactcattcgcgggtagcggcgataaacactcaacttgcgtttaatgcggcgtacccagtagacgacatcaataaaaaaatcgtccagcccgctgatgaacatgatgaccgctaacgttatcgcgtttgtcgttaaacgatcgtcatcttgaaaagccgggacaccacgagtccgcat

SEQ ID NO: 21785 - DNA, 2729 bp, Homo sapiens
  SIMILAR (1047)..(109): 871254mologous to Escherichia coli K12 putative inner membrane component for iron transport,accession number AE000162,Smith-Waterman Score=1346.
ttatggcaggcgttggtctgagcgccggtagcggtattgattgcggcggcaaaccgttcgcacatgccttacagtaagtcgccaagcggtgtcgcgctggaatgtaaagacggtcgtattttcagtggcagctacgctgaaaacgccgcattcaacccgactctgccagaaccgcgcgctgttggatacgacttctagctcggtactttccagccgctcgtcaagctcagaaattacgcctggcaccgttcgcgctacttcttcaatttgctcagccatcgcgtcgatatccgccagcacagtgccggaaactttaatgccgatggggcttttaatgccggttgagagcatatcgatacggttacgaattggcggcacccacagattcgccagccccggcagccgcacggtgttatccagttcctcaatgattttgtccatcgtcatgcctggccgccactgctcctgcggcttaagctggatggtcgtttctaccatctccagcggagcagaatcggtggcggtttccgctttcccggttttgccaaatacccgcgccacttcaggtacgctcataattagcttgtcggttttttgcagcatactcgccgcctctgctgcggaaatccccggcagcgtcgatggcatatacaacaagtcgccttcattgatctgcggtaaaaattccccgccaactttattgagcggccagagaaccgtcagcaccgaaagcgccgccaccagcagcgtggttttcggccagtgcagtactttcagcaacagcggatgataaacacgaatcaaaaagcgattgagcgggttactgctttccggcggaattttgccacggatccagtagcccatcaggatcgggatcactacgatcgccagcagcgccgcacccgccatcgcatacgttttggtgaacgccaacgggccaaacagacgcccttcctgcccttccagggtgaagatcgggataaacgacaacgtgataatcagcagactgataaatagcggatgtttaacccgttctgcccgggaatcttgggcgtaagccaagtcttgctcccaggtccaggtcccattggtggtaaatgccaggtttgtctggatattgaaaaatgatgtgttggatggctgatgagtgctgtgctgaaatgcagtgagctggaaattgcgtagcgggtgatgcctgccagccagcatcaacgccgcactgtgcttgcggctacgctcatagcgacgcagataaatgtactgcccgatgtctttcccctgacgatgcaaccgtttcagttcggcaatcagctctgcagcatccataaagccgagatttaccccctgccccgccagcgggtgaatggtatgtgcggcgtcgcccaccagcgccagacggtgcgaggcaaactggcgcgcataacgccccgtcagtgggaacacctgacgcgcgctctcaaccttgcataagcccaggcgattatcaaaagcgatatttaacgcgcgattaaattcgtcttcacttgcctgctgcatccgctgcgcttcctcgctggcgcaaatcatcagcatggtgtggaactgcgggtcaatctgctggctacaaacgacggggttcatgccccatgaagccccagcgcatacagtggcataaaggcaacgaagaagccgatgatccagaaccagaacgcgcgtttaccccaggtttcgttcagtttgaaaccgaacgctttaggccaccagtaggtcatccctgcgaagcagccgaagaccacgccgccgatgatcacgttatggaagtgcgcaatcaggaacaggctgttatgcagaacgaagtccgcgcccggtacggccagcagcacgccagtcatcccgcccaccgagaaggtgacgataaaaccgatggtccacagcatcgcagaatggaacacgatgcggccctgatacatggtgaacagccagttgaagatcttcaccccggtcgggatggcgataatcattgtggtgataccaaagaaggcgtttacgttcgcgcccgcacccatcgtaaagaagtggtgcagccaaacgatgaacgacagcacggtgatacagacggttgcccataccagcgaggtataaccaaacagacgtttacgcgagaaggttgccgcaatttcggagaacacaccgaaaacaggcaggatcaggatgtaaacttccgggtggccccaggcccaaatcaggttgatgtacatcatcatgttgccacccatatcgttggtaaagaactgacttggaaaggattttgacaccagaaacataccagagtgtctatctaaagtgaacatcgactgcagacagcaagtcgactctctaccgttgatggttgcaagcgttttttcaccactcaaccaggtgtggttgatcgcgctttgttcggcatgaacggtttgctgcattgtcgcaccaataaattccatattggcaccgaaataccaggttccgctcacaccgcgcgcaattgcgccaacattaaaattcgacaatggcgtacgcgcacaggccgccgccagcggaagtagtgcgaatgccagcgcgtcttcgtccagccccgttgcgctcttcagcgatgagacttgctccccggtcaacaaagcggggaagtacttgtctgccagaataggttccagtgcagattgcaagttatccgcaagttgggcaaaagcggtttgaaaacgtggatgcat

SEQ ID NO: 21786 - DNA, 1149 bp, Homo sapiens
  SIMILAR (136)..(1131): 861254mologous to Escherichia coli acetohydroxy acid synthase (AHAS) I,accession number J01633,Smith-Waterman Score=1412.
atgactacttccatgctcaacgcaaaactactaccatctgcgccatccgccgcagtggtcgtcgtgcgtgtggtggtggtcgtcggcaatgcgcccacctcccggaaagtcggcccagaagaaaaggactggagcatggcaagttcgggcacaacatcgacgcgtaagcgctttaccggcgcagaatttatcgttcatttcctggaacagcagggcattaagattgtgacaggcattccgggcggttctatcctgcctgtttacgatgccttaagccaaagcacgcaaatccgccatattctggcccgtcatgaacagggcgcgggctttatcgctcagggaatggcgcgcaccgacggtaaaccggcggtctgtatggcctgtagcggaccgggtgcgactaacctggtgaccgccattgccgatgcgcggctggactccatcccgctgatttgcatcactggtcaggttcccgcctcgatgatcggcaccgacgccttccaggaagtggacacctacggcatctctatccccatcaccaaacacaactatctggtcagacatatcgaagaactcccgcaggtcatgagcgatgccttccgcattgcgcaatcaggccgcccaggcccggtgtggatagacattcctaaggatgagcaaacggcagtttttgagattgaaacacagcccgctatggcagaaaaagccgccgcccccgcctttagcgaagaaagcattcgtgacgcagcggcgatgattaacgctgccaaacgcccggtgctttatctgggcggcggtgtgatcaatgcgaacgcacgggtgcgtgaactggcggagaaagcgcaactgcctaccaccatgactttaatggcgctgggcatgttgccaaaagcgcatccgttgtcgctgggtatgctggggatgcacggcgtgcgcagcaccaactatattttgcaggaggcggatttgttgatagtgcttgaactggcgggcgtccagactgtcgacactgacgttaatgccagtaagcccgcatcggccactcgccacatcgcgttccagacggtaaccattggttgtgaccgcaatctggcggatagcgtcgttttcccgcacagcgtcgatgatatcggtaaagtcgcggcgtaa

SEQ ID NO: 21787 - DNA, 1363 bp, Homo sapiens
  SIMILAR (490)..(176): 741254mologous to Citrobacter freundii valine-sensitive acetohydroxy acid synthase,accession number D89674,Smith-Waterman Score=411.
atgattatcgccatcccgaccggggtgaagatcttcaactggtgttcaccatgtatcaggccgcatcgtgttccattctgcgatgctgtggccatcggttttatcgtcaccttctcggacgtgatacagatagcctcgatctacgaaataccttgcagggaccctactggtgtcgcatctactgaatattcatcatcaagctgccgtcgccggagaaacacaacactttgcgatccgggttcgccagcgcagcgccaatcgccgcaggcaggccaaaacccatcgtgcccagcccaccggaggtcagccactggcgtgggcgattgagcggataagcttgcgcggtccacatctgatgctgaccaacgtcggtggtgataattgcattgtcatctacacaagcggcaacggcgttgatcaggccgaatggcttaacagatcgcacgctttcgggattggacacggaaactcacctctgcacggtcgatatcgacatgatgattttggcattcggacaaaaactgctcgttttgccaatctgcccggcatcaaaaagcgcaccgagcactatcgacagatccgcctcctggcaaaaatagttggtgctgcgcacgccgtgcatccccagcatacccagcgacaacgatgcgcttttggcaacatgcccagcgccattaaagtcatggtgagatgccgtaggtgtccacttcctggaggcgtcggtgccgatcatcgaggcgggaacctgaccagtgatgcaaatcgcgggatggagtccagccgcgcatcggcaatggcggtcaccaggttagtgcacccggtccgctacaggccatacagaccgccggtttaccgtcggtgccgccattccctgagcgataaagcccgcgccctgttcatgacgggccagatatggcggatttgcgtgctttggctaatgacagagtacaattcgagccgggtgaaagctggcatacacgaagatgccattccgaccattcataacagttcgcaggtggcgcaatatgccattgtgcgcacgtaccgtgtgtcacaccatcacgtcctggtccgcggacatcgcctggtaactgccgaccccacctgctccaacagcacccgtcataacggtgaaagcagactaaggaaatggaaaacgaggcaaatttttatcactgaaaaccggtttacctttcggcagggtgacgattccggcaattcgccaatgccatacagcatgaacatcagttctgcgagtaacctctggacgccagaaaacggctttgacgatgagggggacatgtttcggcttcttgatgacactgggaggggagacgaacagaaatcagatgtcctccgttaa

SEQ ID NO: 21788 - DNA, 450 bp, Homo sapiens
  SIMILAR (135)..(422): 951254mologous to Escherichia coli Hypothetical 16.8 kd protein in nfrA 3'region precursor,accession number D90699,Smith- Waterman Score=477.
ccggcgagacgcattacgacgcctggccgcacaaagtcagtctcggcgtcgagtatcaacatacctttaaggcgattaatcaacgtaacggagagcgcaacaacgcgtttctcaccattggagtgcactggtaaatgcgtaagttcattttcgtattgctgacactgcttttggtcagccctttttcctttgcgatgaaaggtattatctggcaaccacaaaaccgagatagtcaggttaccgatacccagtggcaggggctgatgagtcagttacgtttgcaaggcttcgatacccttgttttgcaatggacccgttacggcgatgcatttacccagccagaacagcgcacgttattgtttaagcgggccgcacatgcgcaacaggttggtttgaagcttgttgtcggcattaacgccgatctccgggtacggagcttgaattcgtaat

SEQ ID NO: 21789 - DNA, 447 bp, Homo sapiens
  SIMILAR (16)..(219): 1001254mologous to Escherichia coli glutamate synthase, large subunit,accession number U18997,Smith-Waterman Score=362.
atgaactatctgcttgtcgatgagcgccagagcaaaaccttctggttcgatattcgcaacaccgaccgttctgtcggcgcgtcgctttcaggctatatcgcccagacgcacggcgatcaggggctggcagccgatcctatcaaagcgtacttcaacggcaccgcaggccagagcttcggcgtgtggaacgcgggcggcgtggaactgtacctgaccggtttcatgatgttcttttcagctttgaagaggctctaccatagtgggatttcaaaactcttaagaagaccagccatcaagccagccatccagccagccaaccaactatccatccacaatttgtggacacaattccggcattcaaccaaaattccagttgaatgggtgaatggtgaatggctgaatggacgaatgccaggggatcatcatgaatggcaatgcaactatcag

SEQ ID NO: 21790 - DNA, 499 bp, Homo sapiens
  SIMILAR (475)..(176): 1001254mologous to Escherichia coli tdcC,accession number M23638,Smith-Waterman Score=510.
catcggtatcgccaaacatgctcagcagttgctgctcaatgttatgcagacgcgcgcagtaggcgcagaagtacagaccgtgagtgccactggcagtgccgtacggcaggctctggcgaacaatcttcagccctttgccatcttctttcagatcaacgcgggtgatagcgtgcgggacgttatccagacgaccacggtatttcgccagagacggcgctttacggatggcatacatcggcaacaggcacagcagggatgcgataatcggtgcgcccatggcttcaatcaggtcaaggatgttcgggttggcgtaggcaacaacccaggtggagcccatgatgaagatcatgctgatagtgttcagtttacccagcgacactttagttttgtcgcctttataaccaaacttcaggaccaggccattcagaccttccagcgttcccagatagtgaccgaagaaagatttgaagatagcccgagtgcgatgatggagccgcat

SEQ ID NO: 21791 - DNA, 777 bp, Homo sapiens
  SIMILAR (109)..(561): 951254mologous to Escherichia coli O157:H7 putative oxidoreductase,accession number AE005537,Smith-Waterman Score=719.
atgcagcacctgtctcacagttccggaggcaccgatccatcttttggaaaggtctccgggaggtcgatgtcaaggaaaggtttttctcccgcgcgcaggtgggagttaggggctctcccacatgttaaagtgatcatcctcgccgggatttttatcggcgtactgtattccgtctcctcggtgctgattaacgtcttcgtcagcagcaaagagttgaaatttaccggcggatcggtgcaggtattccacggcatggcggcgtattttggtctaccggaagcgttgatgaatcgctttgtcggtctggtgtcctttaccgcgatgttcggttccctgctgatgtggaccgcaacgccggtgaaaattttcttctccgaaatcccggaaggcatctttggtaagaaaaccgtcgaactgaacgaaaacggcgttccggcgcgcgcagcgtggatccagttcctgatcgtcatcccgctgatgattatcccgatgctcggttccaataccgtgcaggatctgatgaatactattattaatatgaccgccgcagccaccctaatccgtatctttgcccttcatgagttacatcgactgaaagaacatggcttaacgcgcggggcgcttctcgattatcacagccgctataaactcgtctttctggcgcattctcagccggagtaccgcaaacttggcccgttcgtggctgatattcaccagtggcaaaatctggatgactattacaaccagtaccgccaacgcgtagttgttttgctttag

SEQ ID NO: 21792 - DNA, 1642 bp, Homo sapiens
  SIMILAR (982)..(386): 961254mologous to Escherichia coli glutamate synthase, large subunit,accession number U18997,Smith-Waterman Score=1001.
cagacatatccggacgccagcccatctcgaacgctttatcgttgatatagcgctcaatgttgccgatggtcaccgcgccaaactcatcgttcagagtgcaggaaccttcgcacagacggtcttgcgggcagactcgtccgcaaacttccggcagggtgttggtctggtgcgacagttccgccgcttcaaaaatacgcccctcgttggcgagcttcagccagttcgggatgtagttgtgtaccgggcatttccactcgcagtatgggttgccgcacgacaggcagcggtcagcctgcgctttggcctggccttcggaaaacggctcgtaaatttcaacaaactcaattttgcggatcttcagcggtttctttggcggatcaacgcggcgcaactcagctgcgctacgactacggtgacccagcagtgcttttacatcactggacttcggtttaaccagcgcaaatttagtggcgaaggttgaccagttcgccagaatctcttcaccgcgctgagagccggtatgctgcacatgctcggtgataagaccacgcagatgctcttcatggatcgccagagcgtcaacgcttaagacctcgaccagttccgggttaacgcgtttgcggaaatcgccgctttcatcgagaacgtaagcgaaaccgccggtcatgcccgcaccgaagttaacgccggttttacccagaatgcagacgataccacccgtcatatattcacaaccgttgtcgccaatgccttctaccacggtgatagcaccggagttacgcacgccgaaacgttcacccgcgcggcctgcggcatacagacgaccaccggtcgcgccatacaggcaggtgttgccgataatgcttgcttcatggctgcggaaggcggaaccaaccggaggacgaatggggattaagccgcccggcatgcctttaccgacatagtcgttggcatcaccggtcacgtgccggtccacgccgccgcgttccctgctgcctgacgtggtgtttccgcccgctgcgcggctgcccggcgcatgaccacgacgttttttctgacgcttgcgatcacgagcttcctgatccagctcctcgcgtgtttttcgacgcgcttttgcatgacctttgctgcgtgagtttgaagatgatggtttcataatggttcgtcttttagccgttttattcagtatagatttgcggcggaatatcctgtctagtgcaccgtcttcatgggcttcgagggtgaaatcaacgggcataaaggtggtcgggcgatgatgttgcggccagttaaactcaatcccaccggaaatccacggccccagcagccccaccagcgcaggtttaatgacttcattgtgataaacaaaatcgcgctgtttcactttatcccacgcgcgatgcacccgaccgcccagttccggcaggatcatcactttgatgtagtcgttttccagccacaccgcctgccaggatttcagggttttctgctcgctcagcgtatcggtcacgccgtagggataaaccgcgccggacgatccctgataaacgcgattttccaggaacatgggatgtatatcctgcggcccggtttcataggtcgggatctcaacgcgctcttgccacacttttactggagtcat

SEQ ID NO: 21793 - DNA, 699 bp, Homo sapiens
  SIMILAR (368)..(442): 1001254mologous to Escherichia coli K12 putative membrane protein,accession number AE000181,Smith-Waterman Score=131.
gcagccttgaaccaggcgcaggcgcaatgggcgcaggcggagttaaatttacagggctcaacgttgatagccccgtctgatggcacgctgttaacgcgcgcggtggagccaggcacggtcctcaatgaaggtggcacggtgtttaccgtttcactaacgcgtccggtgtgggtgcgcgcttatgttgatgaacgtaatcttgaccaggcccagccggggcgcaaagtgctgctttataccgatggtcgcccggacaagccgtatcacgggcagattggtttcgtttcgccgactgctgaatttaccccgaaaaccgtcgaaacgccggatctgcgtaccgacctcgtctatcgcctgcgtattgtgggtgaccgacgccgatgatgcgttacgccagggaatgccagtgacggtacaattcggtgacgaggcaggacatgaattkatgccgttatcacggtgaacggcctgggraaacggtttccgggcatggacaagcccgccgtcgggccgctcgattgtaccattcacgccggttatgtgacggggttgggggggccggtacccaattcgccctatagtgagtcgtattacaattcactggccgtcgttttacaacgtcgtgactsggaaamcctggcgttacccacttaatcgccttgcagcaaatccccctttcgccaactgggtaatagcgag

SEQ ID NO: 21794 - DNA, 4450 bp, Homo sapiens
  SIMILAR (3054)..(2329): 991254mologous to Escherichia coli high-affinity choline transport protein,accession number U73857,Smith-Waterman Score= 1260.
tcatttgcggagtggagataggagcaccgttggcatccgcctctccacgctggtgacggtgaagtgccggatccatgcggcccggagaacagcacctagaatgcagggagagctctctacgagcattgacatcacgcaaggcttgatgtcttggtaggtgacctgctggtggtagtaggagcccccgccggccgagtgcatggaagaggacgccatggcgttgaaagagaagacaaactcctttcggtcacacatgctgggcgactgcgagtgataccgcgggatgcctgccagaagcatctgttccctggggatgtggaggggcaggagcaggagcaactccatactgctggacctgcataacggacgtcctgccactgggaccatgagctcgcatgatgtacggtcacacgctgggcagaataagcgggtgatagtgcctgccaagggccgattaaagttgggggtgaacagccagtctattccctttttaatggaaacgatggcctccgagtccctttgtgactcctgtatgaacatgtccaccacggctagcacgtgtctcaagatgctgatgttcggcagctccttgttgcctgctcgtatctgtagacgaggcccagactcgtgatatccccatgacctatcactgccgatgtcaaactcggtcacttggttaccgtattgtatgccagatttctcctctgcaatgctcctgtcattctctgtccacactctgttcatgacaccgtcctttctggttatctcacctttgagggcatcacccgccaccattacaacctggtattctgccgacatctgctttccttgtttttctgtggggaccatcaaggccaacttcggggagcagctgtgacgagggcgatcctggtcccagaccctggcagtgaatctcctcttaggggtgagtgactgagcacgccgcttattcaggggcctgtgcggtctgggtcgcctctgggccagcgggttctcactcgcccccgtcaggcccgcggcgcccgagacaaagcggccgcgactcgtgctgcgctttcgttttccgcctgcgctctgccccggcggctgcccgcccgctcgcaagctgctgggcgagtccgaaaaatcccgggagcggcgcagttcttcccggggcggggagagtgggtaggcggtccctcgcgggaacttagccggcccggcccgcgaggaccggagtcgagccggctgtgccaggttatagacgagaaagcgcagataatcgttggcgttgatattcagtgcggcaaactgttcagcttcttgctcaaactccgccagcacatcggttagctgcttgttggagatctgcgtgacgttcgccattgcagcgctcagggtttgtacttcacgctgggagaggtgcttgaacacctctgccgcccggtcttcgccaatggtcatcagcaggatgacgcttttatcggtgccgccgcgggcatcgccgtccactttggtcaacactacgccggtaagcggtaacgcttcattgaatgcttttgccgtattggccgcatcctgaccggtcatggcgtcaaccacaaacagggtttcaaccgggttaatcgacgcatggacttgtttgatctcgtccatcatcgcttcgtcaacgtgcagacgaccagcggtatccaccagcagcactggagcgcgatttaaatggttgcttccgtggaaagcgtattccttgccggggcgctcggcgatcagccagtccacatccacctcggccagctcctcgcgctgtggcgccccttggtagccggcatcggctgagacaaattgctcctctccatgcagcagattacccagctgattgaggtcatgctcgttggccgcggtggtgaccaggctgtgggtcaggccactcttggcatcgacaccaatgtgggccttcatgccaaagtgccactgattgcctttcttggtctgatgcatctccggatcgcgttgctgctctttgttcttggtcgagctgggtgcctcaatgatggtggcatcgaccaaggtgccttgagtcatcatgacgcctgcttcggccagccagcgattgatggtcttgaacaattggcgggccagttgatgctgctccagcaggtggcggaaattcatgatggtggtgcggtccggcaaggcgctatccagggataaccgggcaaacagacgcatggaggcgatttcgtacagagcatcttccatcgcgccatcgctcaggttgtaccaatgggctcgatacttccggtaccgagctcgattgtaaatggaagaagtggcgcaggagttgcggttgcgcggcgcggtatcgcggttggcactttcacggcggtaatcttctaccttcagagatttatacaaccccgccatcacgaagaagatcacaaagctgaacggcagccccataatcaccgtggtgttttgcagcgcggatatcccgttagtcatcagcatgccgagcgtcagcaggccaatcgccaccgaccagaagacgcgcagccagccgggggcgtcgctgttgatatctttaagctgcgaggtgaaattccccagcaccagcgccccggagtccgccgaggtcacataaaacagcaggccagtaatggtggcgacggaggcgctaaaggtaaacgccggatactgcgccagcaggctgtagaagccgcgctccggatggaccatcgcttcctcggcaaatgccgcgccgccgtggatgatttcatacagcgcgctattgccgaacaccgagagccataacagcgtgaaggtaaacggaataatcaacgtgcccagcacgaactggcgaatggtacgcccacgcgagatacgcgccaggaacaagccgacaaacggcgaccatgccacccaccatgcccagaagaagagcgtccagttattcatccactcaaccggacggtcgaaggcaaaactgttgagcgtcatgcccataaagcgattcacatagtcgccaacattcagcaccagtgcattaagcaggaacgaagtgtcgcccataaacatacgaacaggatcaatatgtcgcgatacagcgccggcggatcggtgcaggtattccacggcatggcggcgtatttggtctaccggaagcgttgatgaatcgcttgtcggtctggtgtcctttaccgcgatgttcggttccctgctgatgtggaccgcaacgccggtgaaaattttcttctccgaaatcccggaaggcatctttggtaagaaaaccgtcgaactgaacgaaaacggcgttccggcgcgcgcagcgtggatccagttcctgatcgtcatcccgctgatgattatcccgatgctcggttccaataccgtgcaggatctgatgaatactattattaatatgaccgccgcagcgtccatgcttccgccgttattcatcatgctggcttacctgaatttacgcgccaaattagatcacctgccacgcgatttccgtatgggctcccgccgcaccggtattatcgttgtttcaatgctgattgcgatatttgccaagcgcattgctcttggcgatttgttgatgaaagccaattacggcggcgtggatgtcgaaatcgcggcagttattggtaaccacgatactttacgttctctggttgagcgttttgatattccgtttgagctggtaagccatgaagggttaacccgcaacgagcacgatcaaaagatggcggatgccattgatgcttatcaacctgactacgtggtgctggcgaagtatatgcgggtattaacgccggaatttgtggcacgcttcccgaataagatcatcaatattcaccattcattcctgccagcgtttattggcgcacgtccttatcaccaggcctatgaacgtggtgtgaagattattggcgcaaccgctcactatgtgaatgacaatctggacgaaggcccaatcatcatgcaggacgttattcatgtcgatcatacctacacagctgaagatatgatgcgcgcaggtcgtgacgtcgagaaaaacgtcttaaccgctcttaccgtgtctgggtgccagctctgcgggccagcaggttcatccccgcttcgcccatccgcgctcaggttcagacggcaaccaacatcggtaattggctcattgcaccaccatccaaatacccatgtccccccggtaaacgacggcggcgaacggtcgcatgagcagaaagcgtcaggcagtgttgtatccactcgctttagccggagcagcttctttcttcgctgcagtttcaccttctacataatcacgaccgtagtaggtatccagcagaatctgtttcagctcggagatcagcgggtaacgcgggttagcgccggtgcactggtcatcgaatgcatcttcagacagtttatcctcggacctgcaggcatggagctcattgggctcaagccctga

SEQ ID NO: 21795 - DNA, 459 bp, Homo sapiens
  SIMILAR (296)..(18): 1001254mologous to Escherichia coli uroporphyrinogen-III cosynthetase (EC 4.2.1.75),accession number M17360,Smith-Waterman Score=476.
atagatgacccttagtccagtgcggtggtgcgtccaatggcgaaataatcaggtagtcggggccatttacgatcttgctgatgcagctgtgattgggcaaaagcaaccgcgtgttgcgagagggcaaacaacagatcgctctcccccagcgctgccagttgatcagcaagttgcggtaattgttgacccggagaaaactcaatcagcggaaaatgccaggccacctgccccagtgtgcgcagacggctcactaactcttctccagcgggagacgggcgggtgacaaggatactcatgccggggcgtctccgttatagacttcagcgaggatctcgcgcgcgccgttattcagtagctcttctgccagcgaaatccccatttgttcggcatcttgcggcgcaccgccggcgtcaccgggaattatcttgcgaaccgtccggcgcgccgaccagcgcacgc

SEQ ID NO: 21796 - DNA, 1560 bp, Homo sapiens
  SIMILAR (555)..(4): 961254mologous to Escherichia coli periplasmic protein,accession number U28377,Smith-Waterman Score=951.
ttacggtaccggattgaccaacagttgcccaatcgagccacggtcggccatttccagcgtctgactgttgaagtagaacgggaagtgcgcccaggaaggctgaccgaaataaacaagcagctccacttgtccgtcaacccaaacggtatctttccagcctctgtcttccgggaacggcatcgcgccattcacgttacggatctggaacattacgccttcaatatggaacgcttgcggctcgtccgcgcgtaccgtccagcgttcccacgttccttgctgcgcggtgacatcaatacggttgacgtcccacagctgtccattaatacccgggtcatcacccagactgatatcgcgactgcgaattggcgaaccagccatgatttcagttggcagcaagcgcatcggaagactgtctgtgaccagcggcagaaggccggttgggcgcaccgttagcaccagggtagaaaccataatactggatggctcaaagaagccacgaatacgatcaacaatgctcggcgcttcgccacaggtgatccacactttatcgccgtgctcatatccaccaagccctagactaactcttcgaatcagcagctggcggaagggaacagagagcgcctcataggccgcaataccgctggtccagagcgtatcaccgccggtcgaaggtaactctttagctgccagaatcgcccctgcgggtggcgtttcaataaatgtcacatcggtatgccagttgtcgttatctggcggattatcgttatgggtatccagcacgatgatctcgtcaaccccttcggcatgcgggtaaacagggtgaatatgcaattcgccaaaacgctgggccagcgcgcgttgctgctgcggcgtaatagcttgatcgcgtagaaacaccacctgatggcgcagcaccgcatggtaaagctgttcaaactgattatcgcttaacgggcgcgtcaggtcggcacccgaaatttgtgcgccgatatacggccccagcggggtaatgctcagacgttcactcattgtacttctccatgccagggcgtcaggcggcgccagttctaaaagaaagccgataatcgcaatcaccgcgatccccgccagcaccacgtcagttgcgagaaattcacccgctgactgaaccataaatcctaaaccgcgcgtcgcggcaatcagctccgccgccaccagcgtagaccagcccacccccagaccaatacgtaatccggtgaggatttccggcagcgcaccgggcaaaatgacaaaccacagcacctgcgcacggctggcacccagcgactgggcggcacgaatgcgaacctgctgcacgcttttcacccccgccagcgccgacatcgccaccggtgcaaaaatcgctaaatagatcagtaagatcttcgaggtttcaccaataccaaaccagatcaccatcagcggcaaataagccagcggcggcaccggacgataaagctcgattatcggatccagaatgccgcgtaccgtagggtaagtcccatcgcgatcccgaccggaataccgaacaacaccgtgcat

SEQ ID NO: 21797 - DNA, 1690 bp, Homo sapiens
  SIMILAR (854)..(1690): 981254mologous to Escherichia coli BEM46 PROTEIN (FRAGMENT),accession number D90883,Smith-Waterman Score=1441.
atgccggggcgcactccgggccatcgcaccccgctttggcaacaacggctgcgcgccagtcagttgctggaaatcgctcagggatatccggattttccggtcattctcgaaaccctacgcgaatgtctgcaagatgtttatgatcttcccgcactggaacgtttgatgcgtcgcctgaacggtggcgaaattcaaatatccgatgtaacgaccactacgccctcgcctttcgccacaagtttattgttcggctatgtcgcggaatttatgtaccagagcgacgccccgctggcagagcgccgggcatccgtactgtcgctggacagcgagttactgcgcaatctactcggacaggtcgatccgggggaattactcgacccgccagtcattcgccagtggaagaagagtgcacgactggctcctggcagaagaccgaaagtgaaaaagattgttcgacctgctgcgcgaactgggccaatgaccgtacgccactacctacatcaacatcgtcggcaaactgttcaacgaatgtgcagacttccgtcgtaccggttctgcggcgctggatctggcttacgtcgctgcgggtcgtgttgacggtttctttgaaatcggtctgcgcccgtgggacttcgccgcaggcgagctgctggttcgtgaagcgggcggcatcgtcagcgacttcaccggtggtcataactacatgctgaccggtaacatcgttgctggtaacccgcgcgttgttaaagccatgctggcgaacatgcgtgacgagcgctattccgaaatacttcctcactgctttactttctttcgtcactctcccaccatctttccccgattaatggatgataaagaagtcgcaaggaaggttatggcactgccagtgaacaaacgcgttcccaaaattctgtttattctctttgttgttgccttctgcgtttatttagtgccgcgcgttgccatcaacttcttctattatcccgacgataaaatttacggtcccgatccctggtcggcggaatccgtcgaatttacggctaaggacggtactcgtctgcaaggctggtttatcccttcttcgacgggccctgctgacaacgccatcgcaaccatcattcatgctcacggcaatgccggaaatatgtccgcccactggccgctggtcagttggttacccgagcgtaatttcaacgtttttatgtttgattatcgcgggtttggtaaatcaaaaggcacgccgtcccaggccggattgctggacgatacgcaaagtgccatcaatgtggtgcgccatcgcagtgatgtaaacccacaacgtctggtgctgttcgggcagagtattggcggggcgaatattctggatgttattggtcggggtgatcgtgaaggcatacgtgcggtgatcctcgactccacatttgcctcttatgcaaccatcgccaaccaaatgatccccggcagtggctacttacttgatgagagttacagcggcgaaaattatatcgccagcgtcagcccgatcccgcttttactcattcacggtaaagctgatcacgttatcccatggcagcacagcgaaaagttgtatagcctggcaaaagagccaaaacggttgatcctaatcccggatggcgaacacattgatgctttttccgatcgtcacggcgatgtttatcgcggacagatg

SEQ ID NO: 21798 - DNA, 973 bp, Homo sapiens
  SIMILAR (817)..(191): 961254mologous to Escherichia coli threonine-serine permease,accession number U18997,Smith-Waterman Score=1007.
atggcaaattcactgtctctgtttgagcagaatgcattttccgagttaataccgtcggcaatacctgacattaatacttcacagtcgctggcatcgagcacggcaaaacttaatcgaagacgaaccacagttaataaccaaaacaaccggaaattcattcatctcttttctcatcctgagttacggattaaaacagttggtatacgatgttcaggatggtcagcagaccaatcacggtactaaacacgttatccagacgaccacggtatttcgccagagacggcgctttacggatggcatacatcggcaacaggcacagcagggatgcgataatcggtgcgcccatggcttcaatcaggtcaaggatgttcgggttggcgtaggcaacaacccaggtggagcccatgatgaagatcatgctgatagtgttcagtttacccagcgacactttagttttgtcgcctttataaccaaacttcaggaccaggccattcagaccttccagcgttcccagatagtgaccgaagaaagatttgaagatagccacgagtgcgatgatggaagccgcatattccagtgtaatcgagaacgttgttttggtaccggtcatggacgcaaagtggttagccagatgagaaagcactggaatattctgcgctttggcttccgccatgttggccggagacagagtaaacaggcagctaaaggcaaagaacatcaccactgcaaccatcagcatgctggcacgagaaatgatttgggaacatttacgttcggtgaagtcgcgaccgaagtcttttttctactttttacgctttagaaacccccaaaggaaaaaacatttggcggaaagtttaaggggaaaacccttggtggaaattccccccccacaccgtgatcaggataccgtcatgaccggttaacgccagcgaaccgaggtcaacctggtcgataactgcagagttccagtaag

SEQ ID NO: 21799 - DNA, 3610 bp, Homo sapiens
  SIMILAR (2392)..(2892): 951254mologous to Escherichia coli glutamate synthase, large subunit,accession number U18997,Smith-Waterman Score=843.
atgaatgatggttgcgatggcgttgtcagcagggcccgtcgaagaagggataaaccagccttgcagacgagtaccgtccttagccgtaaattcgacggattccgccgaccagggatcgggacccatggctttaacaacgcgcgggttaccagcaacgatgttaccggtcagcatgtagttatgaccaccggtgaagtcgctgacgatgccgcccgcttcacgaaccagcagctcgcctgcggcgaagtcccacgggcgcagaccgatttcaaagaaaccgtcaacacgacccgcagcgacgtaagccagatccagcgccgcagaaccggtacgacggaagtctgcacattcgttgaacagtttgccgacgatgttgataatgcattttccgagttaataccgtcggcaatacctgacattaatacttcacagtcgctggcatcgagcacggaaaacttaatcgaagacgaaccacagttaataaccaaaacaaccggaaattcattcatctcttttctcatcctgagttacggattaaaacagtttgtatacgatgttcaggatggtcagcagaccaatcacggtaacaaacacgttatccagacgaccacggtatttcgccagagacggcgctttacggatggcatacatcggcaacaggcacagcagggatgcgataatcggtgcgcccatggcttcaatcaggtcaaggatgttcgggttggcgtaggcaacaacccaggtggagcccatgatgaagatcatgctgatagtgttcagtttacccagcgacactttagttttgtcgcctttataaccaaacttcaggaccaggccattcagaccttccagcgttcccagatagtgaccgaagaaagatttgaagatagccacgagtgcgatgatggaagccgcatattcagtgtaatcgcgaacgttgttttggtaccggtccgagatagtcaggttaccgatacccagtggcaggggctgatgagtcagttacgtttgcaaggcttcgatacccttgttttgcaatggacccgttacggcgatgcatttacccagccagaacagcgcacgttattgtttaagcgggccgcagctgcgcaacaggctggtctgaagcttattgtcgggctgaacgccgatccggaattttttatgcaccagaaacagtcgtccgcagcgctggaaagctatcttaatcgcctgctggctgccgatctccagcaagccagattatggagcgccgcgcctggcataacgccggatggctggtacatcagcgcggaaattgacgacctgaactggcgcagcgaagccgcccgtcagcctttgctaacatggttaaacaacgcgcagcggctgattagcgatgtttcagcaaaaccggtttatatcagtagttttttcgccggaaacatgtcgcccgatggctatcgccaactgctggaacacgttaaagcaaccggcgttaatgtctgggtacaggatggcagcggcgtggataaactgaccgctgaacagcgtgaacgttatttacaggccagcgccgattgccatgatggcgcagcaccgcatggtaaagctgttcaaactgattatcgcttaacgggcgcgtcaggtcggcacccgaaatttgtgcgccgatatacggccccagcgggctccgccgccaccagcgtagaccagcccacccccagaccaatacgtaatccggtgaggatttccggcagcgcaccgggcaaaatgacaaaccacagcacctgcgcacggctggcacccagcgactgggcggcacgaatgcgaacctgctgcacgcttttcacccccgccagcgccgacatcgccaccgcgctgccagttgatcagcaagttgcggtaattgttgacccggagaaaactcaatcagcggaaaatgccaggccacctgccccagtgtgcgcaggcgtggagaccaccagcgcgatggtgtcttttgccatcgcattcgcactgacggtggcgcttagcgcaacagcggaaaccaggcaccgccagcaaaatcaccaccgctttgacgatcatctgactcgtaccgcccagaaccaccgcagcaatagcatccagctcatagccagtccccgccgtgggttgtgcggaggagagacgcgccacttcaatgatcccggccagcgatgccagcagaccacaaagagaatagacgatgattttgattttattgacgttgataccagaaagacgcgttgccgcttcgttgccgcccagcgcgtagatgtaacgccccagacgcgtgtgatgcagcatgtaccaggccgcgaggaagacaatccccatgatccagactggcgtcggtacgcccagcggacgaccaataccaaaccagccaaacagatcggcgttctcagtaaagccggctatatcgcccagacgcacggcgatcaggggctggcagccgatcctatcaaagcgtacttcaacggcaccgcaggccagagcttcggcgtgtggaacgcgggcggcgtggaactgtacctgaccggtgatgccaacgactatgtcggtaaaggcatggcgggcggcttaatcgccattcgtcctccggttggttccgccttccgcagccatgaagcaagcattatcggcaacacctgcctgtatggcgcgaccggtggtcgtctgtatgccgcaggccgcgcgggtgaacgtttcggcgtgcgtaactccggtgctatcaccgtggtagaaggcattggcgacaacggttgtgaatatatgacgggtggtatcgtctgcattctgggtaaaaccggcgttaacttcggtgcgggcatgaccggcggtttcgcttacgttctcgatgaaagcggcgatttccgcaaacgcgttaaaacgggaactggtcggagtcttaagcgttgacgctctggcgatccatgaagagcatctgcgtggtcttatcaccgagcatgtgcagcataccggctctcagcgcggtgaagagattctggcgaactggtcaaccttcgccactaaatttgcgctgcccgcattttcgccagtgcgcagtgcgggctatcagctggaaatcttcgagcgccgcagcttttttcagttgctgcaaaagcacgataacgacgatcggctgctggcgctgttattactgaatactttcactccccgtgcgcaactcgcctcggcgcttaatttgccagaaacgtgggtagcagagcgtctgccccggttaaaacagcgttatgaacgcacttgttgcctggccagccgcctgatcctgcacggtattggaaccgagcatcgggataatcatcagcgggatgacgatcaggaactggatccacgctgcgcgcgccggaacgccgttttcgttcagttcgacggttttcttaccaaagatgccttccgggatttcggagaaattggtttcgtttcgccgactgctgaatttaccccgaaaaccgtcgaaacgccggatctgcgtaccgacctcgtctatcgcctgcgtattgtggtgaccgacgccgatgatgcgttacgccagggaatgccagtgacggtacaattcggtgacgaggcaggacatgaatga

SEQ ID NO: 21800 - DNA, 722 bp, Homo sapiens
  SIMILAR (9)..(539): 1001254mologous to Cloning vector pSacBII SacB,accession number U09128,Smith-Waterman Score=934.
  misc_feature (1)...(722): n = a,t,c or g
aggatacccgtttattctacactgactattccggtaaacattacggcaaacaaagcctgacaacagcgcaggtaaatgtgtcaaaatctgatgacacactcaaaatcaacggagtggaagatcacaaaacgatttttgacggagacggaaaaacatatcagaacgttcagcagtttatcgatgaaggcaattatacatccggcgacaaccatacgctgagagaccctcactacgttgaagacaaaggccataaataccttgtattcgaagccaacacgggaacagaaaacggataccaaggcgaagaatctttatttaacaaagcgtactacggcggcggcacgaacttcttccgtaaagaaagccagaagcttcagcagagcgctaaaaaacgcgatgctgagttagcgaacggcgccctcggtatcatagagttaaataatgattacacattgaaaaaagtaatgaagccgctgatcacttcaaacacggtaactgatgaaatcgagcgcgcgaatgttttcaaaatgaacggcaaatgnagaataaacacaaaagaaatcaccaatccgtatgccatgcgtttatacgaatccctgtgtcagtatcgtaagccggatggctcaggcatcgtctctctgaaaatcgactggatcatagagcgttaccagctgcctcaaagtaaccaacgtatgcctgacttccgccgccgcttcctgcag

SEQ ID NO: 21801 - DNA, 2244 bp, Homo sapiens
  SIMILAR (1321)..(2241): 971254mologous to Cloning vector pZC320 SopB,accession number U26464,Smith-Waterman Score=1478.
atggcggaaacagcggttatcaatcacaagaaacgtaaaaatagcccgcgaatcgtccagtcaaacgacctcactgaggcggcatatagtctctcccgggatcaaaaacgtatgctgtatctgttcgttgaccagatcagaaaatctgatggcaccctacaggaacatgacggtatctgcgagatccatgttgctaaatatgctgaaatattcggattgacctctgcggaagccagtaaggatatacggcaggcattgaagagtttcgcggggaaggaagtggttttttatcgccctgaagaggatgccggcgatgaaaaaggctatgaatcttttccttggtttatcaaacgtgcgcacagtccatccagagggctttacagtgtacatatcaacccatatctcattcccttctttatcgggttacagaaccggtttacgcagtttcggcttagtgaaacaaaagaaatcaccaatccgtatgccatgcgtttatacgaatccctgtgtcagtatcgtaagccggatggctcaggcatcgtctctctgaaaatcgactggatcatagagcgttaccagctgcctcaaagttaccagcgtatgcctgacttccgccgccgcttcctgcaggtctgtgttaatgagatcaacagcagaactccaatgcgcctctcatacattgagaaaaagaaaggccgccagacgactcatatcgatctggctctgaaggggctacgtgttttgctcgtggaaggtaacgacccccagggaacagcctcaatgtatcacggatgggtaccagatcttcatattcatgcagaagacactctcctgcctttctatcttggggaaaaggacgatgtcacttatgcaataaagcccacttgctggccggggcttgacattattccttcctgtctggctctgcaccgtattgaaactgagttaatgggcaaatttgatgaaggtaaactgcccaccgatccacacctgatgctccgactggccattgaaactgttgctcatgactatgatgtcatagttattgacagcgcgcctaacctgggtatcggcacgattaatgtcgtatgtgctgctgatgtgctgattgttcccacgcctgctgagttgtttgactacacctccgcactgcagtttttcgatatgcttcgtgatctgctcaagaacgttgatcttaaagggttcgagcctgatgtacgtattttgcttaccaaatacagcaatagtaatggctctcagtccccgtggatggaggagcaaattcgggatgcctggggaagcatggttctaaaaaatgttgtacgtgaaacggatgaagttggtaaagctgccccgatggtggattcgttaattgcgcgcgtaggagtaatggctcgcggtaatgccattactttgcctgtatgtggtcgggatgtgaagtttactcttgaagtgctccggggtgatagtgttgagaagacctctcgggtatggtcaggtaatgaacgtgaccaggagctgcttactgaggacgcactggatgatctcatcccttcttttctactgactggtcaacagacaccggcgttcggtcgaagagtatctggtgtcatagaaattgccgatgggagtcgccgtcgtaaagctgctgcacttaccgaaagtgattatcgtgttctggttggcgagctggatgatgagcagatggctgcattatccagattgggtaacgattatcgcccaacaagtgcttatgaacgtggtcagcgttatgcaagccgattgcagaatgaatttgctggaaatatttctgcgctggctgatgcggaaaatatttcacgtaagattattacccgctgtatcaacaccgccaaattgcctaaatcagttgttgctcttttttctcaccccggtgaactatctgcccggtcaggtgatgcacttcaaaaagcctttacagataaagaggaattacttaagcagcaggcatctaaccttcatgagcagaaaaaagctggggtgatatttgaagctgaagaagttatcactcttttaacttctgtgcttaaaacgtcatctgcatcaagaactagtttaagctcacgacatcagtttgctcctggagcgacagtattgtataagggcgataaaatggtgcttaacctggacaggtctcgtgttccaactgagtgtatagagaaaattgaggccattcttaaggaacttgaaaagccagcaccctga

SEQ ID NO: 21802 - DNA, 2079 bp, Homo sapiens
  SIMILAR (1845)..(730): 941254mologous to Cloning vector pBACe3.6 levansucrase,accession number U80929,Smith-Waterman Score=1860.
ctatccacgcccattgatgtactgccaaaaccgcatcaccatggtaatagcgatgactaatacgtagatgtactttctcttcttttttggaggagtagaatgttgagagtcagcagtagcctcatcatcactagatggcatttcttctgagcaaaacaggttttcctcattaaaggcattccaccactgctcccattcatcagttccataggttggaatcactcgaatacttctatctacttcgtcagaataagggtgtctaacagctacaatcgtgtcaaaatccttttgtccattcgaaactgcactaccaatcgcaatggcttctgcacaaacagttactcgtcctatatacgcttcaatatgtactgccgaaatgatttctcctgttttcgtacgaattgccgctcccacatgatgtttattatcctcataaagcattgtaatcttctctgtcgctacttctactaattctagatcttgttgagaaatgttaaatgttttcatatattcttcttcctccgatttctggttgctgactaattgagatgcatgctttgcatacttctgcctgctggggagcctggggactttccacaccctaactgacacacattccacagctagcgctatatgcgttgatgcaatttctatgcgcacccgttctcggagcactgtccgaccgctttggccgccgcccagtcctgctcgcttcgctacttggagccatgtcagctgtccttgctccaggatgctgtttttgacaacggatgttttattgcctttgatgttcattaagaagcttggcgcaaatgttgcctttttatcctcgaagaagcctctgtttgtcatgtagcttgtgataaccacattgttgcctttggcttgcggcactgcgaagtgagagtaagtgaatgtcacatcgtttggatcaagacccatttgcagcacaagccctgttttgttcagcggcttgtaagggccggttaaagagtttgatacataaccaagcatgtaaatatcgtttgagttaataccatcgatcgtcatttttgaaccgcgtgaatcagtgaacaagtaccatttgccgttcattttgaaaacattcgcgcgctcgatttcatcagttaccgtgtttgaagtgatcagcggcttcattacttttttcaatgtgtaatcattatttaactctatgataccgagggcgccgttcgctaactcagcatcgcgttttttagcgctctgctgaagcttctggctttctttacggaagaagttcgtgccgccgccgtagtacgctttgttaaataaagattcttcgccttggtatccgttttctgttcccgtgttggcttcgaatacaaggtatttatggcctttgtcttcaacgtagtgagggtctctcagcgtatggttgtcgccggatgtataattgccttcatcgataaactgctgaacgttctgatatgtttttccgtctccgtcaaaaatcgttttgtgatcttccactccgttgattttgagtgtgtcatcagattttgacacatttacctgcgctgttgtcaggctttgtttgccgtaatgtttaccggaatagtcagtgtagaataaacggatttttccgtcagatgtaaaggttgcagaaccggaccattcttgcgtctgatctttcaggatcggatcgttggcgtcgaacttatcgctgtctttaaagacacggcccgcgtttttccagcttttgataaaacatgtagattgatgtgtcatcagcgtctttcgggttcccgcaagagcaaacacaacgtgatagccgttgtattcagctactgttccgtcagcgttttcagcgccagctgtcccacacatcaagtccttttgcagactcaatatttttaatcgttgattgatcgaattgaggcacttggtatttttcgttttgctgctgtttagggatgtttctttgtatgctttttggttattttctttcgcgaaggcttgagtcgctcctcctgccagaagtgcagtcgtaaaagtcagaactgtggcttgttttacaatttttttgatgttcatgttcat

SEQ ID NO: 21803 - DNA, 3963 bp, Homo sapiens; identical to SEQ ID NO: 21591
  SIMILAR (400)..(1023): 841254mologous to Cloning vector pBACe3.6 levansucrase,accession number U80929,Smith-Waterman Score=919.

SEQ ID NO: 21804 - DNA, 1683 bp, Homo sapiens
  SIMILAR (499)..(1296): 961254mologous to Cloning vector pSacBII SacB,accession number U09128,Smith-Waterman Score=1379.
  misc_feature (1)...(1683): n = a,t,c or g
atggcggaaacagcggttatcaatcacaagaaacgtaaaaatagcccgcgaatcgtccagtcaaacgacctcactgaggcggcatatagtctctcccgggatcaaaaacgtatgctgtatctgttcgttgaccagatcagaaaatctgatggcaccctacaggaacatgacggtatctgcgagatccatgttgctaaatatgctgaaatattcggattgacctctgcggaaccagcattgaagagtttcgcggggaaggaagtggttttttatcgccctgaagaggatgccggcgatgaaaaaggctatgaatcttttccttggtttatcaaacgtgcgcacagtccatccagagggctttacagtgtacatatcaacccatatctcattcccttctttatcgggttacagaaccggtttacgcagtttcggcttagtgaaacaaaagaaatcaccaatccgtatgccatgcgtttatacgaatccctgtgtcagtatcaaacgtacggcgtctctcaaatatacaaaaatgatatactgcagatccctaaacagcagcaaaacgaaaaataccaagtgcctcaattcgatcaatcaacgattaaaaatattgagtctgcaaaaggacttgatgtgtgggacagctggccgctgcaaaacgctgacggaacagtagctgaatacaacggctatcacgttgtgtttgctcttgcgggaagcccgaaagacgctgatgacacatcaatctacatgttttatcaaaaggtcggcgacaactcaatcgacagctggaaaaacgcgggccgtgtctttaaagacagcgataagttcgacgccaacgatccgatcctgaaagatcagacgcaagaatggtccggttctgcaacctttacatctgacggaaaaatccgtttattctacactgactattccggtaaacattacggcaaacaaagcctgacaacagcgcaggtaaatgtgtcaaaatctgatgacacactcaaaatcaacggagtggaagatcacaaaacgatttttgacggagacggaaaaacatatcagaacgttcagcagtttatcgatgaaggcaattatacatccggcgacaaccatacgctgagagaccctcactacgttgaagacaaaggccataaataccttgtattcgaagccaacacgggaacagaaaacggataccaaggcgaagaatctttatttaacaaagcgtactacggcggcggcacgaacttcttccgtaaagaaagccagaagcttcagcaganggtcgactctagaggatcccacaaagacaaagaaagcagcaagacacaagtgactcatggtgatccaaccctgtgggccacaacagctgcaactcttgagcagtgggaaggaagaaaggaaggagaggggaggaaaatcctggactgtgtggccactgaggaaccaggatcaagcagagcctgggacagctttggtgtgatggtgtcactgacattctcattgtgtcttccctcctctagctatcttaatgacttggaccgcgtagctgaccctgcctacctgcctacgcaacaagatgtgcttagagttcgagtacccaccacagtcatagcatgcctgcaggtcgactctagaggaccccagctaattaacgtatgggaagagaatcagcctcattag

SEQ ID NO: 21805 - DNA, 1494 bp, Homo sapiens; identical to SEQ ID NO: 13428
  SIMILAR (1)..(657): 991254mologous to synthetic construct chloramphenicol acetyltransferase,accession number A02739,Smith-Waterman Score= 1193.

SEQ ID NO: 21806 - DNA, 1257 bp, Homo sapiens; identical to SEQ ID NO: 4280
  SIMILAR (7)..(642): 991254mologous to Cloning vector pBACe3.6 levansucrase,accession number U80929,Smith-Waterman Score=1108.

SEQ ID NO: 21807 - DNA, 726 bp, Homo sapiens
  SIMILAR (1)..(519): 791254mologous to Leishmania major probable levansucrase precursor,accession number AL160371,Smith-Waterman Score=687.
atgaacatgaacatcaaaaaaattgtaaaacaagccacagttctgacttttacgactgcacttctggcaggaggagcgactcaagccttcgcgaaagaaaataaccaaaaagcatacaaagaaacgtacggcgtctctcatattacacgccatgatatgctgcagatccctaaacagcagcaaaacgaaaaataccaagtgcctcaattcgatcaatcaacgattaaaaatattgagtctgcaaaaggacttgatgtgtgggacagctggccgctgcaaaacgctgacggaacagtagctgaatacaacggctatcacgttgtgtttgctcttgcgggaagcccgaaagacgctgatgacacatcaatctacatgttttatcaaaagtttttcgatatttttcgtgatcttttcaagaacgttgatcttaaagggttcgagcctgatgtacgtattttgcttaccaaatacagcaatagtaatggctctcagtccccgtggatggaggagcaaattcgggatgcctggggaagcatggttctaaaaaatgttgtacgtgaaacggatgaagttggtaaaggtcagatccggatgagaactgtttttgaacaggccattgatcaacgctcttcaactggtgcctggagaaatgctctttctatttgggaacctgtctgcaatgaaattttcgatcgtctgattaaaccacgctgggagattagataa

SEQ ID NO: 21808 - DNA, 2601 bp, Homo sapiens
  SIMILAR (2094)..(1465): 971254mologous to Cloning vector pZC320 SopA,accession number U26464,Smith-Waterman Score=1068.
tcacattaattgcgttgcgctcactgcccgctttccagtcgggaaacctgtcgtgccagctgcattaatgaatcggccaacgcgcggggagaggcggtttgcgtattgggcgccagggtggtttttcttttcaccagtgagacgggcaacagctgattgcccttcaccgcctggccctgagagagttgcagcaagcggtccacgctggtttgccccagcaggcgaaaatcctgtttgatggtggttccgaaatcggcaaaatcccgtgtttgaagtgatcagcggcttcattacttttttcaatgtgtaatcattatttaactctatgataccgagggcgccgttcgctaactcagcatcgcgttttttagcgctctgctgaagcttctggctttctttacggaagaagttcgtgccgccgccgtagtacgctttgttaaataaagattcttcgccttggtatccgttttctgttcccgtgttggcttcgaatacaaggtatttatggcctttgtcttcaacgtagtgagggtctctcagcgtatggttgtcgccggatgtataattgccttcatcgataaactgctgaacgttctgatatgtttttccgtctccgtcaaaaatcgttttgtgatcttccactccgttgattttgagtgtgtcatcagattttgacacatttacctgcgctgttgtcaggctttgtttgccgtaatgtttaccggaatagtcagtgtagaataaacggatttttccgtcagatgtaaaggttgcagaaccggaccattcttgcgtctgatctttcaggatcggatcgttggcgtcgaacttatcgctgtctttaaaaacacggcccgggttttttccaactgtcaattgagttggcgccgacctgagtgatcttgcgacagccgtttcatctctgctcctcaatttatccatctgtaaagtgaatataacattactcatctcatagggtttggactggattctttctgctcttgacattgcactacctgatccagaaacggaatcctggctgggtgctttccagatctggacataacctccatgcagagaaatcaccttgaaagctgcttctctcactacacctcggggtgaagaaaaaagagcaacaactgatttaggcaatttggcggtgttgatacagcgggtaataatcttacgtgaaatattttccgcatcagccagcgcagaaatatttccagcaaattcattctgcaatcggcttgcataacgctgaccacgttcataagcacttgttgggcgataatcgttacccaatctggataatgcagccatctgctcatcatccagctcgccaaccagaacacgataatcactttcggtaagtgcagcagctttacgacggcgactcccatcggcaatttctatgacaccagatactcttcgaccgaacgccggtgtcttattcacaatgggggtgcacagccactcttcatcaaatttgcccattaactcagtttcaatacggtgcagagccagacaggaaggaataatgtcaagccccggccagcaagtgggctttattgcataattgacatcgtccttttccccaagatagaaaggcaggagagtgtcttctgcatgaatatgaagatctggtacccatccgtgatacattgaggctgttccctgggggtcgttaccttccacgagcaaaacacgtagccccttcagagccagatcctgagcaagatgaacagaaactgaggttttgtaaacgccacctttatgggcagcaaccccgatcaccggtggaaatacgtcttcagcacgtcgcaatcgcgtaccaaacacatcacgcatatgattaatttgttcaattgtataaccaacacgttgctcaacccgtcctcgaatttccatatccgggtgcggtagtcgccctgctttctcggcatctctgatagcctgagaagaaaccccaactaaatccgctgcttcacctattctccagcgcccggttattttcctcgcttccgggctgtcatcattaaactgtgcaatggcgatagccttcgtcatttcatgaccagcgtttatgcactcctgattggagattagggatgctgctcgacagctgcagtccccccagcaaggagtggccctgccctgaatatcagcagagccgaagttgagaagccctgctctatcgttagcctccctgctgcccatgcttccagaagttgccttatttttccactttctctttcccagagccccagttcccagagtgtcctctccaggcaccttcccataaactcgccagcgcacactgggcaggagcagggggccattctggagatgcctgagaagggtgtgtcttgccagtgttttgaccacacctctctgaggagaaccactaaagcctgggtcccttgaaggaacatattctgatgaaggggcatcacaaggacttggcagaggggcctttcctgactgtccacgcaggaccctagctgccatttttgctcctctactgtgatgagtgctcatatgtctctgagcactcatcacaaagctgaggtttgcagcttgcttcttgcctgtccccat

SEQ ID NO: 21809 - DNA, 1194 bp, Homo sapiens
  SIMILAR (709)..(1191): 961254mologous to Cloning vector pZC320 SopA,accession number U26464,Smith-Waterman Score=813.
atgcaagaaatcagtagtttgggcaaatacttcatcaaatgtgcaaacagaagacttgatgtgtgggacagctggccgctgcaaaacgctgacggaacagtagctgaatacaacggctatcacgttgtgtttgctcttgcgggaagcccgaaagacgctgatgacacatcaatctacatgttttatcaaaagatcagaaaatctgatggcaccctacaggaacatgacggtatctgcgagatccatgttgctaaatatgctgaaatattcggattgacctttgcggaagccatgcttatcgaacgtggtcagcgttatgcaagccgattgcagaatgaatttgctggaaatatttctgcgctggctgatgcggaaaatatttcacgtaagattattacccgctgtatcaacaccgccaaattgcctaaatcagttgttgctcttttttctcaccccggtgaactatctgcccggtcaggcacagtaacagctgccaatgccagtacactgaatgatggagcagctgctcctgtcgggaaaccggtcgtgccagctgcattaatgaatcggccaaccgcgcgggagaggcggtttgcgtattgggcgccagggtggtttttcttttcaccagtgagaccggcaacagctgattgcccctcaccccctggccctgagagagttgaagcaagcggtccaccctggtctcccattgaaactgttgctcatgactatgatgtcatagttattgacagcgcgcctaacctgggtatcggcacgattaatgtcgtatgtgctgctgatgtgctgattgttcccacgcctgctgagttgtttgactacacctccgcactgcagtttttcgatatgcttcgtgatctgctcaagaacgttgatcttaaagggttcgagcctgatgtacgtattttgcttaccaaatacagcaatagtaatggctctcagtccccgtggatggaggagcaaattcgggatgcctggggaagcatggttctaaaaaatgttgtacgtgaaacggatgaagttggtaaaggtcagatccggatgaaaacttgttttgaacaggccattgatcaacgctcttcaactggtgcctggagaaatgctttttctatttgggaacctgtctgcaatgaaaatttcgatcgtctgaataaaccacgctgggagattagataa

SEQ ID NO: 21810 - DNA, 1248 bp, Homo sapiens
  SIMILAR (822)..(319): 891254mologous to Leishmania major probable levansucrase precursor,accession number AL160371,Smith-Waterman Score=782.
tcactgcccgctttccagtcgggaaacctgtcgtgccagctgcattaatgaatcggccaacgcgcggggagaggcggtttgcgtattgggcgccagggtggtttttcttttcaccagtgagacgggcaacagctgattgcccttcaccgcctggccctgagagagttgcagcaagcggtccacgctggtttgccccagcaggcgaaaatcctgtttgatgggggttccgaaatcggcaaaatccattatacgaatttttgaaccgaagatccgtgaacagtccatttgccgttcattttgaaacattcgcgcgctcgatttatcagttaccgtgtttgaagtgatcagcggcttcattacttttttcaatgtgtaatcattatttaactctatgataccgagggcgccgttcgctaactcaggggggcgttttttagcgctctgctgaagcttctggctttctttacggaagaagttcgtgccgccgccgtagtacgctttgttaaataaagattcttcgccttggtatccgttttctgttcccgtgttggcttcgaatacaaggtatttatggcctttgtcttcaacgtagtgagggtctctcaacgtatggttgtcgccggatgtataattgccttcatcgataaactgctgaacgttctgatatgtttttccgtctccggcaaaaatcggtttgtgatcttcccctccggtggatttgagtgtggcatcagaatttgacccatttacctgcgctggtggcaggctttttttgccggaatgattaccggaatagtcagtgtagaataaacggttttttcctcccaagtaaaggtggagaaaccgacccatcgtgtttgaagtgatcagcggcttcattacttttttcaatgtgtaatcattatttaactctatgataccgagggcgccgttcgctaactcagcatctttttttttagcgctctgctgaagcttctggctttctttacgggagaagttcgtgccgccgccgtagtacgctttgttaaataaagattcttcgccttggtatccgttttctgttcccgtgttggcttcgaatacaaggtatttatgggctttgtcttcaacgtagtgagggtctctcaacgtatggttgtcgccggatgtataattgccttcatcgataaactgctgaacgttctgatatgttttttcgtctccgtcaaaaatcggtttgtgatcttccactcccctcttgttcttcat

SEQ ID NO: 21811 - DNA, 1428 bp, Homo sapiens
  SIMILAR (238)..(849): 951254mologous to Cloning vector pSacBII SacB,accession number U09128,Smith-Waterman Score=1040.
atggagaaaaaaatcactggatataccaccgttgatatatcccaatggcatcgtaaagaacattttgaggcatttcagtcagttgctcaatgtacctataaccagaccgttcagctggatattaaaaaaaaattaaagaccgtaaagaaaaataagcacaagttttatccggcctttattcacattcttgcccgcctgatgaatgctcatccggagttccgtatggcaatgaaagacgtagctgaatacaacggctatcacgttgtgtttgctcttgcgggaagcccgaaagacgctgatgacacatcaatctacatgttttatcaaaaggtcggcgacaactcaatcgacagctggaaaaacgcgggccgtgtctttaaagacagcgataagttcgacgccaacgatccgatcctgaaagatcagacgcaagaatggtccggttctgcaacctttacatctgacggaaaaatccgtttattctacactgactattccggtaaacattacggcaaacaaagcctgacaacagcgcaggtaaatgtgtcaaaatctgatgacacactcaaaatcaacggagtggaagatcacaaaacgatttttgacggagacggaaaaacatatcagaacgttcagcagtttatcgatgaaggcaattatacatccggcgacaaccatacgctgagagaccctcactacgttgaagacaaaggccataaataccttgtattcgaagccaacacgggaacagaaaacggataccaaggcgaagaatctttatttaacaaagcgtactacggcggcggcacggcttcttccatcagaaaatctgatggcaccctacaggaacatgacggtatctgcgagatccatgttgctaaatatgctgaaatattcggattgacctctgcggaagccagtaaggatatacggcaggcattgaagagtttcgcggggaaggaagtggttttttatcgccctgaagaggatgccggcgatgaaaaaggctatgaatcttttccttggtttatcaaacgtgcgcacagtccatccagagggctttacagtgtacatatcaacccatatctcattcccttctttatcgggttacagaaccggtttacgcagtttcggcttagtgaaacaaaagaaatcaccaatccgtatgccatgcgtttatacgaatccctgtgtcagtatcgtaagccgcatggctcaggcatcgtctctctgaaaatcgaatggatcatagagcgttaccagctgcctcaaagttaccagcgtatgcctgacttccgccgccgcttcctgcagactgccaagggaaggcatctgatatggagctttgatcatctggttgatagagggcataagaatggcacaaaggaagttgtggagtatttactggtttgggagaggactctttaa

SEQ ID NO: 21812 - DNA, 2787 bp, Homo sapiens; identical to SEQ ID NO: 13435
  SIMILAR (325)..(1296): 981254mologous to Cloning vector pBACe3.6 levansucrase,accession number U80929,Smith-Waterman Score=1684.

SEQ ID NO: 21813 - DNA, 1470 bp, Homo sapiens; identical to SEQ ID NO: 13436
  SIMILAR (715)..(1467): 991254mologous to unidentified cloning vector 29kD protein essential for the replication of mini F plasmid,accession number AB015619,Smith-Waterman Score=1305.
  misc_feature (1)...(1470): n = a,t,c or g

SEQ ID NO: 21814 - DNA, 3288 bp, Homo sapiens; identical to SEQ ID NO: 21593
  SIMILAR (1870)..(3285): 991254mologous to Cloning vector pBACe3.6 levansucrase,accession number U80929,Smith-Waterman Score=2463.

SEQ ID NO: 21815 - DNA, 1932 bp, Homo sapiens; identical to SEQ ID NO: 5205
  SIMILAR (418)..(1038): 911254mologous to unidentified cloning vector 29kD protein essential for the replication of mini F plasmid,accession number AB015619,Smith-Waterman Score=970.
  misc_feature (1)...(1932): n = a,t,c or g

SEQ ID NO: 21816 - DNA, 4289 bp, Homo sapiens
  SIMILAR (3499)..(3534): 1001254mologous to Cloning vector pSacBII SacB,accession number U09128,Smith-Waterman Score=69.
  misc_feature (1)...(4289): n = a,t,c or g
tttggcattacttgaaagatttggagatgagaggcgtcaatgtcaagtggcctgaggatatttggcaaaaccaggccggatttgccgatttggaaacaccacaaacagattttcgctgctggggcaaacaagggtggccgcttgctgcactctctcagggccaggcgggattttgccgatttcggaaccaccatcaaacaggattttcgcctgctggggcaaaccagcgtggaccgcttgctgcaactctctcagggccaggcggtgaagggcaatcagctgttgcccgtctcactggtgaaaagaaaaaccaccctggcgcccaatacgcaaaccgcctctccccgcgcgttggccgattcattaatgcagctggcacgacaggtttcccgactggaaagcgggcagtgagcgcaacgcaattaatggattttgccgatttcggaaccaccatcaaacaggattttcgcctgctggggcaaaccagcgtggaccgcttgctgcaactctctcagggccaggcggtgaagggcaatcagctgttgcccgtctcactggtgaaaagaaaaaccaccctggcgcccaatacgcaaaccgcctctccccgcgcgttggccgattcattaatgcagctggcacgacaggtttcccgactggaaagcgggcaagcccttgctccaggggaagccagctgccgtgtttttttcgatatgcttcgtgatctgctcaagaacgttgatcttaaagggttcgagcctgatgtacgtattttgcttaccaaatacagcaatagtaatggctctcagtccccgtggatggaggagcaaattcgggatgcctggggaagcatggttctaaaaaatgttgtacgtgaaacggatgaagttggtaaagccctgccggtgaaatatccagatggtggtgttaaccctggagggggtccaggtccagcactgccagggcagaactttggaacactttgtgcagggtccctcagtggcagtcacaactatgcacttcctgtgaaatataatgcacagctgaagatgaacaacaggcaactgaaagccaggaatgcaagccacagggactcttcagttacatgcagtgaagctctcatcacctccagctggaggatgtggaaagccaaggaccatgcccaggactttaagtcagagtggctgactcaaccaagacagtcttgtaaattccctgaagcactattttattacttgattggttcaagttttcatgaactgcctctccaactagtacataaaccccaagtggaagaaatgattatgtgtgctcattttacgtggcagccccagtgcccatgccagtgcctggcaacatcacttaataatgcacagctgaagatgaacaacaggcaactgaaagccaggaatgcaagccacagggactcttcagttacatgcagtgaagctctcatcacctccagctggaggatgtggaaagccaaggaccatgcccaggactttaagtcagagtggctgactcaaccaagacagttcccaaatcctggtagctgccatcagcccccttcagatcagaaagtagcggggtcctttagagtcactgtgcaagttgcaaccagttttttgcagggtctcttccagcctgtcggcgacaactcaatcgacagctggaaaaacgcggnccgtgtctttaaagacagcgataagttcgacgccaacgatccgatcctgaaagatcagacgcaagaatggtccggttctgcaacctttacatctgacggaaaaatccgtttattctacactgactattccggtaaacattacggcaaacaaagcctgacaacagcgcaggtaaatgtgtcaaaatctgatgacacactcaaaatcaacggagtggaagatcacaaaacgatttttgacggagacggaaaaacatatcagaacgttcagcagtttatcgatgaaggcaattatacatccggcgacaaccatacgctgagagaccctcactacgttgaagacaaaggccataaataccttgtattcgaagccaacacgggaacagaaaacggataccaaggcgaagaatctttatttaacaaagcgtactacggcggcggcacgaacttcttccgtaaagaaagccagaagcttcagcagagcgctaaaaaacgcgatgctgagttagcgaacggcgccctcggtatcatagagttaaataatgattacacattgaaaaaagtaatgaagccgctgatcacttcaaacacggtaactgatgaaatcgagcgcgcgaatgttttcaaaatgaacggcaaatggcattccaagatccttgtatcagggacccacagggcacgaacagaggtagaggtgactgacccgattcatcagcagagaatgggctgctgtttcaccgtgggagcaggagaaatatgtgagaaacccactgggtgcttttttactcccttgcccaattgtaactgtcagtggacagggtcagcaatcctggacagacgttctcattcccatcctcattccccagcttctgggagttgggtgaaggtggtgactggcagctatcagctgacccactctccaggaattggcctaagggattttgccgatttcggaaccccccatcaaacaggattttcgcctgctggggcaaaccagcgtggaccgcttgttgcaactctctcagggccaggcggtgaagggcaatcagctgttgcccgtctcactggtgaaaagaaaaaccaccctggcgcccaatacgcaaaccgcctctccccgcgcgttggccgattcattaatgcagctggcacgacaggtttcccgactggaaagcgggcagtgagcgcaacgcaattaatgcatttcaagatccttgtatccagggcccacagggcacgaacagagttagaggtgactgaccccggatcatcagcagagaatgggctgctgtttcccgtcgttttgctcttgcggaaagcccgaaagacgttgatgccacctcattctacatgttttatcaaaaggtcggcgccaactcaatcgacagctggaaaaacgcggccccgtgttttaaaagacagcgataagtttgacgccaacgatccgatcctgaaagatcagacgcaagaatggtccggttctgcaccctttacatctgacggaaaaatccgtttattctacactgactattccggtaaacattacggcaaacaaagcctgacaacagcgcaggtaaatgtgtcaaaatctgatgacacactcaaaatcaacggagtggaagatcacaaaacgatttttgacggagacggaaaaacatatcagaacgttcagcagtttatcgatgaaggcaattatacatccggcgacaaccatacgctgagagaccctcactacgttgaagacaaaggccataaataccttgtattcgaagccaacacgggaacagaaaacggataccaaggcgaagaatctttatttaacaaaagcgtactacggcggcggcacgaacttcttccggattttgccgatttcggacccaccatcaaacaggattttcgcctgctggggcaaaccagcgtggaccgcttgctgcaactctctcagggccaggcggtgaagggcaatcagctgttgcccgtctcactggtgaaaagaaaaaccaccctggcgcccaatacgcaaaccgcctctccccgcgcgttggccgattcattaatgcagctggcacgacaggtttcccgactggaaagcgggcaggattttgccgatttcggaaccaccatcaaacaggattttcgcctgctggggcaacccagcgtggaccgcttgctgcaactctctcagggccaggcggtgaagggcaatcagctgttgcccgtctcactggtgaaaagaaaaaccaccctggcgcccaatacgcaaaccgcctctccccgcgcgttggccgattcattaatgcagctggcacgacaggtttcccgactggaaagcgggcacgcgcctaacctgggtatcggcacgattaatgtcgtatgtgctgctgatgtgctgattgttcccacgcatgatgagttgttagactacacctccgcactgcagtttttcgatatgcttcgtgatctgctcaagaacgttgatcttaaagggttcgagcctgatgtacgtattttgcttaccaaatacagcaatagtaatggctctcagtccccgtggatggaggagcaaattccgccatgcctggggaagcatggttctaaaaaatgttgtacgtga

SEQ ID NO: 21817 - DNA, 891 bp, Homo sapiens
  SIMILAR (394)..(768): 821254mologous to Cloning vector pBACe3.6 levansucrase,accession number U80929,Smith-Waterman Score=527.
gctttgcagaactttcagcggtataccggcatacagcatgtgcatcgcataggaatggcggaacgtatgtggtgtgaccggaacagagaacgtcacaccgtcagcagcagcggcggcaaccgcctccccaatccaggtaaggatatagggcaggcattgaagagtttcgcggggaagaaagtggttttttatcgccctgaagaggatgccggcgatgaaaaaggctatgaatctttcccttggtttatcaaacgtgcgcacagtccatccagagggctttacagtgtacatatcaacccatatctcattcctttctttatcgggttacagaaccggtttacgcagtttcggcttagtgaaacaaaagaaatcaccaatccgtatgccatgcgtttatacgaatccctgtgtcagtatcaaaacggataccaaggcgaagaatctttatttaacaaagcgtactacggcggcggcacgaacttcttccgtaaagaaagccagaagcttcagcagagcgctaaaaaacgcgatgctgagttagcgaacggcgccctcggtatcatagagttaaataatgattacacattgaaaaaagtaatgaagccgctgatcacttcaaacacggtaactgatgaaatcgagcgcgcgaatgttttcaaaatgaacggcaaatggtacttgttcactgattcacgcggttcaaaaatgacgatcgatgtgccgcaagccaaaggcaacaatgtggttatcacaagctacatgacaaacagaggcttcttcgaggataaaaaggcaacatttgcgccaagcttcttaatgaacatcaaaggcaataaaacatccgttgtcaaaaacagcatcctggagcaaggacagctgacagtcaactaa

SEQ ID NO: 21818 - DNA, 1866 bp, Homo sapiens
  SIMILAR (1763)..(1855): 521254mologous to Cloning vector pBACe3.6 levansucrase,accession number U80929,Smith-Waterman Score=73.
  misc_feature (1)...(1866): n = a,t,c or g
atgctgggaaagaagaagccagtctgcgaggtaggaggagactctggggtccccaagaaagagttccaagaagggaggcaggtcctgttcaaactatggagagggcaagcaaacaaggtcggcgacaactcaatcgacagctggaaaaacgcgggccgtgtctttaaagacagcgataagttcgacgccaacgatccgatcctgaaagatcagacgcaagaatggtccggttctgcaacctttacatctgacggaaaaatccgtttattctacactgactattccggtaaacattacggcaaacaaagcctgacgacagcgcaggtaaaggtgtcaaaatctgatgacacactcaaaatcaacggagtggaagatcacaaaacgatttttgacggagacggaaaaacatatcataacgttcagcagtttatcgatgaaggcaattatacatccggcgacaaccatacgctgagagaccctcactacgttgaagacaaaggccataaataccttgtattcgaagccaacacgggaacagaaaacggataccaaggcgaagaatctttatttaacaaagcgtactacggcggcggcacgaacttcttccgtaaagaaagccagaagcttcagcagagcgctaaaaaacgcgatgctgagttagcgaacggcgccctcggtatcatagagttaaataatgattacacattgaaaaaagtagtgaagccgctgatcacttcaaacacngatctggctctgaaggggctacgtgttttgctcgtggaaggtaacgacccccagggaacagcctcaatgtatcacggatgggtaccagatcttcatattcatgcagaagacactctcctgcctttctatcttggggaaaaggacgatgtcacttatgcaataaagcccacttgctggccggggcttgacattattccttcctgtctggctctgcaccgtattgaaactgagttaatgggcaaatttgatgaaggtaaactgcccaccgatccacacctgatgctccgactggccattgaaactgttgctcatgactatgatgtcatagttattgacagcgcgcctaacctgggtatcggcacgattaatgtcgtatgtgctgctgatgtgctgattgttcccacgcctgctgagttgtttgactacacctccgcactgcagtttttcgatatgcttcgtgatctgctcaagaacaacgttcagcagtttatcgatgaaggcaattatacatccggcgacaaccatacgctgagagaccctcactacgttgaagacaaaggccataaataccttgtgtgcgaagccaacacgggaacagaaaacggataccaaggcgaagaatctttatttaacaaagcgtactacggcggcggcacgaacttcttccgtaaagaaagccagaagcttcagcagagcgctaaaaaacgcgatgctgagttagcgaacggcgccctcggtatcatagagttaaataatgattacacattgaaaaaagtaatgaagccgctgatcacttcaaacacggtaactgatgaaatcgagcgcgcgaatgttttcaaaatgaacggcaaatggtacttgttcactgattcacgcggttcaaaaatgacgatcgatggtattaactcaaacgatatttacatgcttggttatgtatcaaactctttaaccggcccttacaagccgctgaacaaaacagggcttgtgctgcaaatgggtcttgatccaaacgatgtgacattcacttactctcacttcgcagtggcgcaagccaaaggcaaacatggtggttatcacaagctacatgacaaacagaagcttctttcgagaagactttggtga

SEQ ID NO: 21819 - DNA, 1794 bp, Homo sapiens
  SIMILAR (1024)..(1701): 911254mologous to Cloning vector pSacBII SacB,accession number U09128,Smith-Waterman Score=1090.
atgatcgcgtatcgaatagtggtccaaggagcgaagcgagcagggctgggcggcggccaaagcggtcggacagtgctccgagaacggcacgccatagtgactggcgatgctgtcggaatggacgatatccggcaagaggcccggcagtaccggcataaccaagcctatgcctacagcatccagggtgacggtgccgaggatgacgatgagcgcattgttagatttcatacacgggtcaccgtcgacactgacacacttgcatcggatgcagcccggttaacgtgccggcacggcctgggtaaccaggtattttgtccacataaccgtgcgcaaaatgttgggataagcaggacacagcagcaatccacagcaggcatacaaccgcacaccgaggtatctccgtttacacggtgcccatcaatgcactcattgttggacatttgggttaagattgtggcgataatcaatagcttaccaaccaaaaagagtccaggtccagatggattcacagccgaatttaccaggaggtacaaggaggaactgcgaccattccttttgaaactattccaatcaatagaaaaagagggaatcctccctaactcattttatgaggccagcatcattctgataccaaagccaggcagagacacaacaaaaaaagagaattttagaccaatatccttgatgaacattgatgcaaaaatcctcaataaaatactggcaaaacgaatccagcagcacatcaaaaagcttatccaccatgatcaagtgggcttcatccctgggatgcaaggctggttcaatatacgcaaatcaataaatgtaatccagcatataaacagagccaaagacaaaaaccacatgattatctcaatagatgcagaaaaagcctttgacaaaattcaacaacccttcatgctaaaaactctcaagaaattaggtattgatgacagatcaatgagacagaaaattatcaaggatatccaggacttgaactcagcactggaccaagcagatctaatagacatctacagaactcgacaccccacaggtggtgggtccctccaaaaagtcgagatccttaaccagcagcgaaacgaaaaataccaagtgcctcaattcgatcaatcaacgattaaaaatattgagtctgcaaaaggacttgatgtgtgggacagctggccgctgcaaaacgctgacggaacagtagctgaatacaacggctatcacgttgtgtttgctcttgcgggaagcccgaaagacgctgatgacacatcaatctacatgttttatcaaaaggtcggcgacaactcaatcgacagctggaaaaacgcgggccgtgtctttaaagacagcgataagttcgacgccaacgatccgatcctgaaagatcagacgcaagaatggtccggttctgcaacctttacatctgacggaaaaatccgtttattctacactgactattccggtaaacattacggcaaacaaagcctgacaacagcgcaggtaaatgtgtcaaaatctgatgacacactcaaaatcaacggagtggaagatcacaaaacgatttttgacggagacggaaaaacatatcagaacgttcagcagtttatcgatgaaggcaattatacatccggcgacaaccatacgctgagagaccctcactacgttgaagacaaaggccataaggggaagctctttagtttaattagatcccatttgtcaattttggcttctgttgccattgcttttggtgttttggacatgaagtacttgcccatgcctatgtcctga

SEQ ID NO: 21820 - DNA, 1314 bp, Homo sapiens
  SIMILAR (346)..(1080): 841254mologous to Cloning vector pSacBII SacB,accession number U09128,Smith-Waterman Score=1039.
  misc_feature (1)...(1314): n = a,t,c or g
atggtggattcgttaattgcgcgcgtaggagtaatggctcgcggtaatgccattactttgcctgtatgtggtcgggatgtgaagtttactcttgaagtgctccggggtgatagtgttgagaagacctctcgggtttggtcagggctgttggagctcctgaaagctgctgctagtctggtgttcctggagcaacacaagccttatgaggaaattgggacaagtttcggttctgttttggtctcagttgtaggggaaggaccatttgtggaggaagacctgagaaagagctttccaggcagatgggacaaaaagcacaaaatgtttgatgcaattgaggaaccaaagaaagacagcgataagttcgacgccaacgatccgatcctgaaagatcagacgcaagaatggtccggttctgcaacctttacatctgacggaaaaatccgtttattctacactgactattccggtaaacattacggcaaacaaagcctgacaacagcgcaggtaaatgtgtcaaaatctgatgacacactcaaaatcaacggagtggaagatcacaaaacgatttttgacggagacggaaaaacatatcagaacgttcagcagtttatcgatgaaggcaattatacatccggcgacaaccatacgctgagagaccctcactacgttgaagacaaaggccataaataccttgtattcgaagccaacacgggaacagaaaacggataccaaggcgaagaatctttatttaacaaagcgtactacggcggcggcacgaacttcttccgtaaagaaagccagaagcttcagcagagcgctaaaaaacgcgatgctgagttagcgaacggcgccctcggtatcatagagttaaaatatgattacacattgaaaaaagtaatgaaagccgctgatcactttcaaacaccggtaactgatgaaatcgagcgcgcgaatgttttcaaaatgaacggcanatgtcaggcaccgtgtatgaaatctaacaatgcgctcatcgtcatcctcggcaccgtcaccctggatgctgtaggcataggcttggttatgccggtactgccgggcctcttgcgggatatcgtccattccgacagcatcgccagtcactatggcgtgctgctagcgctatatgcgttgatgcaatttctatgcgcacccgttctcggagcactgtccgaccgctttggccgccgcccagtcctgctcgcttcgctacttggagccactatcgactacgcgatcatggcgaccacacccgtcctgtggatctacccactagtcaattcaccatcttgttga

SEQ ID NO: 21821 - DNA, 1512 bp, Homo sapiens
  SIMILAR (954)..(286): 951254mologous to Cloning vector pSacBII SacB,accession number U09128,Smith-Waterman Score=1110.
tcaactgctgctaggaggtgtctcccagtcaggaggcacaggggtcagggatccacttgaggaggcagtctgtcccttagcagagctcgagcactgtgctaggaggtccgctgctgtcttcagagccttaggtaaatcttcagagtctaattcttgtgttactatactttcttcctggaagaagccttgatttttggtatcttctgactgtgagctgctgagtttctttgaagtgaattcgttagcatctaagaagctgttatcaagtctttggctttgtaaattcgtgtttgaagtgatcagcggcttcattacttttttcaatgtgtaatcattatttaactctatgataccgagggcgccgttcgctaactcagcatcgcgttttttagcgctctgctgaagcttctggctttctttacggaagaagttcgtgccgccgccgtagtacgctttgttaaataaagattcttcgccttggtatccgttttctgttcccgtgttggcttcgaatacaaggtatttatggcctttgtcttcaacgtagtgagggtctctcagcgtatggttgtcgccggatgtataattgccttcatcgataaactgctgaacgttctgatatgtttttccgtctccgtcaaaaatcgttttgtgatcttccactccgttgattttgagtgtgtcatcagattttgacacatttacctgcgctgttgtcaggctttgtttgccgtaatgtttaccggaatagtcagtgtagaataaacggatttttccgtcacatgtaaaggttgcagaaccggaccattcttgcgtctgatctttcaggatcggatcgttggcgtcgaacttatcgctgtctttaaagacacggcccgcgtttttccagctgtcgattgagttgtcgccgacgtgatagccgttgtattcagctactgttccgtcagcgttttgcagcggccagctgtcccacacatcaagtccttttgcagactcaatatttttaatcgttgattgatcgaattgaggcacttggtatttttcgttttgctgctgtttagggatctgcagcatatcatggcgtgtaatatgagagacgccgtacgtttctttgtatgctttttggttattttctttcgcgaaggcttgagtcgctcctcctttctctctggctgcccttaacattttttccttcatttcaactttggtgaatctgacaattatatgtcttggagttgctcttctcgaggagtatctttgtggcgttctctgtgtttcctgaatctgaacgttggcctgccttgctagattggggaagttctcctggataacatcctgcagagtgttttccaacttggttccattctccccatcactttcaggtacaccaatcagacgtagatttggtcttttcacatagtcccatatttcttggaggctttgctcatttctttttattcttttttctctaaacttcccttcttgcttcatttcattcatttcatcttccat

SEQ ID NO: 21822 - DNA, 1869 bp, Homo sapiens; identical to SEQ ID NO: 13450
  SIMILAR (1)..(603): 991254mologous to unidentified cloning vector 29kD protein essential for the replication of mini F plasmid,accession number AB015619,Smith-Waterman Score=1045.
  misc_feature (1)...(1869): n = a,t,c or g

SEQ ID NO: 21823 - DNA, 1690 bp, Homo sapiens; identical to SEQ ID NO: 21596
  SIMILAR (272)..(1687): 991254mologous to Cloning vector pBACe3.6 levansucrase,accession number U80929,Smith-Waterman Score=2463.

SEQ ID NO: 21824 - DNA, 1032 bp, Homo sapiens
  SIMILAR (319)..(1029): 941254mologous to Cloning vector pSacBII SacB,accession number U09128,Smith-Waterman Score=1186.
atgacccacaaccaggggaaaaatcaatcaatagaaatataccccaaaatgacactgatgattgaattagcagacaaagacattaaaatacttattataattatactccatatgttcaaaaaggtacagaggagcatggacatcatgcaggaaaagtcctccaccatgccggaatccacttgcatttctggcaagaaggttgtttacgctcaaggtctacagggatggaagtggcacccaatgagagggctctgccgatggagctgtgaaggcgtcgacctcattctgacgggcttgttgagactgtgtgtcgctgtcgtttgcgacaactcaatcgacagctggaaaaacgcgggccgtgtctttaaagattgttttaagttcgacgccaacgatccgatcctgaaagatcagacgcaagaatggtccggttctgcaacctttacatctgacggaaaaatccgtttattctacactgactattccggtaaacattacggcaaacaaagcctgacaacagcgcaggtaaatgtgtcaaaatctgatgacacactcaaaatcaacggagtggaagatcacaaaacgatttttgacggagacggaaaaacatatcagaacgttcagcagtttatcgatgaaggcaattatacatccggcgacaaccatacgctgagagaccctcactacgttgaagacaaaggccataaataccttgtattcgaagccaacacgggaacagaaaacggataccaaggcgaagaatctttatttaacaaagcgtactacggaggcggcacgaacttcttccgtaaagaaagccagaagcttcagcagagcgctaaaaaacgcgatgctgagttagcgaacggcgccctcggtatcatagagttaaataatgattacacattgaaaaaagtaatgaagccgctgatcactttaaacacggtaactgatgaaatcgatcgcgcgaatgttttcaaaatgaacagtaaatggtacttgttcatagaggatccccattcacccatgtaa

SEQ ID NO: 21825 - DNA, 1974 bp, Homo sapiens; identical to SEQ ID NO: 21603
  SIMILAR (796)..(1962): 981254mologous to Cloning vector pBACe3.6 levansucrase,accession number U80929,Smith-Waterman Score=2030.

SEQ ID NO: 21826 - DNA, 1629 bp, Homo sapiens
  SIMILAR (1368)..(4): 951254mologous to Cloning vector pBACe3.6 levansucrase,accession number U80929,Smith-Waterman Score=2276.
ttagttgactgtcagctgtccttgctccaggatgctgtttttgacaacggatgttttattgcctttgatgttcattaagaagcttggcgcaaatgttgcctttttatcctcgaagaagcctctgtttgtcatgtagcttgtgataaccacattgttgcctttggcttgcggcactgcgaagtgagagtaagtgaatgtcacatcgtttggatcaagacccatttgcagcacaagccctgttttgttcagcggcttgtaagggccggttaaagagtttgatacataaccaagcatgtaaatatcgtttgagttaataccatcgatcgtcatttttgaaccgcgtgaatcagtgaacaagtaccatttgccgttcattttgaaaacattcgcgcgctcgatttcatcagttaccgtgtttgaagtgatcagcggcttcattacttttttcaatgtgtaatcattatttaactctatgataccgagggcgccgttcgctaactcagcatcgcgttttttagcgctctgctgaagcttctggctttctttacggaagaagttcgtgccgccgccgtagtacgctttgttaaataaagattcttcgccttggtatccgttttctgttcccgtgttggcttcgaatacaaggtatttatggcctttgtcttcaacgtagtgagggtctctcagcgtatggttgtcgccggatgtataattgccttcatcgataaactgctgaacgttctgatatgtttttccgtctccgtcaaaaatcgttttgtgatcttccactccgttgattttgagtgtgtcatcagattttgacacatttacctgcgctgttgtcaggctttgtttgccgtaatgtttaccggaatagtcagtgtataataaacggatttttccgtcagatgtaaaggttgcagaaccggaccattcttgcgtctgatctttcaggatcggatcgttggcgtcgaacttatcgctgtctttaaagacacggcccgcgtttttccagctgtcgattgagttgtcgccgaccttttgataaaacatgtagattgatgtgtcatcagcgtctttcgggcttcccgcatgagcaaacacaacgtgatagcacgtgtattcagctactgttccgtcagcgttttgcagcggccagctgtcccacacatcaagtccttttgcagactcaatatttttaatcgttgattgatcgaattgaggcacttggtatttttcgttttgctgctgtttacggatctgcagcatatcatggcgtgtaatatgagagaccccgtacgtttctttgatcgcttttggatattttctttcgcgaaggcttgagtcgctcctccctaaaaattgtgcccctgcaggacccatttctaccagcctactggctaatccctctccttccaccatggggggtgggttggccagtttatgtctctttaccaaacggcaggtgattcgagtgggggccgtacacttgcgtggaggaatgatgattctcatcccgtgatgacggcttcctctcatggagccccctctcgcgtccaccataaagctaaccagaaacccagttattcccccgcgtttgattataaaggtttcctggaacggaatcat

SEQ ID NO: 21827 - DNA, 1810 bp, Homo sapiens; identical to SEQ ID NO: 21605
  SIMILAR (7)..(1065): 1001254mologous to Cloning vector pSacBII SacB,accession number U09128,Smith-Waterman Score=1866.

SEQ ID NO: 21828 - DNA, 979 bp, Homo sapiens
  SIMILAR (676)..(638): 921254mologous to Cloning vector pSacBII SacB,accession number U09128,Smith-Waterman Score=58.
ttaatagacagaaggctggctatgaggatccccctcgatttcatcagttaccgtgtttgaagtgatcagcggcttcattacttttttcaatgtgtaatcattatttaactctatgataccgagggcgccgttcgctaactcagcatcgcgttttttagcgctctgctgaagcttctggctttctttacggaagaagttcgtgccgccgccgtagtacgctttgttaaataaagattcttcgccttggtatccgttttctgttcccgtgttggcttcgaatacaaggtatttatggcctttgtcttcaacgtagtgagggtctctcagcgtatggttgtcgccggatgtataattgccttcatcgataaactgctgaacgttctgatatgtttttccgtctccgtcaaaaatcgttttgtgatcttccactccgttgattttgagtgtgtcatcagattttgacacatttacctgcgctgttgtcaggctttgtttgccgtaatgtttaccggaatagtcagtgtagaataaacggatttttccgtcagatgtaaaagttgcagaaccggaccattcttgcgtctgatctttcaggatcggatcgttggcgttcaacttatcgctggctttaaagacaccggcccgcgttttttcaactgtcgattgagttgtcgccccccccacccatgccacatgcccagacacctgtggggactgcttttgcttatcagggcttgttttgcctttgccctcctctgactcctggtccacacccagctccttgttgctgtttgctctgtccgaaacgaagatgatgggccgttcttccgtggccatgccaccatgaacaccaagcgacgagagccctggctctttggggaggaacacacccgactcatccgagaagccatcagagagcgctatggcctcctgccatattggtattctctgttctaccatgcacacgtggcttcccaac

SEQ ID NO: 21829 - DNA, 1203 bp, Homo sapiens
  SIMILAR (747)..(4): 701254mologous to Cloning vector pBACe3.6 levansucrase,accession number U80929,Smith-Waterman Score=842.
ttagttgactgtcagctgtccttgctccaggatgctgtttttgacaacggatgttttattgcctttgatgttcattaagaagcttggcgcaaatgttgcctttttatcctcgaagaagcctctgtttgtcatgtagcttgtgataaccacattgttgcctttggcttgcggcactgcgaagtgagagtaagtgaatgtcacatcgtttggatcaagacccatttgcagcacaagccctgttttgttcagcggcttgtaagggccggttaaagagtttgatacataaccaagcatgtaaatatcgtttgagttaataccatcgatcgtcatttttgaaccgcgtgaatcagtgaacaagtaccatttgccgttcattttgaaaacattcgcgcgctcgatttcatcagttaccgtgtttgaagtgatcagcggcttcattacttttttcaatgtgtaatcattatttaactcatggtatccgttttctgttcccgtgttggcttcgaatacaaggtatttatggcctttgtcttcaacgtagtgagggtctctcagcgtatggttgtcgccggatgtataattgccttcatcgataaactgctgaacgttctgatatgtttttccgtctccgtcaaaaatcgttttgtgatcttccactccgttgattttgagtgtgtcatcagattttgacacatttacctgcgctgttgtcaggctttgtttgccgtaatgtttaccggaatagtcagtgtagaataaacggatttttccgtcagatgtaaaggttgcagaacctggaccattcttgcgtctgatcttttgataaaacatgtagattgatgtgtcatcagcgtctttcgggcttcccgcaagagcaaacacaacgtgatagccgttgtattcagctactgttccgtcagcgttttgcagcggccagctgtcccacacatcaagtccttttgcagactcaatatttttaatcggggggggatcgaattgaggcacttggtattgtttttttttctgctggttagggatctgcagcatatcatggcgtgtgggatgagagacgccgtacgtttctttgtatgctttaaaaatattttctttcgcgaaggcttgagtcgctcctcctgccagaagtgcagtcgtaaaagtcagaactgtggcttgttttacaatttttttgatggtcatgttcat

SEQ ID NO: 21830 - DNA, 1018 bp, Homo sapiens
  SIMILAR (5)..(715): 921254mologous to Cloning vector pSacBII SacB,accession number U09128,Smith-Waterman Score=1152.
ggagggaagcgactcaagggccttcgcgaaagaaaataaccaaaaagcatacaaagaaacgtacggcgtctctcatattacacgccatgatatgctgcagatccctaaacagcagcaaaacgaaaaataccaagtgcctcaattcgatcaatcaacgattaaaaatattgagtctgcaaaaggacttgatgtgtgggacagctggccgctgcaaaacgctgacggaacagtagctgaatacaacggctatcacgttgtgtttgctcttgcgggaagcccgaaagacgctgatgacacatcaatctacatgttttatcaaaaggtcggcgacaactcaatcgacagctggaaaaacgcgggccgtgtctttaaagacagcgataagttcgacgccaacgatccgatcctgaaagatcagacgcaagaatggtccggttctgcaacctttacatctgacggaaaaatccgtttattctacactgactattccggtaaacattacggcaaacaaagcctgacaacagcgcaggtaaatgtgtcaaaatctgatgacacactcaaaatcaacggagtggaagatcacaaaaccatttttgacggagaccgaaaaacatatcagaacggtcagcagtttatcgatgaaggcaatattcctccggcgacaccctacgccgagagaccctactactttgaagacaaaggccttaaatacctggggaagccgacagtagagccttcagtctgtggtggaaggcttgagagcccctggcaaaccgccggtgtaagtccaacagtccaaaagctaaagagcttgaagtttgatgttcgtgggcaggaagaatcagtatgggagaaagacgaagctgctctggcaaattggacggtgcccaaccacacttgtgacaatctaaaaacttgtcacactttacatggatctgtcatggcggaaacagcggttttcaatcccaagaaacttaaaaatagcccgcgaaatcgtccagtcaaaccacctcattga

SEQ ID NO: 21831 - DNA, 1135 bp, Homo sapiens; identical to SEQ ID NO: 21615
  SIMILAR (1)..(858): 951254mologous to Leishmania major probable levansucrase precursor,accession number AL160371,Smith-Waterman Score=1438.

SEQ ID NO: 21832 - DNA, 1188 bp, Homo sapiens; identical to SEQ ID NO: 4283
  SIMILAR (977)..(1015): 1001254mologous to Cloning vector pSacBII SacB,accession number U09128,Smith-Waterman Score=63.

SEQ ID NO: 21833 - DNA, 1566 bp, Homo sapiens
  SIMILAR (736)..(1515): 901254mologous to Cloning vector pBACe3.6 levansucrase,accession number U80929,Smith-Waterman Score=1281.
  misc_feature (1)...(1566): n = a,t,c or g
atgctgcagatccctaaacttcagcaaaacgaaaaatcccaagtgcctcaattcgatcaatcaacgattaaaaatattgagtctgcaaaaggacttgatgtgtgggacagctggccgctgcaaaacgctgacggaacagtagctgaatacaacggctatcacgttgtgtttgctcttgtgttaagcccgaaagacgctgatgacacatcaatctacatgttttatcaaaaggtcggcgacaactcaatcgacagctggaaaaacgcgggccgtgtctttaaagacagcgataagttcgacgccaacgatccgatcctgaaagatcagacgcaagaatggtccggttctgcaacctttacatctgacggaaaaatccgtttattctacactgactattccggtaaacattacggcaaacaaagcctgacaacagcgcaggtaaatgtgtcaaaatctgatgacacactcaaaatcaacggagtggaagatcacaaaacgatttttgacggagacggaaaaacatatcagaacgttcagcagtttatcgatgaaggcaattatacatccggcgacaaccatacgctgagagaccctcactacgttgaagacaaaggccataaataccttgtattcgaagccaacacgggaacagaaaacggataccaaggcgaagaatctttatttaccnagcgtgggcacactttgtcaactcgcgggtcactttgggagaactcaaaggtcggcgacaactcaatcgacagttggaaaaacgcgggccgcgtctttaaagacagcgataagttcgacgccaacgatccgatcctgaaagatcagacgcaagaatggtccggttctgcaacctttacatctgacggaaaaatccgtttattctacactgactattccggaaacattacgtctataaagcctgacaacagcgcagtggaagatcacaaaacgatttttgacggagacggaaaaacatatcagaacgttcagcagtttatcgatgaaggcaattatacatccggcgacaaccatacgctgagagaccctcactacgttgaagacaaaggccataaataccttgtattcgaagccaacacgggaacagaaaacggataccaaggcgaagaatctttatttaacaaagcgtactacggcggcggcacgaacttcttccgtaaagaaagccagaagcttcagcagagcgctaaaaaacgcgatgctgagttagcgaacggcgccctcggtatcatagagttaaataatgattacacattgaaaaaagtaatgaagccgctgatcacttcaaacacggtaactgatgaaatcgagcgcgcgaatgttttcaaaatgaacggcaaatggtacttgttcactgattcacgcggttcaaaaatgacgatcgatggtattaactcaaacgatatttacatgcttggttatgtatcaaactctttaaccggcccttacaagccgctgaacaaaacagggcttgggctgcanatgggcaacttggtatctgcgggctacttagagtatccctggcgtgcattggtgtga

SEQ ID NO: 21834 - DNA, 1515 bp, Homo sapiens
  SIMILAR (514)..(1308): 931254mologous to Cloning vector pSacBII SacB,accession number U09128,Smith-Waterman Score=1314.
atggccaaggagcccatggctcagcaggccaaggagaggacctctgggagggcaaacacttgctttgtcagcaggatccaggggagaactcacactcagagtcagcaggggctggagcaggaacaggaaggcctgccagagttggagccagactgtttctgccggatcactcagtgtgaaagaaatctgatgccatgtcttgaggccactcaagtggcctatgaagaggcgaacatgacccatgaccagcaccttgtggccatgaaggagaaacccaccatggtggggcgtgtacatttgatgtgtatctcggtggacacaactgatcctactggaccattcatattcaggtttccctggagatcaaccatagctaccttccaggaggggatttcttctctcaagaagatggcggggaggaactcagagagaaaaacagtattagtgaaaagctcattccaggaagtgaacagaggaactgaagctttggctctgtgggaaaatggagactttgaagcaccagttctgacttttacgactgcacttctgccagaaggagcgactcaagccttcgggaaagaaaatacccaaaaggcatccaaagaacggtacgggtctcttaatattacacgcaataatatgctgcagatccttaacaagcagcaaacggaaaaataccaagtgcctcaattcgatcaatcaacgattaaaaatattgagtctgcaaaaggacttgatgtgtgggacagctggccgctgcaaaacgctgacggaacagtagctgaatacaacggctatcacgttgtgtttgctcttgcgggaagcccgaaagacgctgatgacacatcaatctacatgttttatcaaaaggtcggcgacaactcaatcgacagctggaaaaacgcgggccgtgtctttaaagacagcgataagttcgacgccaacgatccgatcctgaaagatcagacgcaagaatggtccggttctgcaacctttacatctgacggaaaaatccgtttattctacactgactattccggtaaacattacggcaaacaaagcctgacaacagcgcaggtaaatgtgtcaaaatctgatgacacactcaaaatcaacggagtggaagatcacaaaacgatttttgacggagacggaaaaacatatcagaacgttcagcagtttatcgatgaaggcaattatacatccggcgacaaccatacgctgagagaccctcactacgttgaagacaaaggccataaataccttgtattcgaagccaacacgggaacagaaaacggataccaaggcggggttaacgcggacgtcggcgacgttgttgttcgcctgccggtttggcatcgccgaggcggcgaagcggtttttatgcaggtttcgcgcttgcagattttgcgccaccttccccacggcgtggttgctgttgaccgcgaccaccacattgcccacgaccgccgccgccacgttgctggcgaccgttctggatcggttcggctttga

SEQ ID NO: 21835 - DNA, 2343 bp, Homo sapiens
  SIMILAR (2100)..(1030): 1001254mologous to Cloning vector pSacBII SacB,accession number U09128,Smith-Waterman Score=1899.
ttagttgactgtcagctgtccttgctccaggatgctgtttttgacaacggatgttttattgcctttgatgttcattaagaagcttggcgcaaatgttgcctttttatcctcgaagaagcctctgtttgtcatgtagcttgtgataaccacattgttgcctttggcttgcggcacttgtttctgagcatgaacgcccgcaagccaacatgttagttgaagcatcagggcgattagcagcatgatatcaaaacgctctgagctgctcgttcggctatggcgtaggcctagtccgtaggcaggacttttcaagtctcggaaggtttcttcaatctgcattcgcttcgaatagatattaacaagttgtttgggtgttcgaatttcaacaggtaagttagttgctagaacccatggctcctttgccgacgctgagtagattttaggtgacgggtggtgacaatgagtccgtgtcgagcgctgattttttcggcctttagagcgagatttatacaatagaatttggcatgagattggattgcttttagtcagcctcttatagcctaaagtctttgagtgactagatgacatatcatgtaagttgctgataggtttccagttttccgctcctaggtctgcatattgtacttttcctcttactcgacttaaccagtaccaacccagcttctcaacggatttataccatggcactttaaagccagcatcactgacaatgagcggtgtggtgttactcggtagaatgctcgcaaggtcggctagaaattggtcatgagctttctttgaacattgctctgaaagcgggaacgctttctcataaagagtaacagaacgaccgtgtagtgcgactgaagctcgcaataccataagtcgtttttgctcacgaatatcagaccagtcaacaagtacaatgggcatcgtattgcccgaacagataaagctagcatgccaacggtatacagcgagtcgctctttgtggaggtgacgattaccaaaatcattaggggattcatcagaaccaagcatgtaaatatcgtttgagttaataccatcgatcgtcatttttgaaccgcgtgaatcagtgaacaagtaccatttgccgttcattttgaaaacattcgcgcgctcgatttcatcagttaccgtgtttgaagtgatcagcggcttcattacttttttcaatgtgtaatcattatttaactctatgataccgagggcgccgttcgctaactcagcatcgcgttttttagcgctctgctgaagcttctggctttctttacggaagaagttcgtgccgccgccgtagtacgctttgttaaataaagattcttcgccttggtatccgttttctgttcccgtgttggcttcgaatacaaggtatttatggcctttgtcttcaacgtagtgagggtctctcagcgtatggttgtcgccggatgtataattgccttcatcgataaactgctgaacgttctgatatgtttttccgtctccgtcaaaaatcgttttgtgatcttccactccgttgattttgagtgtgtcatcagattttgacacatttacctgcgctgttgtcaggctttgtttgccgtaatgtttaccggaatagtcagtgtagaataaacggatttttccgtcagatgtaaaggttgcagaaccggaccattcttgcgtctgatctttcaggatcggatcgttggcgtcgaacttatcgctgtctttaaagacacggcccgcgtttttccagctgtcgattgagttgtcgccgaccttttgataaaacatgtagattgatgtgtcatcagcgtctttcgggcttcccgcaagagcaaacacaacgtgatagccgttgtattcagctactgttccgtcagcgttttgcagcggccagctgtcccacacatcaagtccttttgcagactcaatatttttaatcgttgattgatcgaattgaggcacttggtatttttcgttttgctgctgtttagggatctgcagcatatcatggcgtgtaatatgagagacgccgtacgtttctttgtatgctttttggttattttctttcgcgaaggcttgagtcgctcctcctgtagtgtggtcagggaaggcctctttacggtaaatttgagcagaaaccagagtgacataaagagccggccatgaggagatcggtgctgcaggtggagctgcctgccagtcccgcgccatgtgctcgcattccttagctcttgggtggtcgatgggactgggcgccgtggagcagggggcggcattcgtcggggaggctcgtccgcacaggaggccacagagggggtgggaaggctcaggcat

SEQ ID NO: 21836 - DNA, 1353 bp, Homo sapiens
  SIMILAR (763)..(1350): 921254mologous to unidentified cloning vector 29kD protein essential for the replication of mini F plasmid,accession number AB015619,Smith-Waterman Score=961.
atgaacatgaacatcaaaaaaattgtaaaacaagccacagttctgacttttacgactgcacttctggcaggaggagcgactcaagccttcgcgaaagaaaataaccaaaaagcatacaaagaaacgtacggcgtctctcatattacacgccatgatatgctgcagatccctaaacagcagcaaaacgaaaaataccaagtgcctcaattcgatcaatcaacgattaaaaatattgagtctgcaaaaggacttgatgtgtgggacagctggccgctgcaaaacgctgacggaacagtagctgaatacaacggctatcacgttgtgtttgctcttgcgggaagcccgaaagacgctgatgacacatcaatctacatgttttatcaaaaggtaaatgtgtcaaaatctgatgacacactcaaaatcaacggagtggaagatcacaaaacgatttttgacggagacggaaaaacatatcagaacgttcagcagtttatcgatgaaggcaattatacatccggcgacaaccatacgctgagagaccctcactacgttgaagacaaaggccataaataccttgtattcgaagccaacacgggaacagaaaacggataccaaggcgaagaatctttatttaacaaagcgtactacggcggcggcacgaacttcttccgtaaagaaagccagaagcttcagcagagcgctaaaaaacgcgatgctgagttagcgaacggcgccctcggtatcatagagttaaataatgattacacattgaaaaaagtaatgaagccgctgatcacttcaaacacgatcagaaaatctgatggcaccctacaggaacatgacggtatctgcgagatccatgttgctaaatatgctgaaatattcggattgacctctgcggaagccagtaaggatatacggcaggcattgaagagtttcgcggggaaggaagtggttttttatcgccctgaagaggatgccggcgatgaaaaaggctatgaatcttttccttggtttatcaaacgtgcgcacagtccatccagagggctttacagtgtacatatcaacccatatctcattcccttctttatcgggttacagaaccggtttacgcagtttcggcttagtgaaacaaaagaaatcaccaatccgtatgccatgcgtttatacgaatccctgtgtcagtatcgtaagccggatggctcaggcatcgtctctctgaaaatcgactggatcatagagcgttaccagctgcctcaaagttaccagcgtatgcctgacttccgccgccgcttcctgcaggtctgtgttaatgagatcaacagcagaactccaatgcgcctctcatacagg

SEQ ID NO: 21837 - DNA, 1509 bp, Homo sapiens
  SIMILAR (235)..(1032): 821254mologous to Cloning vector pBACe3.6 levansucrase,accession number U80929,Smith-Waterman Score=1119.
atggctgctcaggatgcaatggtaactagaaccagttctcagactgactgcaaagaacctgggttaaaatgggctggagtggttctgatgctacttctctgctggctaatgttccaggtcctatgggaagcctgtcagcagaagacgggggagcacaaaaccatgctgcaaatgatcctgtgcaacaagagctaccagcagctgcggctggtgattacccccatgtacttaatgttgggggactggctttctaagaactgtgggcaaaactccacacctagtctaggagataacccccctgaaagacagacgcaagaatggtccggttctgcaacctttacatctgacggaaaaatccgtttattctacactgactattccggtaaacattacggcaaacaaagcctgacaacagcgcaggtaaatgtgtcaaaatctgatgacacactcaaaatcaacggagtggaagatcacaaaacgatttttgacggagacggaaaaacatatcagaacgttcagcagtttatcgatgaaggcaattatacatccggcgacaaccatacgctgagagaccctcactacgttgaagacaaaggccataaataccttgtattcgaagccaacacgggaacagaaaacggataccaaggcgaagaatctttatttaacaaagcgtactacggcggcggcacgaacttcttccgtaaagaaagccagaagcttcagcagagcgctaaaaaacgcgatgctgagttagcgaacggcgccctcggtatcatagagttaaataatgattacacattgaaaaaagtaatgaagccgctgatcacttcaaacacggtaactgatgaaatcgagcgcgcgaatgttttcaaaatgaacggcaaatggtacttgttcactgattcacgcggttcaaaaatgacgatcgatgatcttcatattcatgcagaagacactctcctgcctttctatcttggggaaaaggacgatgtcacttatgcaataaagcccacttgctggccggggcttgacattattccttcctgtctggctctgcaccgtattgaaactgagttaatgggcaaatttgatgaaggtaaactgcccaccgatccacacctgatgctccgactggccattgaaactgttgctcatgactatgatgtcatagttattgacagcgcgcctaacctgggtatcggcacgattaatgtcgtatgtgctgctgatgtgctgattgttcccacgcctgctgagttgtttgactacacctccgcactgcagtttttcgatatgcttcgtgatctgctcaagaacgttgatcttaaagggttcgagcctgatgtacgtattttgcttaccaaatacagcaatagtaatggctctcagtccccgtggatggaggagcaaatttcggatgcctggggaagcatggttctaaaaaatgttgtacgtgaaacggatgaagttggtaaaagtcaaatcccgatgagaactgttttttga

SEQ ID NO: 21838 - DNA, 1210 bp, Homo sapiens
  SIMILAR (1210)..(833): 1001254mologous to Leishmania major probable levansucrase precursor,accession number AL160371,Smith-Waterman Score=658.
ttagttgactgtcagctgtccttgctccaggatgctgtttttgacaacggatgttttattgcctttgatgttcattaagaagcttggcgcaaatgttgcctttttatcctcgaagaagcctctgtttgtcatgtagcttgtgataaccacattgttgcctttggcttgcggcactgcgaagtgagagtaagtgaatgtcacatcgtttggatcaagacccatttgcagcacaagccctgttttgttcagcggcgtgtttgaagtgatcagcggcttcattacttttttcaatgtgtaatcattatttaactctatgataccgagggcgccgttcgctaactcagcatcgcgttttttagcgctctgctgaagcttctggctttctttacggaagaagttcgtgccgccgccgtagtacgctttgttaaataaagattcttcgccttggtatccgttttctgttcccgtggtggcttcgaatacaaggtatttatggcctttgtcttcaacgtatgatgggtactctcagcgtatggttgtcgccggatgtataattgccttcatcgataaactgctgaacgttctgatatgtttttccgtctccgtcaaaaatcgttttgtgatcttccactccgttgattttgagtgtgtcatcagattttgacacatttacctgcgctgttgtcaggctttgtttgccgtaatgtttaccggaatagtcagtgtagaataaacggatttttccgtcagatgtaaaggttgcagaaccggaccattcttgcgtctgatctttcaggatcggatcgttggcgtcgaacttatcgcttttgataaacatgtagattgatgtgtcatcagcgtctttcgggcttcccgcaagagcaaacacaacgtgatagccgttgtattcagctactgttccgtcagcgttttgcagcggccagctgtcccacacatcaagtccttttgcagactcaatatttttaatcgttgattgatcgaattgaggcacttggtatttttcgttttgctgctgtttagggatctgcagcatatcatggcgtgtaatatgagagacgccgtacgtttctttgtatgctttttggttattttctttcgcgaaggcttgagtcgctcctcctgccagaagtgcagtcgtaaaagtcagaactgtggcttgttttacaatttttttgatgttcatgttcat

SEQ ID NO: 21839 - DNA, 1446 bp, Homo sapiens
  SIMILAR (565)..(1167): 981254mologous to Leishmania major probable levansucrase precursor,accession number AL160371,Smith-Waterman Score=1066.
atgaacatgaacatcaaaaaaattgtaaaacaagccacagttctgacttttacgactgcacttctggcaggaggagcgactcaagccttcgcgaaagaaaataaccaaaaagcatacaaagaaacgtacggcgtctctcatattacacgccatgatatgctgcagatccctaaacagcagcaaaacgaaaaataccaagtgcctcaattcgatcaatcaacgattaaaaatattgagtctgcaaaaggacttgatgtgtgggacagctggccgctgcaaaacgctgacggaacagtagctgaatacaacggctatcacgttgtgtttgctcttgcgggaagcccgaaagacgctgatgacacatcaatctacatgttttatcaaaaggtcggcgacaactcaatcgacagctggaaaaacgcgggccgtgtctttaaagacagcgataagttcgacgccaacgatccgatcctgaaagatcagacgcaagaatggtccggttctgcaacctttacatctgacggaaaaatccgtttattctacacgggatccctaaacagcagcaaaacggaaaaataccaagtgcctcatatcgatcaatcaacgattaaaaatattgagtctgcaaaaggacttgatgtgtgggacagctggccgctgcaaaacgctgacggaacagtagctgaatacaacggctatcacgttgtgtttgctcttgcgggaagcccgaaagacgctgatgacacatcaatctacatgttttatcaaaaggtcggcgacaactcaatcgacagctggaaaaacgcgggccgtgtctttaaagacagcgataagttcgacgccaacgatccgatcctgaaagatcagacgcaagaatggtccggttctgcaacctttacatctgacggaaaaatccgtttattctacactgactattccggtaaacattacggcaaacaaagcctgacaacagcgcaggtaaatgtgtcaaaatctgatgacacactcaaaatcaacggagtggaagatcacaaaacgatttttgacggagacggaaaaacatatcagaacgttcagcagtttatcgatgaaggcaattatacatccggcgacaaccatacgctgagagaccctcactacgttgaagacaaaggccataaataccttgattcgaagccaacacgggaacagaagagcacccccaaccgcaaggagcggcccaggactcagagcttcaccagcgccttcgccgaacggcgcgagtgcatccccaacgtacccgccgacaccaaactctccaaaatcaagaccctgcgcctggccaccagctacatcgcctacctcatggacctgctggccaaggacgaccagaatggcgaggcggaggccttcaaggcagagatcaagaagaccgacgtgaaagaggagaagaggaagaaggagctg

SEQ ID NO: 21840 - DNA, 1797 bp, Homo sapiens
  SIMILAR (265)..(1095): 961254mologous to Cloning vector pSacBII SacB,accession number U09128,Smith-Waterman Score=1422.
gcattgaagagtttcgcggggaaggaagtggttttttatcgccctgaagaggatgccggcgatgaaaaaggctatgaatcttttccttggtttatcaaacgtgcgcacagtccatccagagggctttacagtgtacatatcaacccatatctcattcccttctttatcgggttacagaaccggtttacgcagtttcggcttagtgaaacaaaagaaatcaccaatccgtatgccatgcgtttatacgaatccctgtgtcagtatcaaacgtacggcgtctctcaaatatacaaaaatgatatactgcagatccctaaacagcagcaaaacgaaaaataccaagtgcctcaattcgatcaatcaacgattaaaaatattgagtctgcaaaaggacttgatgtgtgggacagctggccgctgcaaaacgctgacggaacagtagctgaatacaacggctatcacgttgtgtttgctcttgcgggaagcccgaaagacgctgatgacacatcaatctacatgttttatcaaaaggtcggcgacaactcaatcgacagctggaaaaacgcgggccgtgtctttaaagacagcgataagttcgacgccaacgatccgatcctgaaagatcagacgcaagaatggtccggttctgcaacctttacatctgacggaaaaatccgtttattctacactgactattccggtaaacattacggcaaacaaagcctgacaacagcgcaggtaaatgtgtcaaaatctgatgacacactcaaaatcaacggagtggaagatcacaaaacgatttttgacggagacggaaaaacatatcagaacgttcagcagtttatcgatgaaggcaattatacatccggcgacaaccatacgctgagagaccctcactacgttgaagacaaaggccataaataccttgtattcgaagccaacacgggaacagaaaacggataccaaggcgaagaatctttatttaacaaagcgtactacggcggcggcacgaacttcttccgtaaagaaagccagaagcttcagcagagcgctaaaaaacgcgatgctgagttaggggtctatgctcttgctgtttcctctgtccggggtaccgagctagagctgggacttacaccggcgttcggtcgaagagtatctggtgtcatagaaattgccgatgggagtcgccgtcgtaaagctgctgcacttaccgaaagtgattatcgtgttctggttggcgagctggatgatgagcagatggctgcattatccagattgggtaacgattatcgcccaacaagtgcttatgaacgtggtcagcgttatgcaagccgattgcagaatgaatttgctggaaatatttctgcgctggctgatgcggaaaatatttcacgtaagattattacccgctgtatcaacaccgccaaattgcctaaatcagttgttgctcttttttctcaccccggtgaactatctgcccggtcaggtgatgcacttcaaaaagcctttacagataaagaggaattacttaagcagcaggcatctaaccttcatgagcagaaaaaagctggggtgatatttgaagctgaagaagttatcactcttttaacttctgtgcttaaaacgtcatctgcatcaagaactagtttaagctcacgacatcagtttgctcctggagcgacagtattgtataagggcgataaaatggtgcttaacctggacaggtctcgtgttccaactgagtgtatagagaaaattgaggccattcttaaggaacttgaaaagccagcaccctga

SEQ ID NO: 21841 - DNA, 1245 bp, Homo sapiens
  SIMILAR (250)..(1059): 981254mologous to Cloning vector pSacBII SacB,accession number U09128,Smith-Waterman Score=1428.
atgccaccactcggccaagaaggcgtgtttggctacgacagcccagagtccagagccacggcacttccggttgctgtccacgcggcttctgctgacaatccaggcctgctctgcaacaagaatagattcttctggaatgttttccccatggctcaccctcatggaagcacaaaggccatcccacagaggggcacaaaggaaacagctatgacgagcaaggccaacacaacacaaaacaacacccacaagtaccacagctggccgctgcaaaacgctgacggaacagtagctgaatacaacggctatcacgttgtgtttgctcttgcgggaagcccgaaagacgctgatgacacatcaatctacatgttttatcaaaaggtcggcgacaactcaatcgacagctggaaaaacgcgggccgtgtctttaaagacagcgataagttcgacgccaacgatccgatcctgaaagatcagacgcaagaatggtccggttctgcaacctttacatctgacggaaaaatccgtttattctacactgactattccggtaaacattacggcaaacaaagcctgacaacagcgcaggtaaatgtgtcaaaatctgatgacacactcaaaatcaacggagtggaagatcacaaaacgatttttgacggagacggaaaaacatatcagaacgttcagcagtttatcgatgaaggcaattatacatccggcgacaaccatacgctgagagaccctcactacgttgaagacaaaggccataaataccttgtattcgaagccaacacgggaacagaaaacggataccaaggcgaagaatctttatttaacaaagcgtactacggcggcggcacgaacttcttccgtaaagaaagccagaagcttcagcagagcgctaaaaaacgcgatgctgagttagcgaacggcgccctcggtatcatagagttaaataatgattacacattgaaaaaagtaatgaagccgctgatcacttcaaacacggtaactgatgaaatcgagcgcgcgaatgttttcaaaatgaacggcaaatggcattccaagatccttgtatcagggacccacagggcacgaacagaggtagaggtgactgacccgattcatcagcagagaatgggctgctgtttcaccgtgggagcaggagaaatatgtgagaaacccactgggtgcttttttactcccttgcccaattgtaactgtcagtggacagggtcagcaatcctg

SEQ ID NO: 21842 - DNA, 1535 bp, Homo sapiens
  SIMILAR (1223)..(633): 991254mologous to Leishmania major probable levansucrase precursor,accession number AL160371,Smith-Waterman Score=1038.
attatacgaatttttgaaccgaagatccgtgaacagtccatttgccgttcattttgaaacattcgcgcgctcgatttatcagttaccgtgtttgaagtgatcagcggcttcattacttttttcaatgtgtaatcattatttaactctatgataccgagggcgccgttcgctaacacagcatcgcgttttttagcgctctgctgaagcttctggctttctttacggaaaaagttcctgccgccgccgtagtacgctttgttaaataaagattcttcgccttggtatccgttttctgttcccgtgttggcttcgaatacaaggtatttatggcctttgtcttcaacgtaatgagggtctctcatcatatggttgacgccggatgtataattgccttcataaattaactgctgaacgttctgatatgtccgtgccgtctgcgtcaaaaaccggaccgggaacctccactcggtaaagggagactgtaggagcaatccaactgtaaatccatctgggccctgggcttttctatggaagagaaagccattcgaaaccaccctcaaccacagaacttccaacctggtccgcccaaaatacgcgattgtaactgctatagcactagcgaaaagcgccctcgtggtggaagtgatcagcggcttcattacttttttcaatgtgtaatcattatttaactctatgataccgagggcgccgttcgctaactcagcatcgcgttttttagcgctctgctgaagcttctggctttctttacggaagaagttcgtgccgccgccgtagtacgctttgttaaataaagattcttcgccttggtatccgttttctgttcccgtgttggcttcgaatacaaggtatttatggcctttgtcttcaacgtagtgagggtctctcagcgtatggttgtcgccggatgtataattgccttcatcgataaactgctgaacgttctgatatgtttttccgtctccgtcaaaaatcgttttgtgatcttccactccgttgattttgagtgtgtcatcagattttgacacatttacctgcgctgttgtcaggctttgtttgccgtaatgtttaccggaatagtcagtgtagaataaacggatttttccgtcagatgtaaaggttgcagaaccggaccattcttgcgtctgatctttcaggatcggatcgttggcgtcgaacttatcgctgtctttaaagacacggcccgggggggcttctagagtccccaagtagggggttatagccccagtgttgtcaattctatagacagattctttataagcagaaagtaagccatatgaaagaggtatgaagctgatgttgatttctgtctctgaaaatgcagtgtcgtgtaccttttcctccctgttcaatcctaaatgctggatgataagtgatttaaggaaccttcctggtgattctgatgcttgctcatgtttgagaaccacttctttaggagaaatctggccatgttcagcagaattggaaagacaaagaggaacactgggaggcttcat

SEQ ID NO: 21843 - DNA, 2538 bp, Homo sapiens
  SIMILAR (7)..(1254): 811254mologous to Cloning vector pSacBII SacB,accession number U09128,Smith-Waterman Score=1714.
atgaacatgaacatcaaaaaaattgtaaaacaagccacagttctgacttttacgactgcacttctggcaggaggagcgactcaagccttcgcgaaagaaaataaccaaaaagcatacaaagaaacgtacggcgtctctcatattacacgccatgatatgctgcagatccctaaacagcagcaaaacgaaaaataccaagtgcctcaattcgatcaatcaacgattaaaaatattgagtctgcaaaaggacttgatgtgtgggacagctggccgctgcaaaacgctgacggaacagtagctgaatacaacggctatcacgttgtgtttgctcttgcgggaagcccgaaagacgctgatgacacatcaatctacatgttttatcaaaaggtcggcgacaactcaatcgacagctggaaaaacgcgggccgtgtctttaaagacagcgataagttcgacgccaacgatccgatcctgaaagaatcagacgcagatggatatgactttgacactcagtatgctttcgttggtgattattctgggcagatcaccctgctgaagcttgaacagaacacgtgttcagtcatcacaaccctcaaaggacatgaagcgcaggtaaatgtgtcaaaatctgatgacacactcaaaatcaacggagtggaagatcacaaaacgatttttgacggagacggaaaaacatatcagaacgttcagcagtttatcgatgaaggcaattatacatgcggcgacaaccatacgctgagagaccctcactacgttgaagacaaaggccataaataccttgtattcgaagccaacacgggaacagaaaacggataccaaggcgaagaatctttatttaacaaagcgtactacggcggcggcacgaacttcttccgtaaagaaagccagaagcttcagcagagcgctaaaaaacgcgatgctgagttagcgaacggcgccctcggtatcatagagttaaataatgattacacattgaaaaaagtaatgaagccgctgatcacttcaaacacggtaactgatgaaatcgagcgcgcgaatgttttcaaaatgaacggcaaatggtacttgttcactgattcacgcggttcaaaaatgacgatcgatggatgccagcctacgtgttctgaggctttgcagaactttcaacggtataccggcatacagcatgtgcatcgcataggaatggcggaacgtatgtggtgtgaccggaacagagaacgtcacaccgtcagcagcagcggcggcacccgcctccccaatccaggtcctgcccgttctgaacattttgaggcatttcagtcagttgctcaatgtacctataaccagaccgttcagctggatattacggcctttttaaagaccgtaaagaaaaataagcacaagttttatccggcctttattcacattcttgcccgcctgatgaatgctcatccggagttccgtatggcaatgaaagacggtgagctggtgatatgggatagtgttcacccttgttacaccgttttccatgagcaaactgaaacgttttcatcgctctggagtgaataccacgacgatttccggcagtttctacacatatattcgcaagatgtggcgtgttacggtgaaaacctggcctatttccctaaagggtttattgagaatatgtttttcgtctcagccaatccctggtcttccttagagctagcagtgatcatgggaccaattctggccaataagtgtgacaatctaaaaacttgtcacacttcacatggatctgtcatggcggaaacagcggttatcaatcacaagaaacgtaaaaatagcccgcgaatcgtccagtcaaacgacctcactgaggcggcatatagtctctcccgggatcaaaaacgtatgctgtatctgttcgttgaccagatcagaaaatctgatggcaccctacaggaacatgacggtatctgcgagatccatgttgctaaatatgctgaaatattcggattgacctctgcggaagccagtaaggatatacggcaggcattgaagagtttcgcggggaaggaagtggttttttatcgccctgaagaggatgccggcgatgaaaaaggctatgaatcttttccttggtttatcaaacgtgcgcacagtccatccagagggctttacagtgtacatatcaacccatatctcattcccttctttatcgggttacagaaccggtttacgcagtttcggcttagtgaaacaaaagaaatcaccaatccgtatgccatgcgtttatacgaatccctgtgtcagtatcgtaagccggatggctcaggcatcgtctctctgaaaatcgactggatcatagagcgttaccagctgcctcaaagttaccagcgtatgcctgacttccgccgccgcttcctgcaggtctgtgttaatgagatcaacagcagaactccaatgcgcctctcatacattgagaaaaagaaaggccgccagacgactcatatcgtattttccttccgcgatatcacttccatgacgacaggatag

SEQ ID NO: 21844 - DNA, 1212 bp, Homo sapiens
  SIMILAR (936)..(175): 951254mologous to Cloning vector pSacBII SacB,accession number U09128,Smith-Waterman Score=1273.
ctatgcgcgtcgctgaaaaattggatctgggtgaagatccaatagtaagattaattcagtctctttccctgacataggataaaacattgtgtggctctttcccacagcagggagaatgcccaatgtttcctcttgaagatcttcctccaacttggcctcgggagtggtcctcgcatcgatcgtcatttttgaaccgcgtgaatcagtgaacaagtaccatttgccgttcattttgaaaacattcgcgcgctcgatttcatcagttaccgtgtttgaagtgatcagcggcttcattacttttttcaatgtgtaatcattatttaactctatgataccgagggcgccgttcgctaactcagcatcgcgttttttagcgctctgctgaagcttctggctttctttacggaagaagttcgtgccgccgccgtagtacgctttgttaaataaagattcttcgccttggtatccgttttctgttcccgtgttggcttcgaatacaaggtatttatggcctttgtcttcaacgtagtgagggtctctcagcgtatggttgtcgccggatgtataattgccttcatcgataaactgctgaacgttctgatatgtttttccgtctccgtcaaaaatcgttttgtgatcttccactccgttgattttgagtgtgtcatcagattttgacacatttacctgcgctgttgtcaggctttgtttgccgtaatgtttaccggaatagtcagtgtagaataaacggatttttccgtcagatgtaaaggttgcagaaccggaccattcttgcgtctgatctttcaggatcggatcgttggcgtcgaacttatcgctgtctttaaagacacggcccgcgtttttccagctgtcgattgagttgtccgcgacgtgatagccgttgtattcagctactgttccgtcagcgttttgcagcggccagctgtcccacacatcaagtccttttgcagactcaatatttttaatcgttgattgatcgaattgaggcacttggtatttttcgttttgctgctgtttagggatctgcagcatatcatggcgtgtaatatgagagacgccgtacgtttctttgtatgctttttggttattttctttcgcgaaggcttgagtcgctcctcctgccagaagtgcagtcgtaaaagtcagaactgtggcttgttttacaatttttttgatgttcatgttcat

SEQ ID NO: 21845 - DNA, 1674 bp, Homo sapiens
  SIMILAR (421)..(1341): 991254mologous to Cloning vector pSacBII SacB,accession number U09128,Smith-Waterman Score=1627.
atgtctggtgcttggctgccagttaggtggagcgatgaaggctattgggctgagtgtctcctgtcatccatcagagagggagtctgcacggggtcccacacatcccctgagactcaagcaggggcaggacagcaccattttgagagcctagccttcaccaggctacatcctgcccagaggcccaacagcacctgcatctccatatttccggagccccataacattctcctgtatctacctgtcaggacccttagctgcaggtctgttggagtttgcctgggtatcagtggtggaggctgcagaactgtgaatattgctgaacaggaaatgttgctgtctgatcattcctctggaggtttcgtctcagaggggggagtgaacgtttctgtcttgctggcattcctagtgcctctggggtatgaaatataccaagtgcctcaattcgatcaatcaacgattaaaaatattgagtctgcaaaaggacttgatgtgtgggacagctggccgctgcaaaacgctgacggaacagtagctgaatacaacggctatcacgttgtgtttgctcttgcgggaagcccgaaagacgctgatgacacatcaatctacatgttttatcaaaaggtcggcgacaactcaatcgacagctggaaaaacgcgggccgtgtctttaaagacagcgataagttcgacgccaacgatccgatcctgaaagatcagacgcaagaatggtccggttctgcaacctttacatctgacggaaaaatccgtttattctacactgactattccggtaaacattacggcaaacaaagcctgacaacagcgcaggtaaatgtgtcaaaatctgatgacacactcaaaatcaacggagtggaagatcacaaaacgatttttgacggagacggaaaaacatatcagaacgttcagcagtttatcgatgaaggcaattatacatccggcgacaaccatacgctgagagaccctcactacgttgaagacaaaggccataaataccttgtattcgaagccaacacgggaacagaaaacggataccaaggcgaagaatctttatttaacaaagcgtactacggcggcggcacgaacttcttccgtaaagaaagccagaagcttcagcagagcgctaaaaaacgcgatgctgagttagcgaacggcgccctcggtatcatagagttaaataatgattacacattgaaaaaagtaatgaagccgctgatcacttcaaacacggtaactgatgaaatcgagcgcgcgaatgttttcaaaatgaacggcaaatggtacttgttcactgattcacgcggttcaaaaatgacgatcgatgagactgtgaccacccatccccctggggctcaggcccagggagacctgaattctgtccctgagactctggctgaagttattggagatcctgcagggaatcctcccccagctgaagaaggatgggtcagggttagacctgaagaggcactctggttgcagactgccacagccgtggatctggtttgtttggaccagcttggatcgtactttggagcttctgtctgtgctgtggacctcaatgcagatggcttctcagatctgctcgtgggagcacccatgcagagcaccatcagagaggaaggaagagtgtttgtgtacatcaactctggctcg

SEQ ID NO: 21846 - DNA, 1873 bp, Homo sapiens
  SIMILAR (406)..(1086): 1001254mologous to Cloning vector pSacBII SacB,accession number U09128,Smith-Waterman Score=1217.
atggccgtcctgcagggagccctggcccgatgcctgcggaggttggagctgtgtctgcaggggatgccttggagatgcctgtgtaggagaagggctcaggcaaggttgcctgctaaaggccagtgccacattggtacaaggtgtgccttgaggaaggacgaggaaaagcagcggaagatagggactgggctgtttgcccatgaacaaggctgccgatggaccagcatcgtggtggtggtgggctctcagctcttccttcacctggctgagttcactattgtgtctgagcccgggaccatgggaggctctgatgccagtttcctgaggctgggacccaaccgaagcctccacttagggatcaatcagggagggcttcctgtaggagttgatgccagagtgggccctggaggagcgactcaagccttcgcgaaagaaaataaccaaaaagcatacaaagaaacgtacggcgtctctcatattacacgccatgatatgctgcagatccctaaacagcagcaaaacgaaaaataccaagtgcctcaattcgatcaatcaacgattaaaaatattgagtctgcaaaaggacttgatgtgtgggacagctggccgctgcaaaacgctgacggaacagtagctgaatacaacggctatcacgttgtgtttgctcttgcgggaagcccgaaagacgctgatgacacatcaatctacatgttttatcaaaaggtcggcgacaactcaatcgacagctggaaaaacgcgggccgtgtctttaaagacagcgataagttcgacgccaacgatccgatcctgaaagatcagacgcaagaatggtccggttctgcaacctttacatctgacggaaaaatccgtttattctacactgactattccggtaaacattacggcaaacaaagcctgacaacagcgcaggtaaatgtgtcaaaatctgatgacacactcaaaatcaacggagtggaagatcacaaaacgatttttgacggagacggaaaaacatatcagaacgttcagcagtttatcgatgaaggcaattatacatccggcgacaaccatacgctgagagacccgtcactacgttgaagacaaaggccataaataccttgtattcgaagccaacacgggaacagaaaacggataccaaggcgaagaatctttatttaacaaagcgtactacggcggcggcacgaacttcttccgtaaagaaagccagaagcttcagcagagcgctaaaaaacgcgatgctgagttagcgaacggcgccctcggtatcatagagttaaataatgattacacattgaaaaaagtaatgaagccgctgatcacttcaaacacggtaactgatgaaatcgagcgcgcgaatgttttcaaaatgaacggcaaatggtacgtgttccctgattcacgcggttcaacaatgacgatcgatgagggagggagagagggggaccagccggtccagccccctgcgccagccccgtgggggaaagaggccgcagatgacctcatggaagcaacggtggtgaatcatggcccagaccacattcacatttccccgggggtgggcaagcgtgttgatcaccggaggggcagcttcaacacccagagagatggggggcagggccaggtgattcagaaactgatcgcatgccagagaaccaacgacccactgcccttcagcctcttcacaggggcatttgcaagagaaggagtttttcttttcaccagcgtcattcggaattgccaggacaaggctggtggctggccactactggaagacttccaggcgctctcccctctccagtccctgaaacattttggaagaagggagaggccgggaactttgggtccaacatga

SEQ ID NO: 21847 - DNA, 2946 bp, Homo sapiens
  SIMILAR (7)..(1197): 931254mologous to Cloning vector pBACe3.6 levansucrase,accession number U80929,Smith-Waterman Score=1952.
atgaacatgaacatcaaaaaaattgtaaaacaagccacagttctgacttttacgactgcacttctggcaggaggagcgactcaagccttcgcgaaagagaataaccaaaaagcatacaaagaaacgtacggcgtctctcatattacacgccatgatatgctgcagatccctaaacagcagcaaaacgaaaaataccaagtgcctcaattcgatcaatcaacgattaaaaatattgagtctgcaaaaggacttgatgtgtgggacagctggccgctgcaaaacgctgacggaacagtagctgaatacaacggctatcacgttgtgtttgctcttgcgggaagcccgaaagacgctgatgacacatcaatctacatgttttatcaaaaggtcggcgacaactcaatcgacagctggaaaaacgcgggccgtgtctttaaagacagcgataagttcgacgccaacgatccgatcctgaaagatcagacgcaagaatggtccggttctgcaacctttacatctgacggaaaaatccgtttattctacactgactattccggtaaacattacggcaaacaaagcctgacaacagcgcaggtaaatgtgtcaaaatctgatgacacactcaaaatcaacggagtggaagatcacaaaacgatttttgacggagacggaaaaacatatcagaacgttcagcagtttatcgatgaaggcaattatacatccggcgacaaccatacgctgagagaccctcactacgttgaagacaaaggccataaataccttgtattcgaagccaacacgggaacagaaaacggataccaaggcgaagaatctttatttaacaaagcgtactacggcggcggcacgaacttcttccgtaaagaaagccagaagcttcagcagagcgctaaaaaacgcgatgctgagttagcgaacggcgccctcggtatcatagagttaaataatgattacacattgaaaaaagtaatgaagccgctgatcacttcaaacacggtaactgatgaaatcgagcgcgcgaatgttttcaaaatgaacggcaaatggtacttgttcactgattcacgcggttcaaaaatgacgatcgatgtgccgcaagccaaaggcaacaatgtggttatcacaagctacatgacaaacagaggcttcttcgagcctgagggcagcaagggcagtatcactgcagcagtaatggcaaaagggctctcagttgcctctgggaactccaccccagagagacgcagagccactgccaatgagaatgttcagccaagggctatcagagatgccgagaaagcagggcgactaccgcacccggatatggaaattcgaggacgggttgagcaacgtgttggttatacaattgaacaaattaatcatatgcgtgatgtgtttggtacgcgattgcgacgtgctgaagacgtatttccaccggtgatcggggttgctgcccataaaggtggcgtttacaaaacctcagtttctgttcatcttgctcaggatctggctctgaaggggctacgtgttttgctcgtggaaggtaacgacccccagggaacagcctcaatgtatcacggatgggtaccagatcttcatattcatgcagaagacactctcctgcctttctatcttggggaaaaggacgatgtcacttatgcaataaagcccacttgctggccggggcttgacattattccttcctgtctggctctgcaccgtattgaaactgagttaatgcgcaaatttgatgaaagcgcgccttacctgggtatcggaacgataaatggcttatgtgctgctgatttgctgattgttccccgcctgctggattgtttgactacacctgcggactggagttttttcgaatggcttcagaatatcgtcaaaaaccttgatctaagagtctgggaccatggtcccactcgtatcgtcggtctgattattagtctgggaccacggtcccactcgtatcgtcggtctgattattattctggaaccaccgtcccactcgtatcgtcggaggagcgactcaagccttcgcgaaagaaaataaccaaaaaggcatacaaagaaacgtacggcgtctctcatattacacgccatgatatgctgcagatccctaaacagcagcaaaacgaaaaataccaagtgcctcaattcgatcaatcaacgattaaaaatattgagtctgcaaaaggacttgatgtgtgggacagctggccgctgcaaaacgctgacggaacagtagctgaatacaacggctatcacgttgtgtttgctcttgcgggaagcccgaaagacgctgatgacacatcaatctacatgttttatcaaaaggtcggcgacaactcaatcgacagctggaaaaacgcgggccgtgtctttaaagacagcgataagttcgacgccaacgatccgatcctgaaagatcagacgcaagaatggtccggttctgcaacctttacatctgacggaaaaatccgtttattctacactgactattccggtaaacattacggcaaacaaagcctgacaacagcgcagccagaagtggacttccctgtccccccaggcagaggcaggagtgtggagtctgtgcagagccagccccaggagcccgtgagtgtgccccagacactgactagcacgctggagcacattgtgggccagctggatgtcctcactcaggctttgcagaactttcatcggtataccggcatacagcatgtgcatcgcataggaatggcggaacgtatgtggtgtgaccggaacagagaacgtcacaccgtcagcagcagcggcggcaaccgcctccccaatccaggtcctgaccgttctgtccgtcacttcccagatccgcgctttctctgtccttcctgtgcgacggttacgccgctccatgagcttatcacgaataaatacctgtga

SEQ ID NO: 21848 - DNA, 1498 bp, Homo sapiens
  SIMILAR (1282)..(464): 951254mologous to Cloning vector pBACe3.6 levansucrase,accession number U80929,Smith-Waterman Score=1394.
ttagttgactgtcagctgtccttgctccaggatgctgtttttgacaacggatgttttattgcctttgatgttcattaagaagcttggcgcaaatgttgcctttttatcctcgaagaagcctctgtttgtcatgtagcttgtgataaccacattgttgcctttggcttgcggcactgcgaagtgagagtaagtgaatgtcacatcgtttggatcaagacccatttgcagcacaagccctgttttgttcagcggcttgtaagggccggttaaagagtttgatacataaccaagcatgtgaatatcgtttgagttaataccatcgatcgtcatttttgaaccgcgtgaatcagtgaacaagtaccatttgccgttcattttgaaaacattcgcgcgctcgatttcatcagttaccgtgtttgaagtgatcagcggcttcattactttgctcaatgtgtaatcattatttagactggaagaagttcgtgccgccgccgtagtacgctttgttaaataaagagttcttcgcctgtcgtatccgttcttctgttcccgtgttggcttcgaatacaaggtatttatggcctttgtcttcaacgtagtgagggtctctcaacgtatggttgtcgccggatgtataattgccttcatcgataaactgctgaacgttctgatatgtttttccgtctccgtcaaaaatcgttttgtgatcttccactccgttgattttgagtgtgtcatcagattttgacacatttacctgcgctgttgtcaggctttgtttgccgtaatgtttaccggaatagtcagtgtagaataaacggatttttccgtcagatgtaaaggttgcagaaccggaccgttcttgcgtctgatctttcaggatcggatcgttggcgtcgaacttatcgctgtctttaaagacacggcccgcgtttttccagctgtcgattgagttgtcgccgaccttttgataaaacatgtagattgatgtgtcatcagcgtctttcgggcttcccgcaagagcaaacacaacgtgatagccgttgtattcagctactgttccgtcagcgttttgcagcggccagctgtcccacacatcaagtccttttgcagactcaatatttttaatcgttgattgatcgaattgaggcacttggtatttttcgttttgctgctgtttagggatctgcagcatatcatggcgtgtaatatgagagacgccgtacgtttctttgtatgctttttggttattttctttcgcgaaggcttgagtcgctcctcccctttgttaataaaaaatcttcggccttggtttccgttttctgttcccgggtggcttccaataccagggatttattggccttgtccttcaccggaggggagggctccttcacctttgggttgccgccggtgtataaattgcctttcttcgtaaacctgttaaccttcttgttttgtttttccttttccgccaaaatcgttttggaaccttcccctc

SEQ ID NO: 21849 - DNA, 4132 bp, Homo sapiens
  SIMILAR (2714)..(4129): 1001254mologous to Cloning vector pBACe3.6 levansucrase,accession number U80929,Smith-Waterman Score=2482.
atgattcatgtcagcgttgggacccaggaatctcctgttaatcagtaccctggtgattttgatccagcgcctcgttcggcccttatccatgcctggttcttggaggaggtgttggggcaacacgccctttcagtgggactaattcccctctccatgacagcgctggcggtgcaacaatgccgttacccctgcgacaacatggcctccggggaggctgcccttttacaatgtctccccgcctcctcggctcctctggacctaggggagcgtatccctaaacagcagcaaaacgaaaaataccaagtgcctcaattcgatcaatcaacgattaaaaatattgagtctgcaaaaggacttgatgtgtgggacagctggccgctgcaaaacgctgacggaacagtagctgaatacaacggctatcacgttgtgtttgctcttgcgggaagcccgaaagacgctgatgacacatcaatctacatgttttatcaaaaggtcggcgacaactcaatcgacagctggaaaaacgcgggccgtgtctttaaagacagcgataagttcgacgccaacgatccgatcctgaaagatcagacgcaagaatggtccggttctgcaacctttacatctgacggaaaaatccgtttattctacactgactattccggtaaacattacggcaaacaaagcctgacaacagcgcaggtaaatgtgtcaaaatctgatgacacactcaaaatcaacggagtggaagatcacaaaacgatttttgacggagacggaaaaacatatcagaacgttcagcagtttatcgatgaaggcaattatacatccggcgacaaccatacgctgagagaccctcactacgttgaagacaaaggccataaataccttgtattcgaagccaacacgggaacagaaaacggataccaaggcgaagaatctttatttaacaaagcgtactacggcggcggcacggcttcttccatcagaaaatctgatggcaccctacaggaacatgacggtatctgcgagatccatgttgctaaatatgctgaaatattcggattgacctctgcggaagccagtaaggatatacggcaggcattgaagagtttcgcggggaaggaagtggttttttatcgccctgaagaggatgccggcgatgaaaaaggctatgaatcttttccttggtttatcaaacgtgcgcacagtccatccagagggctttacagtgtacatatcaacccatatctcattcccttctttatcgggttacagaaccggtttacgcagtttcggcttagtgaaacaaaagaaatcaccaatccgtatgccatgcgtttatacgaatccctgtgtcagtatcgtaagccgcatggctcaggcatcgtctctctgaaaatcgaatggatcatagagcgttaccagctgcctcaaagttaccagcgtatgcctgacttccgccgccgcttcctgcagtgcataaacgctggtcatgaaatgacgaaggctatcgccattgcacagtttaatgatgacagcccggaagcgaggaaaataacccggcgctggagaataggtgaagcagcggatttagttggggtttcttctcaggctatcagagatgccgagaaagcagggcgactaccgcacccggatatggaaattcgaggacgggttgagcaacgtgttggttatacaattgaacaaattaatcatatgcgtgatgtgtttggtacgcgattgcgacgtgctgaagacgtatttccaccggtgatcggggttgctgcccataaaggtggcgtttacaaaacctcagtttctgttcatcttgctcaggatctggctctgaaggggctacgtgttttgctcgtggaaggtaacgacccccagggaacagcctcaatgtatcacggatgggtaccagatcttcatattcatgcagaagacactctcctgcctttctatcttggggaaaaggacgatgtcacttatgcaataaagcccacttgctggccggggcttgacattattccttcctgtctggctctgcaccgtattgaaactgagttaatgggcaaatttgatgaaggtaaactgcccaccgatccacacctgatgctccgactggccattgaaactgttgctcatgactatgatgtcatagttattgacagcgcgcctaacctgggtatcggcacgattaatgtcgtatgtgctgctgatgtgctgattgttcccacgcctgctgagttgtttgactacacctccgcactgcagtttttcgatatgcttcgtgatctgctcaagaacgcgtgatcttaaagggttcgagcctgatgctgaaacaagccagggagctctgggcacactggcaaatgtagtgacctcccttgccaacctaagtgaatctttgaacaacggtgacacttcagaaatccagccagaggaccagtctgcaagtgagataactcgggcatttgataccttagctaaagcacttaataccacagacagctcctcttctccaagcttggcagatgggatagacaccagtggaggagggagcatccacgtcatcagcagagaccagtcgacacccatcattgaggttgaaggccccctcctttcagacacacacgtcacatttaagtcaattcgggaggatcgaaacggcagatcgcaaaaaacagtacatacagaaggagacatgaacatgaacatcaaaaaaattgtaaaacaagccacagttctgacttttacgactgcacttctggcaggaggagcgactcaagccttcgcgaaagaaaataaccaaaaagcatacaaagaaacgtacggcgtctctcatattacacgccatgatatgctgcagatccctaaacagcagcaaaacgaaaaataccaagtgcctcaattcgatcaatcaacgattaaaaatattgagtctgcaaaaggacttgatgtgtgggacagctggccgctgcaaaacgctgacggaacagtagctgaatacaacggctatcacgttgtgtttgctcttgcgggaagcccgaaagacgctgatgacacatcaatctacatgttttatcaaaaggtcggcgacaactcaatcgacagctggaaaaacgcgggccgtgtctttaaagacagcgataagttcgacgccaacgatccgatcctgaaagatcagacgcaagaatggtccggttctgcaacctttacatctgacggaaaaatccgtttattctacactgactattccggtaaacattacggcaaacaaagcctgacaacagcgcaggtaaatgtgtcaaaatctgatgacacactcaaaatcaacggagtggaagatcacaaaacgatttttgacggagacggaaaaacatatcagaacgttcagcagtttatcgatgaaggcaattatacatccggcgacaaccatacgctgagagaccctcactacgttgaagacaaaggccataaataccttgtattcgaagccaacacgggaacagaaaacggataccaaggcgaagaatctttatttaacaaagcgtactacggcggcggcacgaacttcttccgtaaagaaagccagaagcttcagcagagcgctaaaaaacgcgatgctgagttagcgaacggcgccctcggtatcatagagttaaataatgattacacattgaaaaaagtaatgaagccgctgatcacttcaaacacggtaactgatgaaatcgagcgcgcgaatgttttcaaaatgaacggcaaatggtacttgttcactgattcacgcggttcaaaaatgacgatcgatggtattaactcaaacgatatttacatgcttggttatgtatcaaactctttaaccggcccttacaagccgctgaacaaaacagggcttgtgctgcaaatgggtcttgatccaaacgatgtgacattcacttactctcacttcgcagtgccgcaagccaaaggcaacaatgtggttatcacaagctacatgacaaacagaggcttcttcgaggataaaaaggcaacatttgcgccaagcttcttaatgaacatcaaaggcaataaaacatccgttgtcaaaaacagcatcctggagcaaggacagctgacagtcaactaa

SEQ ID NO: 21850 - DNA, 1218 bp, Homo sapiens
  SIMILAR (451)..(1215): 871254mologous to Cloning vector pBACe3.6 levansucrase,accession number U80929,Smith-Waterman Score=1122.
atgaacatgaacatcaaaaaaattgtaaaacaagccacagttctcacttttacgactgcacttctggcaggaggagcccctcaagccttcgcgaaagaaaataaccaaaaagcatacaaagaaacgtacggcgtctctcatattacacgccatcatatgctgcagatccctaaacagcagcaaaacgaaaaataccaagtgcctcaattcgatcaatcaacgattaaaaatattgagtctgcaaaaggacttgatgtgtgggacagctgcccgctgcaaaacgctgacggaacagtagctgaatacaacggctatcacgttgtgtttgctcttgcgggaagcccgaaagacgctgatgacacatcaatctacatgttttatcaaaaggtcggcgacaactcaatcgacagctggaaaaacgcgggccgtgtctttaaagacagcgataagttcgacgccaacgatccgatcctgaaagatcagacgcaagaatggtccggttctgcaacctttacatctgacggaaaaatccgtttattctacactgactattccgacaaaggccataaataccttgtattcgaagccaacacgggaacagaaaacggataccaaggcgaagaatctttatttaacaaagcgtactacggcggcggcacgaacttcttccgtaaagaaagccagaagcttcagcagagcgctaaaaaacgcgatgctgagttagcgaacggcgccctcggtatcatagagttaaataatgattacacattgaaaaaagtaatgaagccgctgatcacttcaaacacggtaactgatgaaatcgagcgcgcgaatgttttcaaaatgaacggcaaatggtacttgttcactaattcacgcggttcaaaaatgacgatcgatggtattaactcaaacgatattaacatgcttggttatgtatcaaactctttaaccggcccttacaagccgctgaacaaaacagggcttgtgctgcaaatgggtcttgatccaaacgatgtgacattaactaactctcacttcgcagtgccgcaagccaaaggcaacaatgtggttatcacaagctacatgacaaacagaggcttcttcgaggataaaaaggcaacatttgcgccaagcttcttaatgaacatcaaaggcaataaaacatccgttgtcaaaaacagcatcctggagcaaggacagctaacagtcaactaa

SEQ ID NO: 21851 - DNA, 1851 bp, Homo sapiens
  SIMILAR (1428)..(1850): 1001254mologous to Cloning vector pSacBII SacB,accession number U09128,Smith-Waterman Score=746.
ccatggatatccgcgcctgttccggtggacgtggtggagggtgcaatggactctgtgacggttcttagctttggtggtttaatgctctatttttgtgctggttggcctcctgccaggaggtggtgctttccagaaagcatcagctgtggtagtatggagagggaccagtggtgggggctccaagtagcgaagcgagcaggactggccggcggccaaagcggtcggacagtgctccgagaacgggtgcgcatagaaattgcatcaacgcatatagcgctagcagcacgccatagtgactggcgatgctgtcggaatggacgatatcccgcaagaggcccggcagctttgcagaactttcagcggtataccggcatacagcatgtgcatcgcataggaatggcggaacgtatgtggtgtgaccggaacagagaacgtcacaccgtcagcagcagcggcggcaaccgcctccccaatccaggtcctgaccgttcttgtgacaatctaaaaacttgtcacacttcacatggatctgtcatggcggaaacagcggttatcaatcacaagaaacgtaaaaatagcccgcgaatcgtccagtcaaacgacctcactgaggcggcatatagtctctcccgggatcaaaaacgtatgctgtatctgttcgttgaccagatcagaaaatctgatggcaccctacaggaacatgacggtatctgcgagatccatgttgcttaaatatgttgaaatatttcggattgccctttgcggaagccagtaaggatatccggcaggcattgaagagtttcgcgggaaaggaagtggttttttatcgccctgaagaggatgccggcgatgaaaaaggctatgaatcttttccttggtttatcaaacgtgcgcccagtccatccaaagggctttacagtgtacatatcaacccatatctcattcccttctttatcgggttacagaacccggttaacgcagtttcggcttagtgaaacaaaagaaatccccaatccgtatgccatgcgctatatacaaataccctgtgtcagtatcgtaagccggatggctcaggcatcgtctctctgaaaatcgactggatcatagagcgttaccagctgcctcaaagttaccagcgagtgtggaccccaggcatcaactgtccagagccctgtccaggagtgtggaccccaggcatcaactgtccaggggcctggggcatccatgggccacacggcagcgctgaaaacacagggcccttgcacccagggcagacctcagcacagttggagacatcactcctgccctccttgcgctcggcccgagagctagagcttgctcagctcagccccaggaggaagcagaaccgcagcctccagaacattggggtgaccccgtcgctgagggtcccctggcccaaggccagcaacgttcagcagtttatcgatgaaggcaattatacatccggcgacaaccatacgctgagagaccctcactacgttgaagacaaaggccataaataccttgtattcgaagccaacacgggaacagaaaacggataccaaggcgaagaatctttatttaacaaagcgtactacggcggcggcacgaacttcttccgtaaagaaagccagaagcttcagcagagcgctaaaaaacgcgatgctgagttagcgaacggcgccctcggtatcatagagttaaataatgattacacattgaaaaaagtaatgaagccgctgatcacttcaaacacggtaactgatgaaatcgagcgcgcgaatgttttcaaaatgaacggcaaatggtacttgttcactgattcacgcggttcaaaaatgacgatcgatg

SEQ ID NO: 21852 - DNA, 5912 bp, Homo sapiens
  SIMILAR (5292)..(5426): 531254mologous to Cloning vector pBACe3.6 levansucrase,accession number U80929,Smith-Waterman Score=112.
atggaggtaacacactcaatcatgatccggccagccctgaggcccagcccacagtccggcccacagcccacgctaaccctggtggtcccagttagagaagtgggaggccaggtcccttatggaaggcgccgccttataagcgggttcccttcccgggggcggcacggctggtcggcggcactctgctggtgcgggggcggcgagcccgggatcgagctaccgcggccgagcgcgccggccaccgcctgcaccgcccttccgcccgccctccggacggccgcagccctgcgggtctccgctccagacccacccccgccccaccccgcgcgcctctgccgcctcttccagagacccagcttgccgagcggccgccgctgccgctgtcgccgccgccgccgccaccgcgccaggttccggccgcggccaccctccgccgtccagggcccctccgtctcggccccgggaccccggctccccgccagccccggccccggccccggcaccatgtcggagaaaagcgtggaggcagcggccgagttgagcgccaaggacctgaaggagaagaaggagaaggtggaggagaaggcaagccggaaagagcgaaagaaagaagtggtggaggaggaggagaacggggctgaggaggaagaagaagaaactgccgaggatggagaggaggaagatgaaggggaagaagaagatgaggaagaagaagaagaggatgatgaagggcccgcgctgaagagagctgccgaagaggaggatgaagcggatcccaaacggcagaagacagaaaatggggcatcggcgatctcagccttctgcgaagagcaggggtcacttggcagcatcagccagacagaagtggatgcggccagtccaacagaggggtcgggcgtgaggggacggttggtggtcaagagaactcttggggcgggctttctcatcctcaacgggtggctgcctgcatcctcccgggcttcctacccctggagcttctcaactccattctctttcccgcccagtggcccgcccgctgccgcccccggccatcccctggcccccggccctcacccggcggcgccctcctcctgggggcccaggccccgccgctacacggtgctgagcgtgggtcccggaggcctgcgcagcgggaggctgcccctgcagccccgcgtccagctggatgagcgcggccggcagcgcggggacttctcgctatggctgcgcccagcccggcgcgcggacgccggcgagtaccgcgccgcggtgcacctcagggaccgcgccctctcctgccgcctccgtctgcgcctgggccaggcctcgagtatgtggggcgggacgatgggagaagggctgggagtgactgccagccccccaggatctctcagagcctccgactgggtcattttgaactgctccttcagccgccctgaccgcccagcctctgtgcattggttccggaaccggggccagggccgagtccctgtccgggagtccccccatcaccacttagcggaaagcttcctcttcctgccccaagtcagccccatggactctgggccctggggctgcatcctcacctacagagatggcttcaacgtctccatcatgtataacctcactgttctgggtctggagcccccaactcccttgacagtgtacgctggagcaggttccagggtggggctgccctgccgcctgcctgctggtgtggggacccggtctttcctcactgccaagtggactcctcctgggggaggccctgacctcctggtgactggagacaatggcgactttacccttcgactagaggatgtgagccaggcccaggctgggacctacacctgccatatccatctgcaggaacagcagctcaatgccactgtcacattggcaatcatcacaggaggagcgactcaagccttcgcgaaagaaaataaccaaaaagcatacaaagaaacgtacggcgtctctcatattacacgccatgatatgctgcagatccctaaacagcagcaaaacgaaaaataccaagtgcctcaattcgatcaatcaacgattaaaaatattgagtctgcaaaaggacttgatgtgtgggacagctggccgctgcaaaacgctgacggaacagtagctgaatacaacggctatcacgttgtgtttgctcttgcgggaagcccgaaagacgctgatgacacatcaatctacatgttttatcaaaaggtcggcgacaactcaatcgacagctggaaaaacgcgggccgtgtctttaaagacagcgataagttcgacgccaacgatccgatcctgaaagatcagacgcaagaatggtccggttctgcaacctttacatctgacggaaaaatccgtttattctacactgactattccggtaaacattacggcaaacaaagcctgacaacagcgcaggtaaatgtgtcaaaatctgatgacacactcaaaatcaacggagtggaagatcacaaaacgatttttgacggagacggaaaaacatatcagaacgttcagcagtttatcgatgaaggcaattatacatccggcgacaaccatacgctgagagaccctcactacgttgaagacaaaggccataaataccttgtattcgaagccaacacgggaacagaaaacggataccaaggcgaagaatctttatttaacaaagcgtactacggcggcggcacgaacttcttccgtaaagaaagccagaagcttcagcagagcgctaaaaaacgcgatgctgagttagcgaacggcgccctcggtatcatagagttaaataatgattacacattgaaaaaagtaatgaagccgctgatcacttcaaacacggtaactgatgaaatcgagcgcgcgaatgttttcaaaatgaacggcaaatggtacttgttcactgattcacgcggttcaaaaatgacgatcgatggtattaactcaaacgatatttacatgcttggttatgtatcaaactctttaaccggcccttacaagccgctgaacaaaacagggcttgtgctgcaaatgggtcttgatccaaacgatgtgacattcacttactctcacttcgcagtgccgcaagccaaaggcaacaatgtggttatcacaagctacatgacaaacagaggcttcttcgaggataaaaaggcaacatttgcgccaagcttcttaatgaacatcaaaggcaataaaacatccgttgtcaaaaacagcatcctggagcaaggacagcgggtaccgagctcgaattcgtaatcatgtctgggaccacgatcccactcgtgttgtcggtctgattctcggtctgggaccacggtccctcttgtcttgttcgtctgactgtccggcgtgggactgcggattccgtcagtggcctgtcctggtgcggggtgttggcgtggtcgtcggctccgtgttgaccgtgggttcccctcggtgtggcccgcccagcccgaaagacgctgatgacacatcaatctacatgttttatcaaaaggtcggcgacaactcaatcgacagctggaaaaacgcgggccgtgtctttaaagacagcgataagttttttgccaacttttcttttctgaaagatcagacgcaagagtggggggggtctgcaacctttacatctgacggaaaaatccgtttattctacactgactattccggtaaacattacggcaaacaaagcctgacaacagcgcaggtaaatgtgtcaaaatctgatgacacactcaaaatcaacggagtggaagatcacaaaacgatttttgacggagacggaaaaacatatcagaacgttcagcagtttatcgatgaaggcaattatacatccggcgacaaccatacgctgagagaccctcactacgacagcctcaatgcccacggatgggtaccagatcttcatattcatgcagaagacactctcctgcctttctatcttggggaaaaggacgatgtcacttatgcaataaagcccacttgctggccggggcttgacattattcctttctgtctggctctgcaccgtattgaaacggagttaatgggcaaatttgatgaaggtaaactgcccaccgatccacacctgatgctccgactggccattgaaactgttgctcatgactatgatgtcatagttattgacagcgcgcctaacctgggtatcggcacgattaatgtcgtatgtgctgctgatgtgctgattgttcccacgcctgctgagttgtttgactacacctccgcactgcagtttttcgatatgcttcgtgatctgctcaagaacgttgatcttaaagggttcgagcctgatgtacgtattttgcttaccaaatacagcaatagtaatggctctcagtccccggggatggaggagcaaattcgggatgcctggggaagcatggttctaaaaaatgttgtacgtgaaacggatgaagttggtaaaggtcagatccggatgagaactgtttttgaacaggccattgatcaacgctcttcaactgaaagcattatccctaatgatggtaagaaattgtcattttctgtgtcaggaaaaatgaggaaagggcactacttttcgtctgaagagagtcatgttagaacagacatcctggcggatacaaaaatgcaatctgcaaacggacttgatgtgtgggacagctggccgctgcaaaacgctgacggaacagtagctgaatacaacggctatcacgttgtgtttgctcttgcgggaagcccgaaagacgctgatgacacatcaatctacatgttttatcaaatggtcggcgacaactcaatcgacagctggaaaaacgcgggccgtgtctttaaagacagcgataagttcgacgcccacgatccgatcctgaaagatcagacgcaagaatggtccggttctgcaacctttacatctgacggaaaaatccgtttattctacactgactattccggtaaacattacggcaaacaaagcctgacaacagcgcaggtaaatgtgtcaaaatctgatgacacactcaaaatcaacggagtggaagatcacaaaacgatttttgacggagacggaaaaacatatcagaacgttcagcagtttatcgatgaaggcaattatacatccggcgacaaccatacgctgagagaccctcactacgttgaagacaaaggccataaataccttgtattcgaagccaacacgggaacagaaaacggataccaaagcgaagaatctttatttaacaaagcgtactacggcggcggcacgaacttcttccgtaaagaaagccagaagcttcagcagagcgctaaaaaacgcgatgctgaattaacgaacggcgccccttcgtatcatagagttaaataatgattacacattgaaaaaagtaatgaagccgctgatgacttcaaacacggatctggctctgaaggggctacgtgttttgctcgtggaaggtaacgacccccagggaacagcctcaatgtatcacggatgggtaccagatcttcatattcatgcagaagacactctcctgcctttctatcttggggaaaaggacgatgtcacttatgcaataaagcccacttgctggccggggcttgacattattccttcctgtctggctctgcaccgtattgaaactgagttaatgggcaaatttgatgaaggtaaactgcccaccgatccacacctgatgctccgactggccattgaaactgttgctcatgactatgatgtcatagttattgacagcgcgcctaacctgggtatcggcacgattaatgtcgtatgtgctgctgatgtgctgattgttcccacgcctgctgagttgtttgactacacctccgcactgcagtttttcgatatgcttcgtgatctgctcaagaacgtggtgttctag

SEQ ID NO: 21853 - DNA, 6633 bp, Homo sapiens
  SIMILAR (6146)..(5508): 981254mologous to Cloning vector pSacBII SacB,accession number U09128,Smith-Waterman Score=1117.
  misc_feature (1)...(6633): n = a,t,c or g
catttgccgttcattttgaaaacattcgcgcgctcgatttcatcagttaccgtgtttgaagtgatcagcggcttcattacttttttcaatgtgtaatcattatttaactctatgataccgagggcgccgttcgctaactcagcatcgcgttttttagcgctctgctgaagcttctggctttctttacggaagaagttcgtgccgccgccgtagtacgcttggttaaataaagattcttcgccttggtatccgttttctgttcccgtgttggcttcgaatacaaggtatttatggcctttgtcttcaacgtagtgagggtctctcagcgtatggttgtcgccggatgtataattgccttcatcgataaactgctgaacgttctgatatgtttttccgtctccgtcaaaaatcgttttgtgatcttccactccgttgattttgagtgtgtcatcagattttgacacatttacctgcgctgttgtcaggctttgtttgccgtaatgtttaccggaatagtcagtgtaaaataaacggatttttccgtcagatgtaaagggttgcagaaccggaccattcttgcgtctgatctttaggatcggatcgttggcgtcgaacttatcgctgtctttaaagacacgggccgcgtttttccanctggacgggtctcgtgttccaactgagtgtatagagaaaattgaggccgttcttaaagaacttggaaagccagccctctggtgcgaccacgctttatcctccggttgtctggtcctttccttatggtcctttgtttcaggcccgatagcatgactgggcctccttctttcgtctggggacccctggtccaattggagttgtcggggtggtaattcgacctggacgccgcggccccctcccagccggggggttgcttttttatctgtgaggcgatggtcccggtcgtattgagctagtactttttcctcacccacccctttccccccccttctccgtaggccgctactctgcaactgggccatcgcccctgttcgtgttgtggtggtttgtgtatggtagtggtcaattggtgtgccgggtcgaggagtgcgcatatggcgttgagacgggtgaaggttgatccgggcaccgctgcgctctctttttcccgttgctggtttcttgtctctgtcgatcggctcacgaggagtaggttcagcgctattcggcggctcgcggcgcctatccattgttacccctggattggggaggcggttgccgccgctgctgctgacggtgtgacgttctctgttccggtcacaccacatacgttccgccattcctatgcgatgcacatgctgtatgccggtataccgctgaaagttctgcaaagcctcctgcttgacggccacagagcttctgctccactcctgttcctctgtagggtgcagccctggaggtggaggaaatgtaagcaagatatagattaggtccatagcgtatagcagatctaattgcccgctttccagtcgggaaacctgtcgtgccagctgcattaatgaatcggccaacgcgcggggagaggcggtttgcgtattgggcgccagggtggtttttcttttcaccagtgagacgggcaacagctgattgcccttcaccgcctggccctgagagagttgcagcaagcggtccacgctggtttgccccagcaggcgaaaatcctgtttgatgggtggtccgaaatcggcaaaatcccatttgccgttcattttgaaaacattcgcgcgctcgatttcatcagttaccgtgtttgaagtgatcagcggcttcattacttttttcaatgtgtaatcattatttaactctatgataccgagggcgccgttcgctaactcagcatcgcgttttttagcgctctgctgaagcttctggctttctttacggaagaagttcgtgccgccgccgtagtacgctttgttaaataaagattcttcgccttggtatccgttttctgttcccgtgttggcttcgaatacaaggtatttatggcctttgtcttcaacgtagtgagggtctctcagcgtatggttgtcgccggatgtataattgccttcatcgataaactgctgaacgttctgatatgtttttccgtctccgtcaaaaatcgttttgtgatcttccactccgttgattttgagtgtgtcatcagattttgacacatttacctgcgctgttgtcaggctttgtttgccgtaatgtttaccgggatagtcagtgtaaaataaaccgatttttccgtcagatgtaaaagttgcagaaaccggaccattcttgcgtctgatcttttcagatccggatcgttgggcgtcaaacttatcggctggctttaaagaacacggcccgggtttttcccactggcaattgaatttgtcccccaactgcccgctttccagtcgggaaacctgtcgtgccagctgcattaatgaatcggccaacgcgcggggagaggcggtttgcgtattgggcgccagggtggtttttcttttcaccagtgagacgggcaacagctgattgcccttcaccgcctggccctgagagagttgcagcaagcggtccacgctggtttgccccagcaggcgaaaatcctgtttgatggtggttccgaaatcggcaaaatcctgcccgctttccagtcgggaaacctgtcgtgccagctgcattaatgaatcggccaacgcgcggggagaggcggtttgcgtattgggcgccagggtggtttttcttttcaccagtgagacgggcaacagctgattgcccttcaccgcctggccctgagagagttgcagcaagcggtccacgctggtttgccccagcaggcgaaaatcctgtttgatggtggttccgaaatccgcaaaatcctgcccgctttccagtcgggaaacctgtcgtgccagctgcattaatgaatcggccaacgcgcggggagaggcggcttgcgtattgggcgccagggtggtttttcttttcaccagtgagacgggcaacagctgattgcccttcaccgcctggccctgacagagtttaagcaagcggtccacgctggtttgccccagcaggcgaaaatcttgtttgatggtggttccgaaatcggtaaaatccattaattgcgttgcgctcactgcccgctttccagtcgggaaacctgtcgtgccagctgcattaatgaatcggccaacgcgcggggagaggcggtttgcgtattgggcgccagggtggtttttcttttcaccagtgagacgggcaacagctgattgcccttcaccgcctggccctggattggggaggcggttgccgccgctgctgctgacggtgtgacgttctctgttccggtcacaccacatacgttccgccattcctatgcgatgcacatgctgtatgccgctataccgctgaaagttctgtaaagccagtgagacgggcaacagctgattgcccttcaccgcctggccctgagagagttgcagcaagcggtccacgctggtttgccccagcaggcgaaaatcctgtttgatggtggttccgaaatcggcaaaatcctgcccgctttccagtcgggaaacctgtcgtgccagctgcattaatgaatcggccaacgcgcggggagaggcggtttgcgtattgggcgccagggtggtttttcttttcaccagtgagacgggcaacagctgattgcccttcaccgcctggccctgagagagttgcagcaagcggtccacgctggtttgccccagcaggcgaaaatcctgtttgatggtggttccgaaatcggcaaaatcctgcccgctttccagtcgggaaacctgtcgtgccagctgcattaatgaatcggccaacgcgcggggagaggcggtttgcgtattgggcgccagggtggtttttcttttcaccagtgagacgggcaacagctgattgcccttcaccgcctggccctgagagagttgcagcaagcggtccacgctggtttgccccagcaggcgaaaatcctgtttgatggtggttccgaaatcggcaaaatccttgtcaggctgcccatctgccaaggaaactgtcaaggcttcactggttgtgccaggcccttgaccaacctctgggtcagctgcattcccaatgctgttctgagtctgcaagcgttgctgcccgctttccagtcgggaaacctgtcgtgccagctgcattaatgaatcggccaacgcgcggggagaggcggtttgcgtattgggcgccagggtggtttttcttttcaccagtgagacgggcaacagctgattgcccttcaccgcctggccctgagagagttgcagcaagcggtccacgctggtttgccccagcaggcgaaaatcctgtttgatggtggttccgaaatcggcaaaatcctgcccgctttccagtcgggaaacctgtcgtgccagctgcattaatgaatcggccaacgcgcggggagaggcggtttgcgtattgggcgccagggtggtttttcttttcaccagtgagacgggcaacagctgattgcccttcaccgcctggccctgagagagttgcagcaagcggtccacgctggtttgccccagcaggcgaaaatcctgtttgatggtggttccgaaatcggcaaaatcctgcccgctttccagtcgggaaacctgtcgtgccagctgcattaatgaatcggccaacgcgcggggagaggcggtttgcgtattgggcgccagggtggtttttcttttcaccagtgagacgggcaacagctgattgcccttcaccgcctggccctgagagagttgcagcaagcggtccacgctggtttgccccagcaggcgaaaatcctgtttgatggtggttccgaaatcggcaaaatccattaattgcgttgcgctcactgcccgctttccagtcgggaaacctgtcgtgccagctgcattaatgaatcggccaacgcgcggggagaggcggtttgcgtattgggcgccagggtggtttttcttttcaccagtgagacgggcaacagctgattgcccttcaccgcctggccctgagagagttgcagcaagcggtccacgctggtttgccccagcaggcgaaaatcctgtttgatggtggttccgaaatcggcaaaatcccttaaacctttctgctttactcaggtataaaagatgctgatacaccaatgagggatctttttcaataagattatttttcagagactgaatgaggagaaggaatgtatccccttcaagtttgttacttaaaaacatcggcaaatcttttggtgcagtgatggctaaaagatgtgcacaggcttctttatccttcctggtactgagagcatttataatctgaccaaattcataggcattattaggcttggctatcggaagtttctcagggtcttctggtgacctgctgcttttgcctcccttctcagaagcaaggcatcccatggagacctcccctgcaggtcttccaggctcctccttgccttcattcaccgtgtttgaagtgatcagcggcttcattacttttttcaatgtgtaatcattatttaactctatgataccgagggcgccgttcgctaactcagcatcgcgttttttagcgctctgctgaagcttctggctttctttacggaagaagttcgtgccgccgccgtagtacgctttgttaaataaagattcttcgccttggtatccgttttctgttcccgtgttggcttcgaatacaaggtatttatggcctttgtcttcaacgtagtgagggtctctcagcgtatggttgtcgccggatgtataattgccttcatcgataaactgctgaacgttctgatatgtttttccgtctccgtcaaaaatcgttttgtgatcttccactccgttgattttgagtgtgtcatcagattttgacacatttacctgcgctgttgtcaggctttgtttgccgtaatgtttaccggaatagtcagtgtagaataaacggatttttccgtcagatgtaaaggttgcagaaccggaccattcttgcgtctgatctttcaggatcggatcgttggcgtcgaacttatcgctgtctttaaagacacggcccgcgtttttccagctgtcgattgagttgtcgccgacctgacctggtttccatttaagatctcttggggtttctgacctaatattctttccactcttttgagggctaggactgatcatacttgtttgaaggacggtatttattaattgcgttgcgctcactgcccgctttccagtcgggaaacctgtcgtgccagctgcattaatgaatcggccaacgcgcggggagaggcggtttgcgtattgggcgccagggtggtttttcttttcaccagtgagacgggcaacagctgattgcccttcaccgcctggccctgagagagttgcagcaagcggtccacgctggtttgccccagcaagcgaaaatcctgtttgatggtggttccgaaatcggcaaaatcccttgagtcctttatgagccagagctcgtctatagaaggctttcacgttcccatcagctagctgaagtgcgtgatcacagtcctgctttgcttcttcaaactggcacagcttcaagtaacagagagct

SEQ ID NO: 21854 - DNA, 3947 bp, Homo sapiens
  SIMILAR (939)..(1511): 971254mologous to Cloning vector pSacBII SacB,accession number U09128,Smith-Waterman Score=995.
  misc_feature (1)...(3947): n = a,t,c or g
atgcgggtgccggttctcctcccgctccgctcagtcgctccctccgccctcctttcgactgggtgccgacatgtcatctgggtggggtggatgatttcacagccagggcaaggcgtcctgctcagtccgagcagccggcttgactggcagccaccaaccctgtttatggatctgcaggtctgcaccagtccgttgcccgtgcaaaacgctgacggaacagtagttgatacaacggcatcccgttgtgttggttctgcggaaagcccgaaagacgttgatgcccatccaatctacatgttttatcaaaaggtcggcgacaactcaatcgacagctggaaaaccgcgggccgtgtctttaaagacagcgataagttcgacgcccaacgatccgatcctgaaagatcagacgcaagaatggtccggttctgcaacctttacatctgacggaaaaatccgtttattctacactgactattccggtaaacattacggcaaacaaagcctgacaacagcgcaggtaaatgtgtcaaaatctgatgacacactcaaaatcaacggagtggaagatcacaaaacgatttttgacggagacggaaaaacatatcagaacgttcagcagtttatcgatgaaggcaattatacatccggcgacaaccatacgctgagagaccctcactacgttgaagacaaaggccataaataccttgtattcgaagccaacacgggaacagaaaacggataccaaggcgaagaatctttatttaacaaagcgtactacggcggcggcacgaacttcttccgtaaagaaagccagaagcttcagcagagcgctaaaaaacgcgatgctgagttagcgaacggcgccctcggtatcatagagttaaataatgattacacattgaaaaaagtaatagaagccgctgatcacttcaaacgcggtcggcgacaactcaatcgacagctggaaaaacgcgggccgtgtctttaaagacagcgataagttcgacgccaacgatccgatcctgaaagatcagacgcaagaatggtccggttctgcaacctttacatctgacggaaaaatccgtttattctacactgactattccggtaaacattacggcaaacaaagcctgacaacagcgcaggtaaatgtgtcaaaatctgatgacacactcaaaatcaacggagtggaagatcacaaaacgatttttgacggagacggaaaaacatatcagaacgttcagcagtttatcgatgaaggcaattatacatccggcgacaaccatacgctgagagaccctcactacgttgaagacaaaggccataaataccttgtattcgaagccaacacgggaacagaaaaaaaataccaaggcgaagaatctttatttaacaaagcgtactacggcggcggcacgaacttcttccgtaaagaaagccagaagcttcagcagagcgctaaaaaacgcgatgctgagttagcgaacggcgccctcggtgtgatctccattcctttgtacatccctcacacgctgttcgaatgggattttggaaaggaaatctgtgtattttggctcactactgactatctgttatgtacagcatctgtatataacattgtcctcatcagctatgatcgatacctgtcagtctcaaatgctatcctaaacagcagcaaaacgaaaaaataccaagtggctcaatttggatcaatcaaggattaaaaatattaattttgcaaaaggacttgatgtgtgggacagctggccgctgcaaaacgctgacggaaccagtagctgaatacaacggctatcacgttgtgtttgctcttgcgggaagcccgaaagacgctgatgacacatcaatctacatgttttatcaaaaggtcggcgacaactcaatcgacagctggaaaaacgcgggccgtgtctttaaagacagcgataagttcgacgccaacgatccgatcctgaaagatcagacgcaagaatggtccggttctgcaacctttacatctgacggaaaaatccgtttattctacactgactattccggtaaacattacggcaaacaaagcctgacaacagcgcaggtaaatgtgtcaaaatctgatgacacactcaaaatcaacggagtggaagatcacaaaacgatttttgacggagacggaaaaacatatcagaacgttcagcagtttatcgatgaaggcaattatacatccggcgacaaccatacgctgagagaccctcactacgttgaagacaaaggccataaataccttgtattcgaagccaacacgggaacagaaaacggataccaaggcgaagaatctttatttaacaaagcgtactacggcggcggcacgaacttcttccgtaaagaaagccataagcttcaacagagcgctaaaaaacgccatgctgagttagcgaacggcgccctccgtatcataaatcaggcaccgtgtatgaaatctaacaatgcgctcatcgtcatcctcggcaccgtcaccctggatgctgtaggcataggcttggttatgccggtactgccgggcctcttgcgggatatcgtccattccgacagcatcgccagtcactatggcgtgctgctagcgctatatgcgttgatgcaatttctatgcgcacccgttctcggagcactgtccgaccgctttggccgccgcccagtcctgctcgcttcgctacttggagccatgtcagctgtccttgctccaggatgctgtttttgacaacggatgttttattgcctttgatgttcattaagaagcttggcgcaaatgttgcctttttatcctcgaagaagcctctgtttgtcatgtagcttgtgataaccacattgttgcctttggcttgcggcacatnttgccgttcattttgaaaacattcgcgcgctcgattttcatcagttaccgtgtttgaagtgatcagcggcttcattacttttttcaatgtgtaatcattatttaactctatgataccgagggcgccgttcgctaactcagcatcgcgttttttagcgctctgctgaagcttctggctttctttacggaagaagttcgtgccgccgccgtagtacgctttgttaaataaagattcttcgccttggtatccgttttctgttcccgtgttggcttcgaatacaaggtatttatggcctttgtcttcaacgtagtgagggtctctcagcgtatggttgtcgccggatgtataattgccttcatcgataaactgctgaacgttctgatatgtttttccgtctccgtcaaaaatcgttttgtgatcttccactccgttgattttgagtgtgtcatcagattttgacacatttacctgcgctgttgtcaggctttgtttgccgtaatgtttaccggaatagtcagtgtagaataaacggatttttccgtcagatgtaaaggttgcagaaccggaccattcttgcgtctgatctttcaggatcggatcgttggcgtcgaacttatcgctgtctttaaagacacggcccgcgtttttccagctgtcgattgagttgtcgccgaccttttgataaaacatgtagattgatgtgtcatcagcgtctttcgggcttcccgcaagagcaaacacaacgtgatagccgttgtattcagctactgttccgtcagcgttttgcagcggccagctgtcccacacatcaagtccttttgcagactcaatatttttaatcgttgattgatcgaattgaggcacttggtatttttcgttttgctgctgtttagggatctgcagcatatcatggcgtgtaatatgagagacgccgtacgtttctttgtatgctttttggttattttctttcgcgaaggcttgagtcgctcctcctgccagaagtgcagtcgtaaaagtcagaactgtggcttgttttacaatttttttgatgttcatgttcat

SEQ ID NO: 21855 - DNA, 937 bp, Homo sapiens
  SIMILAR (76)..(597): 1001254mologous to Cloning vector pSacBII SacB,accession number U09128,Smith-Waterman Score=931.
  misc_feature (1)...(937): n = a,t,c or g
atgccgggggtttgggtgattttactgantgccgtcccagaactgctggtgcaacttgcctcaatatctatcagaggagcgactcaagccttcgcgaaagaaaataaccaaaaagcatacaaagaaacgtacggcgtctctcatattacacgccatgatatgctgcagatccctaaacagcagcaaaacgaaaaataccaagtgcctcaattcgatcaatcaacgattaaaaatattgagtctgcaaaaggacttgatgtgtgggacagctggccgctgcaaaacgctgacggaacagtagctgaatacaacggctatcacgttgtgtttgctcttgcgggaagcccgaaagacgctgatgacacatcaatctacatgttttatcaaaaggtcggcgacaactcaatcgacagctggaaaaacgcgggccgtgtctttaaagacagcgataagttcgacgccaacgatccgatcctgaaagatcagacgcaagaatggtccggttctgcaacctttacatctgacggaaaaatccgtttattctacactgactattccggtaaacattacggcaaacaaagcctgacaacagcgcagtttttcgatatgcttcgtgatctgctcaagaacgttgatcttaaagggttcgagcctgatgtacgtattttgcttaccaaatacagcaatagtaatggctctcagtccccgtggatggaggagcaaattcgggatgcctggggaagcatggttctaaaaaatgttgtacgtgaaacggatgaagttggtaaaggtcagatccggatgagaactgtttttgaacaggccattgatcaacgctcttcaactggtgcctggagaaatgctctttctatttgggaacctgtctgcaactgaaattttcgatcgtctgattaaaccacgctgggagattagataa

SEQ ID NO: 21856 - DNA, 3086 bp, Homo sapiens
  SIMILAR (1683)..(730): 961254mologous to Cloning vector pBACe3.6 levansucrase,accession number U80929,Smith-Waterman Score=1602.
ctatccacgcccattgatgtactgccaaaaccgcatcaccatggtaatagcgatgactaatacgtagatgtactttctcttcttttttggaggagtagaatgttgagagtcagcagtagcctcatcatcactagatggcatttcttctgagcaaaacaggttttcctcattaaaggcattccaccactgctcccattcatcagttccataggttggaatcactcgaatacttctatctacttcgtcagaataagggtgtctaacagctacaatcgtgtcaaaatccttttgtccattcgaaactgcactaccaatcgcaatggcttctgcacaaacagttactcgtcctatatacgcttcaatatgtactgccgaaatgatttctcctgttttcgtacgaattgccgctcccacatgatgtttattatcctcataaagcattgtaatcttctctgtcgctacttctactaattctagatcttgttgagaaatgttaaatgttttcatatattcttcttcctccgatttctggttgctgactaattgagatgcatgctttgcatacttctgcctgctggggagcctggggactttccacaccctaactgacacacattccacagctagcgctatatgcgttgatgcaatttctatgcgcacccgttctcggagcactgtccgaccgctttggccgccgcccagtcctgctcgcttcgctacttggagccatgtcagctgtccttgctccaggatgctgtttttgacaacggatgttttattgcctttgatgttcattaagaagcttggcgcaaatgttgcctttttatcctcgaagaagcctctgtttgtcatgtagcttgtgataaccacattgttgcctttggcttgcggcactgcgaagtgagagtaagtgaatgtcacatcgtttggatcaagacccatttgcagcacaagccctgttttgttcagcggcttgtaagggccggttaaagagtttgatacataaccaagcatgtaaatatcgtttgagttaataccatcgatcgtcatttttgaaccgcgtgaatcagtgaacaagtaccatttgccgttcattttgaaaacattcgcgcgctcgatttcatcagttaccgtgtttgaagtgatcagcggcttcattacttttttcaatgtgtaatcattatttaactctatgataccgagggcgccgttcgctaactcagcatcgcgttttttagcgctctgctgaagcttctggctttctttacggaagaagttcgtgccgccgccgtagtacgctttgttaaataaagattcttcgccttggtatccgttttctgttcccgtgttggcttcgaatacaaggtatttatggcctttgtcttcaacgtagtgagggtctctcagcgtatggttgtcgccggatgtataattgccttcatcgataaactgctgaacgttctgatatgtttttccgtctccgtcaaaaatcgttttgtgatcttccactccgttgattttgagtgtgtcatcagattttgacacatttacctgcgctgttgtcaggctttgtttgccgtaatgtttaccggaatagtcagtgtagaataaacggatttttccgtcagatgtaaaggttgcagaaaccggacctttctttgcgtctgatctttcaggatcggatcgttggcgtcgaacttatcgctgtctttaaagacacggcccgcgtttttccagctgtcgattgagttgtcgccgaccttttgataaaacatgtagattgatgtgtcatcagcgtctttcgggcttcccgcaagagcaaacacaacgtgatagccgttgtattcagctactgttccgtcagcgttttgcagcggccagctgtcccacacatcaagtccttttgcagactcaatatttttaatcgttgattgatcgaattgaggcacttggtatttttcgttttgctgctgtttagggatctgcagcatatcatggcgtgtaatatgagagacgccgtacgtttctttgtatgctttttggttattttctttcgcgaaggcttgagtcgctcctcctgccagaagtgcagtcgtaaaagtcagaactgtggcttgttttacaatttttttgatgttcatgttcatgtctccttctgtatgtactgttttttgcgatctgccgtttcgatcctcccgaattgactgagtagtagcaactacagtagctgtattgggtgcaggaagaactgacgttgctgtgagggaacccgaagtcactggagtctgcaatttaggttgactactgacaactgctggaggagtgacaagattggttgaagatactgtattcacaggagtttgaaaggatggtggtgcactctcgcttacatttcttttggactccagcatctgtctcactgtgcctgcatttctgtaagacatgttattattgctgttgacatcatttacagtttttcctggtgatactggtgggttgggtggatggatcactgatgtccccacagtcgcctcagttcccgccacggaacggcgggcgaaaagcagggcgggaatacgccggtaggaatacgcgggcacgtaacgcgtcacttccggtgctggcaggctcagcaatgagggcggggcggcggcgcgcgggcctctggaaccctgccggtccaccgaaggtcccgagcccgctatcttcgtaggtgcgggcctccggaggtgcaggtccctgtcctccttgtcctgcttcgtcgcagagcagaacgcgtgtgctttaagggcagagacatctgaagatgctttgccttgccctcttgaggacacgtggcttttacctctaatagtgtctgcgtgttgtggagagagaagaccatgcagttggtatttttcgttttgctgctgtttagggatctgcagcatatcatggcgtgtaatatgagagacgccgtacgtttctttgtatgctttttggttattttctttcgcgaaggcttgagtcgctcctcctgccagaagtgcagtcgtaaaagtcagaactgtggcttgttttacaatttttttgatgttcatgttcat

SEQ ID NO: 21857 - DNA, 1825 bp, Homo sapiens
  SIMILAR (818)..(1630): 1001254mologous to Cloning vector pSacBII SacB,accession number U09128,Smith-Waterman Score=1460.
atgagactgggatttgaatcaaggggtgagatagcaaaagatcaagctaaacttgatctagcagggcaaaaagaaagggataaccaaagctcaacattgggggaagcagaaaccccattgattatttgctggtcgactctagaggatccccactatgatgtcatagttattgacagcgcgcctaacctgggtatcggcacgattaatgtcgtatgtgctgctgatgtgctgattgttcccacgcctgctgagttgtttgactacacctccgcactgcagtttttcgatatgcttcgtgatctgctcaagaacgttgatcttaaagggttcgagcctgatgtacgtattttgcttaccaaatacagcaatagtaatggctctcagtccccgtggatggaggagcaaattcgggatgcctggggaagcatggttctaaaaaatgttgtacgtgaaacggatgaagttggtaaaggtcagatccggatgagaacctgtttttgaacaggccattgatcaacgctcttcaactgatacttcgttatcgacaccagctgccccgatggtggattcgttaattgcgcgcgtaggagtaatggctcgcggtaatgccattactttgcctgtatgtggtcgggatgtgaagtttactcttgaagtgctccggggtgatagtgttgagaagacctctcgggtatggtcaggtaatgaacgtgaccaggagctgcttactgaggacgcactggatgatctcatcccttcttttctactgactggtcaacagacaccggcgttcggtcgaagagtttccttgtaccctctggcaggaggagcgactcaagccttcgcgaaagaaaataaccaaaaagcatacaaagaaacgtacggcgtctctcatattacacgccatgatatgctgcagatccctaaacagcagcaaaacgaaaaataccaagtgcctcaattcgatcaatcaacgattaaaaatattgagtctgcaaaaggacttgatgtgtgggacagctggccgctgcaaaacgctgacggaacagtagctgaatacaacggctatcacgttgtgtttgctcttgcgggaagcccgaaagacgctgatgacacatcaatctacatgttttatcaaaaggtcggcgacaactcaatcgacagctggaaaaacgcgggccgtgtctttaaagacagcgataagttcgacgccaacgatccgatcctgaaagatcagacgcaagaatggtccggttctgcaacctttacatctgacggaaaaatccgtttattctacactgactattccggtaaacattacggcaaacaaagcctgacaacagcgcaggtaaatgtgtcaaaatctgatgacacactcaaaatcaacggagtggaagatcacaaaacgatttttgacggagacggaaaaacatatcagaacgttcagcagtttatcgatgaaggcaattatacatccggcgacaaccatacgctgagagaccctcactacgttgaagacaaaggccataaataccttgtattcgaagccaacacgggaacagaaaacggataccaaggcgaagaatctttatttaacaaagcgtactacggcggcggcacgaacttcttcccatgccgcggccgcctcgcggctacccggcttgccggtcccgagcggcagccccggggtggcgatggggtcgcgccgaggcagcggaggttctgcgggcgactggaggttggcagtgggcgggagaaagaggaaggcaagcgcggctgggcctcggcctctggcgccgcggtaccctttgtctcggcagcctga

SEQ ID NO: 21858 - DNA, 3148 bp, Homo sapiens
  SIMILAR (1514)..(2371): 1001254mologous to Cloning vector pZC320 SopA,accession number U26464,Smith-Waterman Score=1501.
atggagtggggcaagttcaaaagactagtcttaccaagtcaaggcaagtcaaaaccagaacaaaggtgccaatacaggcacaccgtgggtgatcaggccacgcttccactcagatccagagtagagaaacgaaatggagaggcagagggaagaatctaccgaaaactatgggatgttgccctgctctgttgtgtccaggaggtcattaatggggaaaggaaacctctgagagcactgactgaagtgaaatcgggatttaggctcagggaggacagcgataagttcgacgccaacgatccgatcctgaaagatcagacgcaagaatggtccggttctgcaacctttacatctgacggaaaaatccgtttattctacactgactattccggtaaacattacggcaaacaaagcctgacaacagcgcagaacgttcagcagtttatcgatgaaggcaattatacatccggcgacaaccatacgctgagagaccctcactacgttgaagacaaaggccataaataccttgtattcgaagccaacacgggaacagaaaacggataccaaggcgaagaatctttatttaacaaagcgtactacggcggcggcacgaacttcttccgtaaagaaagccagaagcttcagcagagcgctaaaaaacgcgatgctgagttagcgaacggcgccctcggtatcatagagttaaataatgattacacattgaaaaaagtaatgaagccgctgatcacttcaaacacgtgtgacaatctaaaaacttgtcacacttcacatggatctgtcatggcggaaacagcgggttatcaatcacaagaaacgtaaaaatagcccgcgaatcgtccagtcaaacgacctcactgaggcggcatatagtctctcccgggatcaaaaacgtatgctgtatctgttcgttgaccagatcagaaaatctgatggcaccctacaggaacatgacggtatctgcgagatccatgttgctaaatatgctgaaatattcggattgacctctgcggaagccagtaaggatatacggcaggcattgaagagtttcgcggggaaggaagtggttttttatcgccctgaagaggatgccggcgatgaaaaaggctatgaatcttttccttggtttatcaaacgcgcgcacagtccatccagagggctttacagtgtacatatcaacccatatctcattcccttctttatcgggttacagaaccggtttacgcagtttcggcttagtgaaacaaaagaaatcaccaatccgtatgccatgcgtttatacgaatccctgtgtcagtatagtaagacgaatggctcaggcatcgtctctctgaaaatcgactggatcatagagcgttaccagctgcctcaaagttaccagcgtatgcctgacttccgccgccgcttcctgcaggtctgtgttaatgagatcaacagcagaactccaatgcgcctctcatacattgagaaaaagaaaggccgccagacgactcatatcgctatcagagatgccgagaaagcagggcgactaccgcacccggatatggaaattcgaggacgggttgagcaacgtgttggttatacaattgaacaaattaatcatatgcgtgatgtgtttggtacgcgattgcgacgtgctgaagacgtatttccaccggtgatcggggttgctgcccataaaggtggcgtttacaaaacctcagtttctgttcatcttgctcaggatctggctctgaaggggctacgtgttttgctcgtggaaggtaacgacccccagggaacagcctcaatgtatcacggatgggtaccagatcttcatattcatgcagaagacactctcctgcctttctatcttggggaaaaggacgatgtcacttatgcaataaagcccacttgctggccggggcttgacattattccttcctgtctggctctgcaccgtattgaaactgagttaatgggcaaatttgatgaaggtaaactgcccaccgatccacacctgatgctccgactggccattgaaactgttgctcatgactatgatgtcatagttattgacagcgcgcctaacctgggtatcggcacgattaatgtcgtatgtgctgctgatgtgctgattgttcccacgcctgctgagttgtttgactacacctccgcactgcagtttttcgatatgcttcgtgatctgctcaagaacgttgatcttaaagggttcgagcctgatgtacgtattttgcttaccaaatacagcaatagtaatggctctcagtccccgtggatggaggagcaaattcgggatgcctggggaagcatggttctaaaaaatgttgtacgtgaaacggatgaagttggtaaagtagctgaatacaacggctatcactttgtgtttgctcttgcgggaagcccgaaagacgctgttgacacatcaatctacatgttttatcaaaaggtcggtgacaactcaatcgacagctggaaaaacgcgggccgtgtctttaaagacagcgataagttcgtcgccaacgatccgatcctgaaagatcagacgcaagaatggtccggttctgcaacctttacatctgacggaaaaatccgtttattctacactggctatgccggtaaacattacggcaaacaaagcctgacaacagcgcaggtaaatgtgtcaaaatctgatgacacactcaaaatcaacggagtggaagatcacaaaacgatttttgacggagacggaaaaacatatcagaacgttcagcagattatcgatgaaggcaattatacatccggcgacaaccatacactgagagaccctcactacgttgaagacaaaggccataaataccttgtattcgaagccaacacgggaacagaaaacggataccaaggcgaagaatctttatttaacaaagcgtactacggcggcggcacgaacttcttccgtaaagaaagccagaagcttcagcagagcgctaaaaaacgcgatgctgagttagcgaacggcgccctcggtgtgacgcacccagtccaatttcgactactgacggtgaccattcactccttcgactcctcggttgtgctacagaggacgcgtaggctactaatcgggatggacaatagtatcacgtatctatga

SEQ ID NO: 21859 - DNA, 3107 bp, Homo sapiens
  SIMILAR (859)..(1980): 961254mologous to Cloning vector pBACe3.6 levansucrase,accession number U80929,Smith-Waterman Score=1904.
atgaatgaaatgaagcgtgaagagaagtttagagaaaaaagaagagaaagaaacgaacaaatcctccaagaaatacgggactatgtgaaaagatcaaatctacatctaattggtgtatctaaaagtgatggggagaatggaaccgagttggaaaacactctgcaggatattatccaggagaacttccccaatctagcaaggcaggccaacattcaaattcaggaaatacagagaatgctacaaagatactcctcgagaagaacaactccaagacacataattgtcagattcaccaaagttgaaatgaaggaaaaaatgttaagggcagccagagagaaaggtcgggttacccacaaagggaagcccatcagactaacagctgatctctcggcagaaactctacaagccacaaaagagtggaggccaatattcaacattcttaaagaaaagaattttcaacccagaatttcatatccagccaaactaagcttcataagtgaaggagaaacaaaatactttacagacaagcaaatgctgagagattttgtcaccaccaggcctgccctaaaagagctcctgaaggaagcactaaacatggaaaggaacaaccggttggttaaatccctcgcttgggcaagccagaacggcttccggtccccggccttgttgccactgtccctaatgctttgtgctcccctacaagaggcagatggaacaaatctgggatggctggctcactgtggcctgctgtgcactggtgaccaccctagtggccttggcaaacctggccggcacggcgctgaccgtcaccatccagagggactggatcgtgagctgacgggtgacaacagaggccagctggttggaggagcgactcaagccttcgcgaaagaaaataaccaaaaagcatacaaagaaacgtacggcgtctctcatattacacgccatgatatgctgcagatccctaaacagcagcaaaacgaaaaataccaagtgcctcaattcgatcaatcaacgattaaaaatattgagtctgcaaaaggacttgatgtgtgggacagctggccgctgcaaaacgctgacggaacagtagctgaatacaacggctatcacgttgtgtttgctcttgcgggaagcccgaaagacgctgatgacacatcaatctacatgttttatcaaaaggtcggcgacaactcaatcgacagctggaaaaacgcgggccgtgtctttaaagacagcgataagttcgacgccaacgatccgatcctgaaagatcagacgcaagaatggtccggttctgcaacctttacatctgacggaaaaatccgtttattctacactgactattccggtaaacattacggcaaacaaagcctgacaacagcgcaggtaaatgtgtcaaaatctgatgacacactcaaaatcaacggagtggaagatcacaaaacgatttttgacggagacggaaaaacatatcagaacgttcagcagtttatcgatgaaggcaattatacatccggcgacaaccatacgctgagagaccctcactacgttgaagacaaaggccataaataccttgtattcgaagccaacacgggaacagaaaacggataccaaggcgaagaatctttatttaacaaagcgtactacggcggcggcacgaacttcttccgtaaagaaagccagaagcttcagcagagcgctaaaaaacgcgatgctgagttagcgaacggcgccctcggtatcatagagttaaataatgattacacattgaaaaaagtaatgaagccgctgatcacttcaaacacggtaactgatgaaatcgagcgcgcgaatgttttcaaaatgaacggcaaatggtacttgttcactgattcacgcggttcaaaaatgacgatcgatggtattaactcaaacgttattcacatgaatggttatgtatcaggatcaactaagttaccgctgatggccactggggtcagtccttctggggaccttatgagagactgtgtaggacatacttcagaactgtcccaccaaggcccaaggaaactaggatgtttatccagcaactcttgtctgtccttggttgagagctgttctcagggcaacttacagcccacccctcatgttcctatggctggagagggatcttcaggcaaagagacacagtgccctcccttttcggccgcggcgcgtgactggtgtgacaatctaaaaacttgtcacacttcacatggatctgtcatggcggaaacagcggttatcaatcacaagaaacgtaaaaatagcccgcgaatcgtccagtcaaacgacctcactgaggcggcatatagtctctcccgggatcaaaaacgtatgctgtattctgttcgttgaccagttcaaaaaatttgatggcaccctacaagaaccatgccggtatctgcgagatcccatgttgctaattatgctgaaatattcgggattggccctctccgaaagccagtaagaatatacggcaggcattgaagagtttcgcggggaaggaagtggttttttatcgccctgaagaggatgccggcgatgaaaaaggctatgaatcttttccttggtttatcaaacgtgcgcacagtccatccagagggctttacagtgtacatatcaacccatatctcattcccttctttatcgggttacagaaccggtttacgcagtttcggcttagtgaaacaaaagaaatccccaatccgtatgccatgcgtttatacgaatccctgtgtcagtatcgtaagccggatggctcaggcatcgtctctctgaaaatcgactggatcatagagcgttaccacctgcctcaaagttaccagcgtatgcctgactttccgccgccgcttcctgcaggtctgtgttaatgagatcaacagcagaactccaatgcgcctctcatacattgagaaaaagaaaggccgccagacgactcatatcgtattttccttccgcgatatcacttccatgacgacagggaatagctggggggttatctgccccagaattgggggggggtccccccccattttgcccctgacccacctggcggctcccgttgggccccggtttcgcccccc

SEQ ID NO: 21860 - DNA, 3308 bp, Homo sapiens
  SIMILAR (1596)..(1808): 1001254mologous to Cloning vector pBACe3.6 levansucrase,accession number U80929,Smith-Waterman Score=386.
  misc_feature (1)...(3308): n = a,t,c or g
aacacctggattcgagccggggcctgtgacttgggggaggcggcagccgctcctgaagccctgggatgaagagcacgtggagacaacatgggcagaggagtgggaaccaggaagagaagcagcttggagaaccatcaaagcttctatgaggtggtgcaaagccacagtgagcagaggtgccctcatctggatagaaacacaaaaggagaaacaggtttgnagaaaaccctcaatctacatgttttatcaaaaggtcggcgacaactcaatcgacagctggaaaaacgcgggccgtgtctttaaagacagcgataagttcgacgccaacgatccgatcctgaaagatcagacgcaagaatggtccggttctgcaacctttacatctgacggaaaaatccgtttattctacactgactattccggtaaacattacggcaaacaaagcctgacaacagcgcaggtaaatgtgtcaaaatctgatgacacactcaaaatcaacggagtggaagatcacaaaacgatttttgacggagacggaaaaacatatcagaacgttcagcagtttatcgatgaaggcaattatacatccggcgacaaccatacgctgagagaccctcactacgttgaagacaaaggccataaataccttgtattcgaagccaacacgggaacagaaaacggataccaaggcgaagaatctttatttaacaaagcgtactacggcggcggcacgaacttcttccgtaaagaaagccagaagcttcagcagagcgctaaaaaacgcgatgctgagttagcgaacggcgccctcggtatcatagagttaaataatgattacacattgaaaaaagtaatgaagccgctgatcacttcaaacacggtaactgatgaaatcgagcgcgcgaatgttttcaaaatgaacggcaaatgnaggaaccccctgcagatccctaaacagcagcaaaacgaaaaataccaagtgcctcaattcgatcaatcaacgattaaaaatattgagtctgcaaaaggacttgatgtgtgggacagctggccgctgcaaaacgctgacggaacagtagctgaatacaacggctatcacgttgtgtttgctcttgcgggaagcccgaaagacgctgatgacacatcaatctacatgttttatcaaaaggtcggcgacaactcaatcgacagctggaaaaacgcgggccgtgtctttaaagacagcgataagttcgacgccaacgatccgatcctgaaagatcagacgcaagaatggtcccggtctgcaacctttacatctgacgggaaaaatccgtttattctacactgactattccggtaaacattacggcaaacaaagcctgacaacagcgcagatattccagatgattacagtttttattaccagcctctgcaacactacctccagccacatctgtctccacatcagctgggtcaccacaatgcacggcgccatgcctcatcccggccacatccccacagcccctgcttctttacctgccaaggtgaaaggttccgggaaggtctgctggctggccttccctttatcagaactcaccccccccagtgccttacaggtaaatgtgtcaaaatctgatgacacactcaaaatcaacggagtggaagatcacaaaacgatttttgacggagacggaaaaacatatcagaacgttcagcagtttatcgatgaaggcaattatacatccggcgacaaccatacgctgagagaccctcactacgttgaagacaaaggccataaataccttgtattcgaagccaacacggggaacagaaaacggataccaaggcgaagaatctttatttaacaaagcgtactacggcggcggcacgaacttcttccgtaaagagggcgagaagcttcagcagagcgctaaaaaacgcgatgctgagttagcgaacggcgccctcggtatcatagagttaaataatgattacacattgaaaaaagtaatgaagccgctgatcacttcaaacacggtaactgatgaaatcgagcgcgcgaatgttttcaaaatgaacggcaaatggtacttgttcactgattcacgcggttcaaaaatgacgatcgatggtattaactcaaacgatatttacatgcttggttatgtatcaaactctttaaccggcccttacaagccgctgaacaaaacagggcttgtgctgcaaatgggtcttgatccaaacgatgtgacattcacttactctcacttcgcagtgccgcaaggccaaagcaacaatgtggttatcacaagctacatgacaaacagaggcttcttccgagataaaaaagcaacatttgcgccaagcttcttaatgaacatcaaaagcaataaaacctcccccacttgctggcccggggctgacaattatcccttcctgtctggctctgcgccgtattgaaactgagttaatgggcaaatttgatgaaggtaaactgcccaccgatccacacttgatgctcgactgggccattgaacctgttgctcatgactatgatgtcatagttattgacagcgcccataaccgggggtatcggcacgattaatttcggtatgtgtcgcccatgtgctgattgttcccacgcctgctgagttgtttgactacacctccgcactgcagtttttcgatatgcttcgtgatctgctcaagaacgttgatcttaaagggtgcgagcctgatgtacgtattttgcttacccgacatcggcaataataatggctctcagtcaccgtggatgaaggagccaaattcgggatgcctggggaagcatgggttctaaaaaatgttgtccgtaaaccggatgaagtttggtaaaggtcagatccggatgagaactgtttttgaacaggccattgatcaacgctcttcaactggtgcctggagaaatgctctttctatttgggaacctgtctgcaatgaaattttcgatcgtctgattaaaccacgctgggagattaaataatgaagcgtgcgcctgttttttcccaaacatacgcttaatactcaaccgggtgaagatacctttttattgacacccactgcccccatgggtggattcgttaattgcgcgcgtaggagtaatggctcgcggtaatcccattacttagcctgtatgtggtcgggatgtgaagtttactcttgaagtgctccggggtgatacgtgccgataagccctctcgggtatggtcagataatgattaagtccagtagcggcagggtagtcccactctggatgatctcagggtcggacgattgaatctcgtaat

SEQ ID NO: 21861 - DNA, 11120 bp, Homo sapiens
  SIMILAR (4847)..(3543): 921254mologous to Homo sapiens putative p150,accession number U93563,Smith-Waterman Score=2061.
  misc_feature (1)...(11120): n = a,t,c or g
tcaagccagaatttcatatccagccaaactaagcttcataagtgaaggagaaataaaatcagttccacgtggcaggggaggctccacaatcatggtggaaggtgaaggaggagcaaagacacgtcttacatggtcnccccccgtgttggcttcgaatacaaggtttttatggcctttgtctccaacgtagtgagggtctctcagcgtatggttgtcgccggatgtataattgccttcatcgataaactgctgaacgttctgatatgtttttccgtctccgtcaaaaatcgttttgtgatcttccactccgttgattttgagtgtgtcatcagattttgacacatttacctgcgctgttgtcaggctttgtttgccgtaatgtttaccggaatagtcagtgtagaataaacggatttttccgtcagatgtaaaggttgcagaaccggaccattcttgcgtctgatctttcaagatcggatcgttggcgtcgaacttatcgctgtctttaaagacacggcccgcgtttttccagctgtcgattgagttgtcgccgaccttttgataaaacatgtagattgatgtgtcatcagcgtctttcgggtccccttcgccttggtatccgttttctgttcccgtgttggcttcgaatacaaggtatttatggcctttgtcttcaacgtagtgagggtctctcagcgtatggttgtcgccggatgtataattgccttcatcgataaactgctgaacgttctgatatgtttttccgtctccgtcaaaaatcgttttgtgatcttccactccgttgattttgagtgtgtcatcagattttgacacatttacctgcgctgttgtcaggctttgtttgccgtaatgtttaccggaatagtcagtgtagaataaacggatttttccgtcagatgtaaaggttgcagaaccggaccattcttgcgtctgatctttcaggatcggatcgttggcgtcgaacttatcgctgtctttaaagacacggcccgcgtttttccagctgtcgattgagttgtcgccgaccttttgataaaacatgtagattgatgtgtcatcagcgtctttcgggcttcccgcaagagcaaacacaacgtgatagccgttgtattcagctactgttccgtcagcgttttgcagcggccagctgtcccacacatcaagtccttttgcagactcaatattttttaatcgttgattgatcgaattgaggcacttggtatttttcgttttgctgctgtttagggattgcccgctttccagtcgggaaacctgtcgtgccagctgcattaatgaatcggccaacgcgcggggagaggcggtttgcgtattgggcgccagggtggtttttcttttcaccagtgagacgggcaacagctgattgcccttcaccgcctggccctgagagagttgcagcaagcggtccacgctggtttgccccagcaggcgaaaaatcctgtttgatggtggttccgaaatcggcaaaatccgttttccaaaagtggcacgatattggctctgcgtagaccatggggtgaagtgtgcgtgcagtgaaacctggagtgaccctgaccgctgatacaagcaatggtgtggacgctgcttgcagacacgccgagcacccaagagtgcattcggggtgattccatttatatgatgtttcaaacaggaaacgttcatcaatgcggccggactcggtgatctcgttgagggcccggagcaggtcgccacctagcttcttgacattcctgaggtcatcaagcatggagtaggagaggtccatcagatagtacaggtcgatggggtagcccttggcccgccggaaggtcacgttgaacgctgctgcctggctgtccggatgaggataatcgggccctttagggcggctgctctgtgaattccctgagtgggtgagctcagtacccacgacgcactgcccgccgggcaccactacccctttcacagatgaggaaactgagggctcggggtaaggaagggcctggggcgtctgcccgctttccagtcgggaaacctgtcgtgccagctgcattaatgaatcggccaacgcgcggggagaggcggtttgcgtattgggcgccagggtggtttttcttttcaccagtgagacgggcaacagctgattgcccttcaccgcctggccctgagagagttgcagcaagcggtccacgctggtttgccccagcaggcgaaaatcctgtttgatggtggttccgaaatcggcaaaatcctgcccgctttccagtcgggaaacctgtcgtgccagctgcattaatgaatcggccaacgcgcggggagaggcggtttgcgtattgggcgccagggtggtttttcttttcaccagtgagacgggcaacagctgattgcccttcaccgcctggccctgagagagttgcagcaagcggtccacgctggtttgccccagcaggcgaaaatcctgtttgatggtggttccgaaatcggcaaaatcctgcccgctttccagtcgggaaacctgtcgtgccagctgcattaatgaatcggccaacgcgcggggagaggcggtttgcgtattgggcgccagggtggtttttcttttcaccagtgagacgggcaacagctgattgcccttcaccgcctggccctgagagagttgcagcaagcggtccacgctggtttgccccagcaggcgaaaatcctgtttgatggtggttccgaaatcggcaaaatccttgcccttgacaggcattgatggaatcgtagtctcacgctgatagtctgatcgacaatacaagtgggaccgtggtcccagaccgataatcagaccgacaacacgagtgggatcgtggtcccagacgtctttcattgccatacggaactccggatgagcattcatcaggcgggcaagaatgtgaataaaggccggataaaacttgtgcttatttttctttacggtctttaaaaaggccgtaatatccagctgaacggtctgcgctgttgtcaggctttgtttgccggtaatgtttaccggaatagtcagtgtagaataaacggatttttccgtcagaaatgtaaaggttgacagaaccggacccattcttgcgtctgatctttcaggatcggatcgttggcgtcgaacttatcgctggctttaaagacacggcccgcgtttttccaactgtcgattgagttgtcgccgaccttttgataaaacatgtagaatggagtggcatcagcggcttttcgggcttcccgcaagaagcaacacaacgggataacccgttggatttcagctcctggtcccgtcagcggtttggcgcggcccacttgtcccacacaacgaggcctttttccagactcaatattatttaattcgtgattgatcgaattgaggcacttggtatttttcgttttgctgctgtttaaggatctgcagcatatcatggcgtgtaatatgagagacgccgtacgtttctttgtatggcctttgggtaatttctttccgcgaaggcttgagtcgctcctcctaatttattgagagtttttagcatgaagggttgttgaattttgtgaaaggctttttctgcatctattgagataatcatgtggtttttgttttggctcttgtttatatgctggattacatttattgatttgcgtatattgaaccagccttgcatcccagggatgaagcccacttgatcatggtggataagctttttgatgtgctgctggattcgttttgccagtattttattgaggatttttgcatcaatgttcatcaaggatattggtctaaaattctctttttttgttgtgtctctgcctggctttggtatcagaatgatgctggcctcataaaatgagttagggaggattccctctttttctgttgattggaatagtttcagaaggaatggtaccagttcctccttgtacctctgatagaattcggctgtgaatccatctggtcctggactctttttggttggtaaactattgattattgccacaatttcagctcctgttattggtgtattcagagattcaacttcttcctggtttagtcttgggagagtgtatgtgtcaaggaatttatccatttcttctagattttctagtttatttgcgtagaggtgtttgtagtattctctgatggtagtttgtatttctgtgggatcggtggtgatatcccctttatcattttttattgcgtctatttgattcttctctctttttttctttattagtcttgctagcggtctatccattttgttgatcctttcaaaaaaccggctcctggattcattaattttttgaagggttttttgtgtctctatttccttcagttctgctctgattttagttatttcttgccttctgctagcttttgaatgtgtttgctcttgcttttctagttcttttaattgtgatgttagggtgtcaattttagatctttcctgctttctcttgtgggcatttagtgctgtaaatttccctctacacactgctttaaatgtgtcccacagattctggtatgttgtgtctttgttctcattggtttcaaagaacatctttatttctgccttcatttcgttatgtacccagtagtagttcaggagcaggttgttcagtttccatgtagttgagcagttttgagtgagtttcataatcccgagttctagtttgattgcactgtggtctgagagatagtttgttataatttctattcttttacatttgctgaggagagctttacttccaactatgtggtcagtttttgaataggtgtgctgtggtgctatgattgagaatatgcggtgtttggttggggggtcttgcggtagtttactgagaatgatgatttccggtttcatgcatgtcccccgcgttggaattttgccattgcccattgacacctttgaaccgaacactccgggggaaaacaggggggcaaaaaaatctttgttaaataaagattcttagactccggtatccgttttctgttcccgtgttggcttcgaatacaaggtatttatggcctttgtcttcaacgtagtgagggtctctcagcgtatggttgtcgccggatgtataattgccttcatcgataaactgctgaacgttctgatatgtttttccgtgctggcgtcaaaaatcgttttgtgatcttccactccgttgattttgagtgtgtcatcagattttgacacatttacctgcgctgttgtcaggctttgtttgccgtaatgtttaccggaatagtcagtgtaaaataaacggatttttccgtcagatgtaaaggttgcagaaccggaccattcttgcgtctgatctttcaggatcggatcgttggcgtcgaacttatcgctgtctttaaagacacggcccgcgtttttccagctgtcgattgagttgtcgccgaccttttgataaaacatgtagattgatgtgtcatcagcgtctttcgggcttcccgcatgagcaaacacaacgtgatagccgttgtattcacctactgttccgtcagcgttttgcaccggccagctgtcccacacatcaagtccttttgcagactcaatattttttaatcgttgattgatccaattgaagcactgggtattttttcgttttgcctgctgtttagggatctgcagcatatcatggcgtgtaatatgagagacgccgtacgctgatgaatccccgaacttggccgtaacctccacaaagagcgactcgctgtataccgttggcatgctagctttatctgttcgggcaatacgatgcccattgtacttgttgactggtctgatattcgtgagcaaaaacgacttatggtattgcgagcttcagtcgcactacacggtcgttctgttactctttatgagaaagcgttcccgctttcagagcaatgttcaaagaaagctcatgaccaatttctagccgaccttgcgagcattctaccgagtaacaccacaccgctcattgtcagtgatgctggctttaaagtgccatggtataaatccgttgagaagctgggttggtactggttaagtcgagtaagaggaaaagtacaatatgcagacctaggagcggaaaactggaaacctatcagcaacttacatgatatgtcatctagtcactcaaagactttaggctataagaggctgactaaaagcaatccaatctcatgccaaattctattgtataaatctcgctctaaaggccgaaaaaatcagcgctcgacacggactcattgtcaccacccgtcacctaaaatctactcagcgtcggcaaaggagccatgggttctagcaactaacttacctgttgaaattcgaacacccaaacaacttgttaatatctattcgaagcgaatgcagattgaagaaaccttccgagacttgaaaagtcctgcctacggactaggcctacgccatagccgaacgagcagctcagagcgttttgatatcatgctgctaatcgccctgatgcttcaactaacatgttggcttgcgggcgttcatgctcagaaacaaggttgggacaagcacttccaggctaacacagtcagaaatcgaaacctcaaaatttattcacacatggttacgctttggggaaattatgaggggatctctcagtaccaagtgcctcaattcgatcaatcaacgattaaaaatattgagtctgcaaaaggacttgatgtgtgggacagctggccgctgcaaaaacgttgaacgaaacagtagctgaatacaacggctatcacgttgtgtttgctcttgcggggaagcccgaaagacgctgatgacacatcaatctacatgttttatcaaaagggtcggcgacaactcaatcgacagatgggaaaaacgcggggccgtgtctttaaagacagcgataagttcgacgccaacgatcccgatcctgaaagatcagacgcaagaatggtccggttctgcaacctttacatctgacggaaaaatccgtttattctacactgactattccggtaaacattacggcaaacaaagcctgacaacagcgcaggtaaatgtgtcaaaatctgatgacacactcaaaatcaacggagtggaagatcacaaaacgatttttgacggagacggaaaaacatatcagaacgttcagcagtttatcgatgaaggcaattatacatccggcgacaaccatacgctgagagaccctcactacgttgaagacaaaggccataaataccttggttttcgaagccaacacgggaacagaaaacggataccaaggcgaagaatctttatttaacaaagccgtactacggcggcggcacgaactttttccgtaaagaaagccagaagcttcaagcagagcgctaaaaaacgcgatgctgagttagcgaacggcgccctcggtatcatagagttaaataatgattacacattggaaaaaagaatgaaggcgcctgatcacttcacacacggtaactgatgaaatcgagcgcgcgaatgttttcaacatgaacggcaaatggtacttgttcactgatttcacgcggttcaaaaatgacgatcgatggtattaactcaaacgatatttacatgcttggttatgtatcaaactctttaaccggcccttacaagccgctgaacaaaacagggcttgtgctgcaaatgggtcttgatccaaacgatgtgacattcacttactctcacttcgcagtgccgcaagccaaaggcaacaatgtggttatcacaagctacatgacaaacagaggcttcttcgaggataaaaaggcaacatttgcgccaagcttcttaatgaacatcaaaggcaataaaacatccgttgtcaaaaacagcatcctggagcaaggacagctgacagtcgggggccaaccccttcgcccagtgaaaaaccgcggccgggtctttaaaaacagcgatagttcgacgcccaacgatccgatcctgaaagatcagacgcaagaatggtccggttctgcaacctttacctctgagggaaaaatccgtttattctacactgactattccggtaaacattccggcaaacaaagcttgacaacagcgcaggtaaatgtgtcaaaatctgatgacacactcaaaatcaacggagtggaagatcacaaaacgatttttgacggagacggaaaaacatatcagaacgttcagcagtttatcgatgaaggcaattatacatccggcgacaaccatacgctgagagaccctcactacgttgaagacaaaggccataaataccttgtattcgaagccaacacgggaacagaaaacggataccaaggcgaagaatctttatttaacaaagcgtactacggcggcggcacgaacttcttccgtaaagaaagccagaagcttcagcagagcgctaaaaaacgcgatgctgagttagcgaacggcgccctcggtatcatagagttaaataatgattacacattgaaaaaagtaatgaagccgctgatcacttcaaacacggtaactgatgaaatcgagcgcgcgaatggtttcaaaatgaacggcaaatgcagtggcagtgtggacgtgtgtggactgtggcaaggtgctagccagcgccggggtgccagcctccatgcaggcatttgcagcagctgggtggcagcatggctggaggagggcagggggtccctgcaaggaatagaattgggcactcatgggggcagtctgctgttctccatgcttagttttgggcaggcagcagtgtcggcggcaggggctggtggtctcattgctgccagtgctcctatgacagtggtggtttactctagaggatccccgatcctgaaagatcagacgcaagaatggtccggttctgcaacctttacatctgacggaaaaatccgtttattctacactgactattccggtaaacattacggcaaacaaagcctgacaacagcgcaggtaaatgtgtcaaaatctgatgacacactcaaaatcaacggagtggaagatcacaaaacgatttttgacggagacggaaaaacatatcagaacgttcagcagtttatcgatgaaggcaattatacatccggcgacaaccatacgctgagagaccctcactacgttgaagacaaaggccataaataccttgtattcgaagccaacacgggaacagaaaacggataccaaggcgaagaatctttatttaacaaagcgtactacggcggcggcacgaacttcttccgtaaagaaagccagaagcttcagcagagcgctaaaaaacgcgatgctgagttagcgaacggcgccctcggtatcatagagttaaataatgattacacattgaaaaaagtaatgaagccgctgatcacttcaaacacggtaactgatgaaatcgagcgcgcgaatgttttcaaaatgaacggcaaatggtacttgttcactgattcacgcggttcaaaaatgacgatcgatgtctcaagccatcgaaaggccacgccgcgcacaccgcccagcgaccggccgccgcccgcgtgcggcagcaaagcaacacaaaaacaggcaccaccgaccaggcgtcccgggaaagacagaaaacccacaacacggcgccgacaactggggaagacacgcaagagggcccgagaacagagcggacgcccccgggcacaagagggaaacgccgaacaggaagacccggcacaacacaaaacgagcaaagggaagagagaaagagccaccaagcacaggaaaaggcgggacaggccaccagcaaacaaggcgagccacaccccccccacaacgaaatacgacctcacactcactagaacgcgacaatgtcctgtgcatgtagccagggtgttactccaactgaagtgggtcactttccatgactccaactccagagtattggtgcagatgttttgtgcaggggaagagcataatgaacgaggactcttagagtccaagaccgttcagctggatattacggcctttttaaagaccgtaaagaaaaataagcacaagttttatccggcctttattcacattcttgcccgcctgatgaatgctcatccggagttccgtatggcaatgaaagacggtgagctggtgatatgggatagtgttcacccttgttacaccgttttccatgagcaaactgaaacgttttcatcgctctggagtgaataccacgacgatttccggcagtttctacacatatattcgcaagatgtggcgtgttacggtgaaaacctggcctatttccctaaagggtttattgagaatatgtttttcgtctcagccaatccctgggtgagtttcaccagttttgatttaaacgtggccaatatggacaacttcttcgcccccgttttcaccatgggcaaatattatacgcaaggcgacaaggtgctgatgccgctggcgattcagttcattatgctgacatatcttttcatgttggcctggctgggagtcacggctttcacctcactgccagtttacatgtacttcaatctgtggaccatctgccggaacaccacattagtggagggagcaaatctctgcttggaccttcgtcagtttgccagtaaggatatacggcaggcattgaagagtttcgcggggaaggaagtggttttttatcgccctgaagaggatgccggcgatgaaaaaggctatgaatcttttccttggtttatcaaacgtgcgcacagtccatccagagggctttacagtgtacatatcaacccatatctcattcccttctttatcgggttacagaaccggtttacgcagtttcggcttagtgaaacaaaagaaatcaccaatccgtatgccatgcgtttatacgaatccctgtgtcagtatcgtaagccggatggctcaggcatcgtctctctgaaaatcgagtggatcatagagcgttaccagctgcctcaaagttaccagcgtatgcctgacctcccagcccgcttcctgcaggtctgtgttaatgagatcaacagcagaactccaatgcgcctctcatacattgagaaaaagaaaggccgccagacgactcatatcgtattttccttccgcgatatcactcccatgacgacaggatag

SEQ ID NO: 21862 - DNA, 4416 bp, Homo sapiens
  SIMILAR (2951)..(3229): 521254mologous to unidentified cloning vector 29kD protein essential for the replication of mini F plasmid,accession number AB015619,Smith-Waterman Score=179.
atggaggtgattcctgaagggtacaggctttccgagttgaaaaaatgttctaaatggattgtggtgatggttgcacggctctatgaatatactaaaaaccaacaaattatacatttaaaatgggtgaatcatatgctgggatgcctactggaccgcaacgacccgctccgggatgtcgatgaggcagccgtgcctgtgctgtgtatctgcagtgctgacgaccccgtgtgtggacccccagaccacactctgacaactgaactcttccacagcaacccctacttcttcctcctgctcagtcgccacggaggccactgtggcttcctgcgccaggagcccttgccagcctggagccatgaggtcatcttggagtccttccgggccttgactgagttcttccgaacggaggagaggattaaagggctgagcaggcacagagcttccttccttgggggccgtcgtcgtgggggagccttgcagaggcgggaagtctcttcctcttccaacctggaggagatctttaactggaagcgatcatacacaaggttgatggcagcggcagctggggctgcagcggcgccgggctctagagagccgcaggatcggccagagtgcggagctggacacccgggtcccagatactacagacacccggagaggtggctccttcgccctgaagccttcctcggccccctacgcactcgggccccttccgcagaggattcgcagcgtgagcgccccgcagcccgctcaggaccagagatgcgagttcggtatcctgtggtggctgcagtcttggccccatacctggctttaagccaagatccaatggtcaagtcttctgcttctggacagggtgcctctgggagctacaaccacgtccgtgaagagatgctcatcaaggctggcggtgctatgagcagacgtgtggttcggcaaagcaagttccgccatgtgtttgggcaggcagcaaaggccgaccaggcctacgaggacatccgtgtgtccaaggtcacatgggacagctccttctgtgccgtcaaccccaaattcctggccattattgtggaggctggaggcggggtgccttcatcgtcctgcctctggccaaggtggtggctagcaggctaccgttgtgttccagcacacactgtggatgacgtctgggtgcatatcatccaggctcagcagcacctccccggtgcccacattccagatgatgatcacattgtcaccacctgcccagagtggccaggcatggtagcagggaatccaatggccccagacttctctttgaactcatttgctccacccttcgccaatggccttccccggaacgttctccaggatcctccagagagccccaaagctttctccctcccttcactcaggctgctgctcaaatgtcacctccttagaaaagcccaccctgacagcccatctgaggaggtgaggggcgcctctgcccggccaccaccccgtctgggaggtgtacccaacagctcattgagaacgggccatgatgacaataggcggttttgtggaatagaaaggggggaaaggaggagcgactcaagcttcgcgaaagaaaataaccaaaaagcatacaaagaaacgtacggcgtctctcatattacacgccatgatatgctgcagatccctaaacagcagcaaaacgaaaaataccaagtgcctcaattcgatcaatcaacgattaaaaatattgagtctgcaaaaggacttgatgtgtgggacagctggccgctgcaaaacgctgacggaacagtagctgaatacaacggctatcacgttgtgtttgctcttgcgggaagcccgaaagacgctgatgacacatcaatctacatgtttatcaaaagtcgcgacaactcaatcgacaatgatgaactcaaccctggctgggcatccatcagcaggggtgtgctggtgtgtgacgagtgctgcagcgtgcaccggagcctgggacgccacatctccattgtcaagcaccttcgccacagcgcctggcctcccacgctgctgcaggctttgcagaactttcagcggtataccggcatacagcatgtgcatcgcataggaatggcggaacgtatgtggtgtgaccggaacagagaacgtcacaccgtcagcagcagcggcgcaaccgcctccccaatccagaccgttcagctggatattacggcctttttaaagaccgtaaagaaaaataagcacaagttttatccggcctttattcacattcttgcccgcctgatgaatgctcatccggagttccgtatggcaatgaaagacgggtttattgagaatatgtttttcgtctcagccaatccctgggtgagtttcaccagttttgatttaaacgtggccaatatggacaacttcttcgcccccgttttcaccatgggcaaatattatacgcaaggcgacaaggtgctgatgccgctggcgattcaggaatatggctggaatctggaccgagcctatgactatgtgaaagaaagacgaacggtaaccaagcccaacccaagcttcatgagacaactggaagagtatcaggggatcttgctggcaagcgttatcaatcacaagaaacgtaaaaatagcccgcgaatcgtccagtcaaacgacctcactgaggcggcatatagtctctcccgggatcaaaaacgtatgctgtatctgttcgttgaccagatcagaaaatctgatggcaccctacaggaacatgacggtatctgcgagatccatgttgctaaatatgctgaaatattcggattgacctctgcggaagccagtaaggatatacggcaggcattgaagagtttcgcggggaaggaagtggttttttatcgccctgaagaggatgccggcgatgaaaaaggctatgaatcttttccttggtttatcaaacgtgcgcacaggtccattccagagggcgctttacagttgtaccatatgcaacccataaatcctcattcctcttctttatcgggttacagaaccggtttacgcagttttcggcttagtgaaacaaaagaaatcaccaatccgtatgccatggcgtttatacgaaatccctgttgtcagtatccgtaagcccgggatgggctcaaggcattctcctcttttgaaaatcgactggatcatagagcgttaccagctgcctcaaagttaccagcgtatgcctgacttccgccgccgcttcctgcagcattttctggctcatgctggctgtcccaaaggcacccagaacttcacgtttagaatgaaatttatcatcttctccattaaaaaagttttacctcctgttgacacaatcttagctcatgaccccgttatccatacttgtcatctgagagagtcctttggtagtgtctctccttcatctccaaaatctaatcggttaccatgccctgaagtgatcttatttcattatggtgaaagttggaacctcttacgtgccgatcaacgtctcattttcgccaaaagttggcccagggcttcccggtatcaacagggacaccaggatttatttattctgcgaagtgatcttccgtcacaggtatttattcgcgataagctcatggagcggcgtaaccgtcgcacaggaaggacagagaaggcgcggatttggggaagtgacggacagaacggtcaggaacctggattgtggaggcgcgatgccagccgctgctgctgacggtgtgacgttctctgttccggtcacaccacatacgttccgccattcctatgcgatgcacatgctgtatgcccggtataccgctgaaaggtctgcaaagcctgatgggacataagtgcatcaggtcaacgggaaggctaccccaaaggtttttgggcctggaatggggcttgcccgggcacccggggggcaggttggcaatggccgaagtctgatgcggttgggaatgcctaaacaattatcctgagaataaatgcccttggccctttatatggaaactgggaaactgagtggatatggctgtttttgtctgttaaacagaagaagcttggctgttatcccactgagaagcgaacgaaacaggccgggaaaatctccccttatcgtagagagatccggattatttaatctctggaaaccgggggtacgcttataggaaagaatggttctgtcatgatgcctgcaagccggtaacgaaaacgatttgaatatgccttcaggaacaatagaaatcttcgtgcggtgttacgttgaagtggagcggattatgtcagcaatggacagaacaacctaatgaacacagaaccatgatgtggtctgtccttttacagccagtagtgctcgccgcagtccagcgacagggcgaagccctcgagtgagcgagggagcacccaggaacagcacttatatattctggg

SEQ ID NO: 21863 - DNA, 697 bp, Homo sapiens
  SIMILAR (43)..(516): 791254mologous to unidentified cloning vector 29kD protein essential for the replication of mini F plasmid,accession number AB015619,Smith-Waterman Score=614.
tgtgacaatctaaaaacttgtcacacttcacatggatctgtcatggcggaaacagcggttatcaatcacaagaaacgtaaaaatagcccgcgaatcgtccagtcaaacgacctcactgaggcggcatatagtctctcccgggatcaaaaacgtatgctgtatctgttcgttgaccagatcagaaaatctgatggcaccctacaggaacatgacggtatctgcgagatccatgttgctaaatatgctgaaatattcggattgacctctgcggaagccagtaaggatatacggcaggcattgaagagtttcgcggggaaggaagtggttttttatcgccctgaagaggatgccggcgatgaaaaaagctatgaatcttttccttggtttatcaaacgcatcccgaatttgctcctccatccacggggactgagagccattactattgctgtatttggtaagcaaaatacgtacatcaggctcgaaccctttaagatcaacgttcttgagcagatcacgaagcatatcgaaaaactgcagtgcggaggtgtagtcaaacaactcagcaggcgtgggaacaatcagcacatcagcagcacatacgacattaatcgtgccgatacccaggttaggcgcgctgtcaataactatgacatcatagtcatgagcaacagtttcaatggcccagtcggagcatcaa

SEQ ID NO: 21864 - DNA, 1350 bp, Homo sapiens; identical to SEQ ID NO: 4998
  SIMILAR (1003)..(1347): 1001254mologous to Plasmid F Protein D,accession number M12987,Smith-Waterman Score=584.
  misc_feature (1)...(1350): n = a,t,c or g

SEQ ID NO: 21865 - DNA, 1932 bp, Homo sapiens; identical to SEQ ID NO: 5205
  SIMILAR (418)..(1038): 911254mologous to unidentified cloning vector 29kD protein essential for the replication of mini F plasmid,accession number AB015619,Smith-Waterman Score=970.
  misc_feature (1)...(1932): n = a,t,c or g

SEQ ID NO: 21866 - DNA, 2235 bp, Homo sapiens
  SIMILAR (1231)..(1833): 991254mologous to unidentified cloning vector 29kD protein essential for the replication of mini F plasmid,accession number AB015619,Smith-Waterman Score=1045.
  misc_feature (1)...(2235): n = a,t,c or g
atgaaggacataaatattatcttagccaccagaacacagaatgttcttggtgagaagggccagtgggttggggaactgactgctgcagttgagaagaggtttggttttccagagggcagtgtagagctttatgctgataagatcagaaaatctgatggcaccctacaggaacatgacggtatctgcgagatccatgttgctaaatatgctgaaatattcggattgacctctgcggaagccagtaaggatatacggcaggcattgaagagtttcgcggggaaggaagtggttttttatcgccctgaagaggatgccggcgatgaaaaaggctatgaatcttttccttggtttatcaaacgtgcgcacagtccatccagagggctttacagtgtacatatcaacccatatctcattcccttctttatcgggttacagaaccggtttacgcagtttcggcttagtgaaacaaaagaaatcaccaatccgtatgccatgcgtttatacgaatccctgtgtcagtatcgtaagccggatggctcaggcatcgtctctctgaaaatcgactggatcatagagcgttaccagctgcctcaaagttaccagcgtatgcctgacttccgccgccgcttcctgcaggtctgtgttaatgagatcaacagcagaactccaatgcgcctctcatacattgagaaaaagaaaggccgccagacgactcatatctttttcgatatgcttcgtgatctgctcaagaacgttgatcttaaagggttcgagcctgatgtacgtattttgcttaccaaatacagcaatagtaatggctctcagtccccgtggatggaggagcaaattcgggatgcctggggaagcatggttctaaaaaatgttgtacgtgaaacggatgaagttggtaaagatacttcgttatcgacaccagctgccccgatggtggattcgttaattgcgcgcgtaggagtaatggctcgcggtaatgccattactttgcctgtatgtggtcgggatgtgaagtttactcttgaagtgctccggggtgatagtgttgagaagacctctcgggtatggtcaggtgctgtatcccagggaggtgagagttttatctatatgcccctgactggggctgctgcctttctttcagagatgccctgcccagagaggaggaatctaaagaagcagtgtggctacagtggctttgctgcatgcggttatcaatcacaagaacgtaaaaatagcccgcgaatcgtccagtcaaacgacctcactgaggcggcatatagtctctcccgggatcaaaaacgtatgctgtatctgttcgttgaccagatcagaaaatctgatggcaccctacaggaacatgacggtatctgcgagatccatgttgctaaatatgctgaaatattcggattgacctctgcggaagccagtaaggatatacggcaggcattgaagagtttcgcggggaaggaagtggttttttatcgccctgaagaggatgccggcgatgaaaaaggctatgaatcttttccttggtttatcaaacgtgcgcacagtccatccagagggctttacagtgtacatatcaacccatatctcattcccttctttatcgggttacagaaccggtttacgcagtttcggcttagtgaaacaaaagaaatcaccaatccgtatgccatgcgtttatacgaatccctgtgtcagtatcgtaagccggatggctcaggcatcgtctctctgaaaatcgactggatcatagagcgttaccagctgcctcaaagttaccagcgtatgcctgacttccgccgccgcttcctgcaggatcataactcttcaccagaaagggaacaaaactggatggagaatgagtttgacgaactgacagaagtaggcttcagaaggtgggtaataacaaactcctccgagctaaaggagcatgttctaacccaatgcaaggaagctaagaaccttgataaaaggttacaggaactgctaactagaataagcaatttagagaacatagatgacctgatggagctcaaaaacacagcacaagaacttcatgaaacatacacaagtatcaatagccaaactgatcaagcagaagaaaggatatcagagattggagatcaacttaatgaaataaacatgaagaccagattagaggagaaaaaaaaaggaaagggaacgaacaaaggcctccaagaaccactttggngatga

SEQ ID NO: 21867 - DNA, 436 bp, Homo sapiens; identical to SEQ ID NO: 5000
  SIMILAR (82)..(324): 1001254mologous to Plasmid F Protein D,accession number M12987,Smith-Waterman Score=407.
  misc_feature (1)...(436): n = a,t,c or g

SEQ ID NO: 21868 - DNA, 1173 bp, Homo sapiens; identical to SEQ ID NO: 5004
  SIMILAR (826)..(1170): 1001254mologous to Plasmid F Protein D,accession number M12987,Smith-Waterman Score=584.

SEQ ID NO: 21869 - DNA, 1602 bp, Homo sapiens; identical to SEQ ID NO: 13207
  SIMILAR (1255)..(1599): 1001254mologous to Plasmid F Protein D,accession number M12987,Smith-Waterman Score=584.

SEQ ID NO: 21870 - DNA, 1281 bp, Homo sapiens
  SIMILAR (387)..(4): 921254mologous to Plasmid F resolvase,accession number AP001918,Smith-Waterman Score=585.
tcaggataattgtttcagcatcgcaaccgcatcagactccggcatcgcaaactgcacccggtgccgggcagccacatccagcgcaaaaaccttcgtgtagacttccgttgaactgatggacttatgtcccatcaggctttgcagaactttcagcggtataccggcatacagcatgtgcatcgcataggaatggcggaacgtatgtggtgtgaccggaacagagaacgtcacaccgtcagcagcagcggcggcaaccgcctccccaatccaggtcctgaccgttctgtccgtcacttcccagatccgcgctttctctgtccttcctgtgcgacggttacgccgctccatgagcttatcgcgaattaatacctgtgacggaagatcacttcgcagaatatatttttcctggtgtccctgttgataccgggaagccctgggccaacttttggcgaaaattagacgttgatcggcacgtaagatgttccaactttcaccataatgacataagatcactgcagaaccaccggccacgatctgccgagaagcctcgcgcactaagctgacttcaggcttggcggacatcttcgccaggcgggaggacaagggagtgggctgagatgcgtcaacgagctcgcagcctgcacagccttgcctgcttggtctatgtgaagatataaggttgtcagagtgccacactgtgaagctatttccttgtgttcccctggtgtcctcctcagtcctctttctcacagttgactgctgggttttttgttgttgttgttctttagtctgtgtatcagaatgtgatccccaagacttctttttcacttttagagacatttccatatgcttggctcgtgcaattgcttcatctctctcctcaatggctaattgcagtctagacataacagcttcatcacgttccttctgcgcaaaatacacttcttcaaccagagccttaagggaagtggtctcctctctggcccagagcaggtccagaaatgtcatccaagagtcaagttctggaatcagggactccaagagcccacttagtgttctacccaccggtggcaatgctggtattgtctccagaaggagccaaccctgccgacgaaagaagaaatttctgaaaattttctcccattttgtaggttgcctgttcactctgatggtagtttcttttgctgtgcagaagctctttagtttaattagatccgatttgtcaattttggcttttgttgccattgcttttggtgtattagacatgaagtccttgcccat

SEQ ID NO: 21871 - DNA, 906 bp, Homo sapiens; identical to SEQ ID NO: 4995
  SIMILAR (190)..(531): 981254mologous to unidentified cloning vector 29kD protein essential for the replication of mini F plasmid,accession number AB015619,Smith-Waterman Score=573.

SEQ ID NO: 21872 - DNA, 3210 bp, Homo sapiens
  SIMILAR (715)..(1524): 991254mologous to Cloning vector pZC320 SopA,accession number U26464,Smith-Waterman Score=1411.
  misc_feature (1)...(3210): n = a,t,c or g
atggcggaaacagcggttatcaatcacaagaaacgtaaaaatagcccgcgaatcgtccagtcaaacgacctcactgaggcggcatatagtctctcccgggatcaaaaacgtatgctgtatctgttcgttgaccagatcagaaaatctgatggcaccctacaggaacatgacggtatctgcgagatccatgttgctaaatatgctgaaatattcggattgacctctgcggaagccagtaaggatatacggcaggcattgaagagtttcgcggggaaggaagtggttttttatcgccctgaagaggatgccggcgatgaaaaaggctatgaatcttttccttggtttatcaaacgtgcgcacagtccatccagagggctttacagtgtacatatcaacccatatctcattcccttctttatcgggttacagaaccggtttacgcagtttcggcttagtgaaacaaaagaaatcaccaatccgtatgccatgcgtttatacgaatccctgtgtcagtatcgtaagccggatggctcaggcatcgtctctctgaaaatcgactggatcatagagcgttaccagctgcctcaaagttaccagcgtatgcctgacttccgccgccgcttcctgcaggtctgtgttaatgagatcaacagcagaactccaatgcgcctctcatacattgagaaaaagaaaggccgccagacgactcatatcgctatcagagatgccgagaaagcagggcgactaccgcacccggatatggaaattcgaggacgggttgagcaacgtgttggttatacaattgaacaaattaatcatatgcgtgatgtgtttggtacgcgattgcgacgtgctgaagacgtatttccaccggtgatcggggttgctgcccataaaggtggcgtttacaaaacctcagtttctgttcatcttgctcaggatctggctctgaaggggctacgtgttttgctcgtggaaggtaacgacccccagggaacagcctcaatgtatcacggatgggtaccagatcttcatattcatgcagaagacactctcctgcctttctatcttggggaaaaggacgatgtcacttatgcaataaagcccacttgctggccggggcttgacattattccttcctgtctggctctgcaccgtattgaaactgagttaatgggcaaatttgatgaaggtaaactgcccaccgatccacacctgatgctccgactggccattgaaactgttgctcatgactatgatgtcatagttattgacagcgcgcctaacctgggtatcggcacgattaatgtcgtatgtgctgctgatgtgctgattgttcccacgcctgctgagttgtttgactacacctccgcactgcagtttttcgatatgcttcgtgatctgctcaagaacgttgatcttaaagggttcgagcctgatgtacgtattttgcttaccaaatacagcaatagtaatggctctcagtccccgtggatggaggagcaaattcgggatgcctgtggactctaaaggacccccctggcttttcaagttccttaagaatggcctcaattttctcttacactcagttggaacacgagacctgtccaggttaagcaccattttatcgcccttatacaatactgtcgctccaggagcaaactgatgtcgtgagcttaaactagttcttgatgcagatgacgttttaagcacagaagttaaaagagtgataacttcttcagcttcaaatatcaccccagcttttttctgctcatgaaggttagatgcctgctgcttaagtaattcctctttatctgtaaaggctttttgaagtgcatcacctgaccgggcagatagttcaccggggtgagaaaaaagagcaacaactgatttaggcaatttggcggtgttgatacagcgggtaataatcttacgtgaaatattttccgcatcagccagcgcagaaatatttccagcaaattcattcttgcatcggcttgcataacgctgaccacgttcataagcacttgtttggggcgatatcgttacccaatgtttgataaaccaaggaaaagattcatagcctttttcatcgccggcatcctcttcagggcgataaaaaaccacttccttccccgcgaaactcttcaatgcctgccgtatatccttactggcttccgcagaggtcaatccgaatatttcagcatatttagcaacatggatctcgcagataccgtcatgttcctgtagggtgccatcagattttctgatctggtcaacgaacagatacagcatacgtttttgatcccgggagagactatatgccgcctcagtgaggtcgtttgactggacgattcgcgggctattcttacgtttcttgtgattgataaccgctgtttccgcatgacagatccatgtgaagtgtgacaagtttttagattgcacagttttaagcacagaagttaaaagagtgataacttcttcagcttcaaatatcaccccagcttttttctgctcatgaaggttagatgcctgctgcttaagtaattcctctttatctgtaaaggctttttgaagtgcatcacctgaccgggcagatagttcaccggggtgagaaaaaagagcaacaactgatttaggcaatttggcggtgttgatacagcgggtaataatcttacgtgaaatattttccgcatcagccagcgcagaaatatttccagcaaattcattctgcaatcggcttgcataacgctgaccacgttcataagcacttgttgggcgataatcgttacccaatctggataatgcagccatctgctcatcatccagctcgccaaccagaacacgataatcactttcggtaagtgcagcagctntacgacggcgactcccatcggcaatttctatgacaccagatactcttcgaccgaacgccggtgtctgttgaccagtcagtagaaaagaaaggatgagatcatccagtgcgtcctcagtaagcagctcctggtcacgttcattacctttatgggcagcaaccccgatcaccggtggaaatacgtcttcagcacgtcgcaatcgcgtaccaaacacatcacgcatatgattaatttgttcaattgtataaccaacacgttgctcaacccgtcctcgaatttccatatccgggtgcggggggcggcctgctttctcggcatctctgatagccttcat

SEQ ID NO: 21873 - DNA, 870 bp, Homo sapiens
  SIMILAR (275)..(637): 961254mologous to unidentified cloning vector 29kD protein essential for the replication of mini F plasmid,accession number AB015619,Smith-Waterman Score=606.
agtatctggtgtcatagaaattgccgatgggagtcgccgtcgtaaagctgctgcacttaccgaaagtgattatcgtgttctggttggcgagctggatgatgagcagatggctgcattatccagattgggtaacgattatcgcccaacaagtgcttatgaacgtggtcagcgttatgcaagccgattgcagaatgaatttgctggaaatatttctgcgctggctgatgcggagtgtgacaatctaaaaacttgtcacacttcacatggatctgtcatggcggaaacagcggttatcaatcacaagaaacgtaaaaatagcccgcgaatcgtccagtcaaacgacctcactgaggcggcatatagtctctcccgggatcaaaaacgtatgctgtatctgttcgttgaccagatcagaaaatctgatggcaccctacaggaacatgacggtatctgcgagatccatgttgctaaatatgctgaaatattcggattgacctctgcggaagccagtaaggatatacggcaggcattgaagagtttcgcggggaaggaagtggttttttatcgccctgaagaggatgccggcgatgaaaaaggctatgaatcttttccttggtttatcaaacaaagcaacaacatcaacatcaacaaaaaggacaaccacacagaaactctatctgaaggtcaccagcagcaaagaccaaaggtagataaatccacgaagatgaggaaaaaccagcacaaaaaggctgaaaattccaaaaaccagaatgctgcttctcctccaaagggtcacaactcctcgtcagcaagggaacaaaaccggacggagaatgaatttgacgaattgatagaagtatgcttcagaag

SEQ ID NO: 21874 - DNA, 4306 bp, Homo sapiens
  SIMILAR (583)..(1446): 1001254mologous to Cloning vector pZC320 SopA,accession number U26464,Smith-Waterman Score=1509.
atggcggaaacagcggttatcaatcacaagaaacgtaaaaatagcccgcgaatcgtccagtcaaacgacctcactgaggcggcatatagtctctcccgggatcaaaaacgtatgctgtatctgttcgttgaccagatcagaaaatctgatggcaccctacaggaacatgacggtatctgcgagatccatgttgctaaatatgctgaaatattcggattgacctctgcggaagccagtaaggatatacggcaggcattgaagagtttcgcggggaaggaagtggttttttatcgccctgaagaggatgccggcgatgaaaaaggctatgaatcttttccttggtttatcaaacgtgcgcacagtccatccagagggctttacagtaaccggtttacgcagtttcggcttagtgaaacaaaagaaatcaccaatccgtatgccatgcgtttatacgaatccctgtgtcagtatcgtaagccggatggctcaggcatcgtctctctgaaaatcgactggatcatagagcgttaccagctgcctcaaagttaccagcgtatgcctgacttccgccgccgcttcctgcagtgcataaacgctggtcatgaaatgacgaaggctatcgccattgcacagtttaatgatgacagcccggaagcgaggaaaataacccggcgctggagaataggtgaagcagcggatttagttggggtttcttctcaggctatcagagatgccgagaaagcagggcgactaccgcacccggatatggaaattcgaggacgggttgagcaacgtgttggttatacaattgaacaaattaatcatatgcgtgatgtgtttggtacgcgattgcgacgtgctgaagacgtatttccaccggtgatcggggttgctgcccataaaggtggcgtttacaaaacctcagtttctgttcatcttgctcaggatctggctctgaaggggctacgtgttttgctcgtggaaggtaacgacccccagggaacagcctcaatgtatcacggatgggtaccagatcttcatattcatgcagaagacactctcctgcctttctatcttggggaaaaggacgatgtcacttatgcaataaagcccacttgctggccggggcttgacattattccttcctgtctggctctgcaccgtattgaaactgagttaatgggcaaatttgatgaaggtaaactgcccaccgatccacacctgatgctccgactggccattgaaactgttgctcatgactatgatgtcatagttattgacagcgcgcctaacctgggtatcggcacgattaatgtcgtatgtgctgctgatgtgctgattgttcccacgcctgctgagttgtttgactacacctccgcactgcagtttttcgatatgcttcgtgatctgctcaagaacgttgatcttaaagggttcgagcctgatggcacacaggcaaagatgacacaaggtgaacgcaggaacgtccccaaacaagaatacatatctcgtgggtatttcacccttaaagaaaccgtgatcgatacaagcaatggaagcaggatttctttcacgactcgtataaccggcaaagacgtagtaagaaccaccagcattgtaatgctggctaaagtcactttcctgagctgtataacgatgagcgattttactttttctggctatgaattggcctgctttgtaacacactccggtctatcccgtagcgccgggcatatcctgtcgcaatgtgcaaatctcgcggcaacaaccagtgaatacttcattcacaagcctcaccgcctgatcgcggcagaaactggttatagccaatcaaccgtcgttcgtgcattccgtgaagctgtaaacaaaggaattctgtctgtagagattgttatcggcgatcaccgtgaacgtcgcgctaacctgtaccggtttacaccatcctttttggccttcgcacaacaagccaaaaatgcgctgatagaaagcaaattaaagatctcttcagcggcaaccaagtgtgacaatctaaaaacttgtcacacttcacatggatctgtcatggcggaaacagcggttatcaatcacaagaaacgtaaaaatagcccgcgaatcgtccagtcaaacgacctcactgaggcggcatatagtctctcccgggatcaaaaacgtatgctgtatctgttcgttgaccagatcagaaaatctgatggcaccctacaggaacatgacggtatctgcgagatccatgttgctaaatatgctgaaatattcggattgacctctgcggaagccagtaaggatatacggcaggcattgaagagtttcgcggggaaggaagtggttttttatcgccctgaagaggatgccggcgatgaaaaaggctatgaatcttttccttggtttatcaaacgtgcgcacagtccatccagagggctttacagtgtacatatcaacccatatctcattcccttctttatcgggtttacagaaccggtttacgcagtttcggcttagtgaaacaaaagaaatcaccaatccgtatgccatgcgtttatacgaatccctgtgtcagtatcgtaagccggatggctcaggcatcgtctctctgaaaatcgactggatcatagagcgttaccagctgcctcaaagttaccagcgtatgcctgacttccgccgccgcttcctgcaggtctgtgttaatgagatcaacagcagaactccaatgcgcctctcatacattgagaaaaagaaaggccgccagacgactcatatcgatctggctctgaaggggctacgtgttttgctcgtggaaggtaacgacccccagggaacagcctcaatgtatcacggatgggtaccagatcttcatattcatgcagaagacactctcctgcctttctatcttggggaaaaggacgatgtcacttatgcaataaagcccacttgctggccggggcttgacattattccttcctgtctggctctgcaccgtattgaaactgagttaatgggcaaatttgatgaaggtaaactgcccaccgatccacacctgatgctccgactggccattgaaactgttgctcatgactatgatgtcatagttattgacagcgcgcctaacctgggtatcggcacgattaatgtcgtatgtgctgctgatgtgctgattgttcccacgcctgctgagttgtttgactacacctccgcactgcagtttttcgatatgcttcgtgatctgctcaagaacgttgatcttaaagggttcgagcctgatgtacgtattttgcttaccaaatacagcaatagtaatggctctcagtccccgtggatggaggagcaaattcgggatgcctggggaagcatggttctaaaaaatgttgtacgtgaaacggatgaagttggtaaagctgccccgatggtggattcgttaattgcgcgcgtaggagtaatggctcgcggtaatgccattactttgcctgtatgtggtcgggatgtgaagtttactcttgaagtgctccggggtgatagtgttgagaagacctctcgggtatggtcaggtaatgaacgtgaccaggagctgcttactgaggacgcactggatgatctcatcccttcttttctactgactggtcaacagacaccggcgttcggtcgaagagtatctggtgtcatagaaattgccgatgggagtcgccgtcgtaaagctgctgcacttaccgaaagtgattatcgtgttctggttggcgagctggatgatgagcagatggctgcattatccagattgggtaacgattatcgcccaacaagtgcttatgaacgtggtcagcgttatgcaagccgattgcagaatgaatttgctggaaatatttctgcgctggctgatgcggaaaatatttcacgtaagattattacccgctgtatcaacaccgccaaattgcctaaatcagttgttgctcttttttctcaccccggtgaactatctgcccggtcaggtgatgcacttcaaaaagcctttacagataaagaggaattacttaagcagcaggcatctaaccttcatgagcagaaaaaagctggggtgatatttgaagctgaagaagttatcactcttttaacttctgtgcttaaaacgtcatctgcatcaagaactagtttaagctcacgacatcagtttgctcctggagcgacagtattgtataagggcgataaaatggtgcttaacctggacaggtctcgtgttccaactgagtgtatagagaaaattgaggccattcttaaggaacttgaaaagccagcaccctga

SEQ ID NO: 21875 - DNA, 1200 bp, Homo sapiens
  SIMILAR (1200)..(631): 951254mologous to Cloning vector pZC320 SopB,accession number U26464,Smith-Waterman Score=907.
attctcaggataattgtttcagcatcgcaaccgcatcagactccggcatcgcaaactgcacccggtgccgggcagccacatccagcgcaaaaaccttcgtgtagacttccgttgaactgatggacttatgtcccatcaggctttgcagaactttcagcggtataccggcatacagcatgtgcatcgcataggaatggcggaacgtatgtggtgtgaccggaacagagaacgtcacaccgtcagcagcagcggcggcaaccgcctccccaatccaggtcctgaccgttctgtccgtccacttcccagatccgcgctttctctgtccttcctgtgcgacggttacgccgctccatgagcttatcgcgaataaatacctgtgacggaagatcacttcgcagaataaataaatcctggtgtccctgttgataccgggaagcccctgggccaacttttggcgaaaatgagacgttgatcggcacgtaagaggttccaactttcaccataatgaaataagatcactatgatgatccatttttcaaactgccaactcttctctagaattatccttttcattttgcaaggcttttggctcattgatgtttctgtattattcccaagtttatcactgatacgtaaatatttttccgcatcagccagcgcagaaatatttccagcaaattctttctgcaatcggcttgcataacgctgaccacgttcataagcacttgttgggcgataatcgttacccaatctggataattcagccatctgctcatcatccagctcgccaaccagaacacgataatcactttcggtaagtgcagcagctttacgacggcgactcccatcggcaatttctatgacaccagatactcttcgaccgaacgccggtgtctgttgaccagtcagtagaaaagaagggatgagatcatccagtgcgtcctcagtaagcagctcctggtcacgttcattacctgaccatacccgagaggtcttctcaacactatcaccccggagcacttcaagagtaaacttcacatcccgaccacatacaggcaaagtaatggcattaccgcgagccattactcccacgcgcgcaattaacgaatccaccatcgaaacagctggtgaagataacgaagtatcttcaaccggttgagtattgagcgtatgttttggaataacaggcgcacgcttcat

SEQ ID NO: 21876 - DNA, 2627 bp, Homo sapiens
  SIMILAR (765)..(1268): 411254mologous to unidentified cloning vector 29kD protein essential for the replication of mini F plasmid,accession number AB015619,Smith-Waterman Score=212.
atgtaacaaaaagtgggggtttccttagaagccaagaaccgtcggaaaattcccatatggtagagaccgccttttatttcacggagctttgaacggttataagaaggaatggctgtcatatgcctccaaccggtaacggaaagggtttgataacccttccaggacaaataaaattttcggccggttgttcggttaagtggaagcggatttatgtcaccaatggcccgaccacctaatgaacccggaccctgatgtggtttgtccttttacagccagtagtgctccccgcatttgaaccgcaagggacaagccctttaatgagccaaggaagccccagggaacagcacttataaatttcgctttccacccgatgcctaaaaaaactttcccttgggggtaacccccttatccacggggatattttaataattattttttcaatagtttttagatcttcttttttagagcgccttgtaggcctttatccatgctggttctagagaaggtgttgtgacaaatttgccctttcagtgtgacaaatcaccctcaaatgacagtcctgtctgttgacaaaatggcctttaaccctgtgacaaaattgccctcagaagaagctgttttttcacaaagcttatccctgcttattgactcttttttatttagagtggcaatctaaaagcctgtcacccttcacatggatctgtcatggcggaaacagcgggttatcaatcacaagaaacgtaaaaatagccctcgaatgcgaacagtaaaaagacggctatcagcaggcatatagtctctcccgggatcaaaaacgtatgctgtatctgttcgttgaccagatcagaaaatctgatggcaccctacaggaacatgaccggcatcctgccagatccatggtgctcaataccgctgacaaatctccgattgaccttttgcggaagccagtaaggatatacggcaggcattgaagagtttcgcggggaaggaagtggttttttatcgccctgaagaggatgccggcgatgaaaaaggctatgaatcttttccttggtttatcaaacgtgcgcacagtccatccagagggcttttcagtggacatattccccccatatctcattcccttctttatcggggtaaagaaccggctaacacaaattctgcttatttgaaacaaaagaaatcccccatccgtctgccctggcgttattacgagagcctgggtcaggatcggaaggccggatggttcaagcatcggctctctgaaaaatcgactggatcatagagcgttaccagctgcctcaaagttaccagcgtatgcctgacttccgccgccgcttcctgcagcattttctggctcatgctggctgtcccaaaggcacccagaacttcacgtttagaatgaaatttatcatcttctccattaaaaaagttttacctcctgttgacacaatcttagctcatgaccccgttatccatacttgtcatctgagagagtcctttggtagtgtctctccttcatctccaaaatctaatcggttaccatgccctgaagtgatcttatttcattatggtgaaagttggaacctcttacgtgccgatcaacgtctcattttcgccaaaagttggcccagggcttcccggtatcaacagggacaccaggatttatttattctgcgaagtgatcttccgtcacaggtatttattcgcgataagctcatggagcggcgtaaccgtcgcacaggaaggacagagaaagcgcggatttggggaagtgacggacagaacggtcaggaacctggatatgtcgaggcgggttgcccgccgctgctgctgacggtgtgacgttcatctgatcccggtccaccacaatacgttccgccattcatatgcgatgcacatgctgtatgcccggtaataccgctgaaagttttgcaaagcctgatgggacataagtccatcagttcaacggaagtctacacgaaggtttttgcgctggatgtggctgcccggcaccgggtgcagtttgcgatgccggagtctgatgcggttgcgaatgcctgaaacaattattcctaagaaataaatgcccttggccctttatatggaaactgggaaactgaggggataatgctggttttggtctgtttaacaaagaaaacgggctgtgatacccattgagaagcgaacggaaccagtcggggaaaatctccccttattggggaagatccggattatttaatctaaggaccctggggtaccgtttataggaaagaatggttctgtcatgatgcctgcaagccggtaacgaaaacgatttgaatatgccttcaggaacaatagaaatcttcgtgcggtgttacgttgaagtggagcggattatgtcagcaatggacagaacaacctaatgaacacagaaccatgatgtggtctgtccttttacagccagtagtgctcgccgcagtccagcgacagggcgaagccctcgagtgagcgagggagcacccaggaacagcacttatatattctgcttacacacgatgcctgaaaaaacttcccttggggttatccacttatccacggggatatttttataaatattttttttataggttttagatcctcta

SEQ ID NO: 21877 - DNA, 414 bp, Homo sapiens
  SIMILAR (3)..(110): 971254mologous to Homo sapiens NADP+-dependent malic enzyme,accession number X79440,Smith-Waterman Score=188.
  misc_feature (1)...(414): n = a,t,c or g
agctcttctaccgagtgctgacttcggacgtggagaagttcatgccaatcgtgtacacgcctaccgtggggctggcctgtcagcactatggcctgactttccgcagccccggtgagcccccgtggagtgagggctctgggaggggctgcctcatagaggggaataaattctttccgcccttcatgcatattgggactctggaggctaactctgattgggtcagtggtccaacaaaaagacatttgatttcaagcacttgctcagaaaaatgaccccgtaagcagagaaatgagtgaaaagagtagctagcaagggtttattgacttcttcttcacctccaaattaataaatggcccagcatgcttcaggagttgggcctgaggaggagagtttcaggttgttatttnttctcat

SEQ ID NO: 21878 - DNA, 531 bp, Homo sapiens
  SIMILAR (280)..(387): 971254mologous to Homo sapiens NADP+-dependent malic enzyme,accession number X79440,Smith-Waterman Score=186.
atgcccattcgcggaccaggtagccacgtcatagattgtgtctgcgtgtgcaccctcggaggcggcacgcatcgtgctgggctgtgcgactggtgtctcccatacagacatctcgtgacgtcagcaacgcccttgcccctgcgatccaatccccgttcagaaggtactccgtgtaaccgagcatggcgagcgaactggcgaggaagcaaagaagaactgttctcgtcagatagctcttacgctcagcgcaagaagaaatatccaccgtgggaaagactccaggagctgctcagagaccctctgtacatcggcctgaaacaccagcgcgtgcacgggaaggcatacgatgacttgctggatgagttcatgcaggctgtgacagacaagatgagagatcgggcccgacccagtatctaccctgacagtgttagaacaatgctagaaatcgccctacgcaccactctcatgatgcctgtatgtgctgatcagacgttttccattgcctccgagaccccaacacatcctcgctag

SEQ ID NO: 21879 - DNA, 831 bp, Homo sapiens
  SIMILAR (2)..(118): 1001254mologous to Homo sapiens NADP+-dependent malic enzyme,accession number X79440,Smith-Waterman Score=214.
  misc_feature (1)...(831): n = a,t,c or g
caagtttggaataaattgcctcatccaatttgaagacttcgccaatgccaatgccttccgcctgctcaacaaataccgtaacaagtactgcatgttcaatgatgacatccaaggaacaacctgccacactttcagctgcccatggcatttatgggcacaagtcatgttccagcacatccctggacccatgggcttctcagagtggttacctcgaaacactaagtagcttcctttccagttttaaacccctagtgcatagcccaagagcaccccaaaaatgcaggttaatgatggagataactttatttgccaaattttgtaatttggagcttaagaaccactgtttttcctcttgagttctggcctgtaccaagtgcagaaatagcttcccaaaggaaaaaaatgggcaacagtaccaaatgctgctgagaggtcaagaaagaagaaggctgagaactgattactgaatttggccacctggaggtacttggggaccctgacaagaggcacagcctccgcttgctgtggcagggatcttggctgctctgcgaatcaccaacaacaagctttccaatcacgtgtttgttttccaaggtgcaggcgaggcagctatgggcattgcccacctccttgtcatggccctaagaagaaagaaggtgtaccgaacgcacganggccacaagaaagatctggatggtggactctaaaagggctcatttgtcaaggggaaggaagccacctgganaccatgaaaaggagatgtttgcccaagaccatcctgaagtcaactccctggaggaggtggtgaggctggtgaagcccacagccatg

SEQ ID NO: 21880 - DNA, 2069 bp, Homo sapiens
  SIMILAR (33)..(1892): 691254mologous to Homo sapiens NADP+-dependent malic enzyme,accession number X79440,Smith-Waterman Score=1973.
cggaaggagaggaccgaggtctgccaaggaccatgggtgccgcgctggggacaggcacgcggctggctccctggccgggccgggcctgcggcgccctcccgcgctggacacccaccgcgcccgcccaaggctgccactccaagcctggcccggcgcgccctgtgcccctgaagaagcgcggatacgatgtcaccaggaaccctcatctcaacaaggggatggcctttacccttgaagaaaggctgcagcttggaatccacggcctaatcccgccctgctttctgagccaggacgtccagctcctccgaatcatgagatattacgagcggcagcagagtgacctggacaagtacatcattctcatgacactccaagaccggaacgagaagctcttctaccgagtgctgacttcggatgtggagaagttcatgccaatcgtgtacacgcctaccgtggggctggcctgtcagcactatggcctgactttccgcaggccccgtggactgttcatcaccattcatgacaaaggtcatcttgcaacaatgctgaattcttggccagaagacaatattaaggccgtggtggtgactgatggggagcgcatcctgggcctgggagacctgggctgctacggcatgggcatccctgtgggcaagctggccctgtacacggcatgcggaggggtgaacccgcagcagtgcctccctgtgctgctggacgtcggcaccaacaatgaggagctgctcagagaccctctgtaacatcggcctgaaacaccagcgcgtgcacgggaaggcatacgatgacttgctggatgagttcatgcaggctgtgacagacaagtttggaataaattgccctcatcccaatttgaagacttcgccaatgccaatgccttccgcctgctcaacaaataccgtaacaagtactgcatgttcaatgatgacatccaaggcacagcctccgttgctgtggcagggatcttggctgctctgcgaatcaccaacaacaagctttccaatcacgtgtttgttttccaaggtgcaggcgaggcagctatggggcattgcccacctccttgtcatggccctagaggaaagaaggtgtaccgaaggcaggaggccacaagaaagatctgggatggtggacttttaaagggctcattgtcaaggggaggagccacctgaaccatgaaaaggagatgtttgcccaagacccatcctgagtcaaactccctggatgaggtggtgaggctggtgaagcccacagccatcataggtgttgctgccatcgcagaagcccttcacggagcagattttaaggaacatggcttccttcccgaagggccccaatcatttttgccctgagcaacccacccagaaaggccgagtgcacggcttgagaagtgctaccgggtcaccgaggggccgaggggattttttgccagtgggaagtcctttttaaggagtgttgatttgggagcatgggcaagaccttcattcctgggggcaggggaaacaatgcttaacgtgttccccgggggtggcaactgggagtccattcgcccggcggggatcccgggcacatccccagatgagatcttcctccctgacagcagagccaaattgccccaggaagtctctgagcagcatctggtcccaggggagactctaccccaccactcagcacccatccgagacgtgtctttgagaattgccatcaaagttctcgactacgcgtacaaacacaacctggttttcctactacccagagcctaaggacaaggaggctttttgtaagatccctgggtcttacactccagactatgactccttttacactgggacagctacatttgggcccaagggaaggccatgaatgttcagacggtctgaggcagtctcagaggctagtatggggctagatgaagcccagagtaacacccacaatataaatgggttccaaaatggcccaagtgaatccttgtcgctgtgttttttcttttaaactttctggtgtgagaggagatgccaaggcatacagtgaataaaagccttgtctctgaaaaa

SEQ ID NO: 21881 - DNA, 567 bp, Homo sapiens
  SIMILAR (200)..(328): 1001254mologous to Homo sapiens Secreted protein of clone CR930_1,accession number W69343,Smith-Waterman Score=224.
  misc_feature (1)...(567): n = a,t,c or g
aaggggnnnnnnagcnngcncnnnnnnnnnttctgaaactgccggctgcatgaattcggcacgagcgttgctggtgcgagtccttatgaaccagactagcatttctcagtgggttccagtatgcagccgattgatacctgtgtctcctacccaaggacagggggacagggctctgtctcgcacttcccagtggccccagatgagccagtcccaagcatgtggtggatcagaacagattcctggaatagacatacagctgaataggaagtatcacaccacacgtaagctttctactaccaaagattccccacagcctgttgaggagaagcgatcttgggatatgatgaggggatcctttcagatgatcatgggctggccgctgccctctggagaaccttcttcaaccggaaatgtgaagaccctcgacatcttgaattgctggtagagtatgtgaggaaacagatacagtacctggactccatgaacggggaggatctgcttctgacaggggaggtgagctggcgccctctagtggagaagaatcctcagagcatcctgaagccccat

SEQ ID NO: 21882 - DNA, 603 bp, Homo sapiens
  SIMILAR (309)..(485): 881254mologous to Homo sapiens Secreted protein of clone CR930_1,accession number W69343,Smith-Waterman Score=291.
  misc_feature (1)...(603): n = a,t,c or g
cgtccttaggaaccagactagcatttctcagtgggttccagtatgcagccgattgatacctgtgtctcctacccaaggacagggggacagggctctgtctcgcacttcccagtggccccagatgagccagtcccaagcatgtggtggatcagaacagattcctggaatagacatacagctcgaataggaagtatcacaccacacgtaagctttctactaccaaagattccccacagcctgttgaggagaaggttggtgctttcacaaagataatagaagccatgggattcacgggacctttgaaatacaggtgtcagatgcctgatacattcaattcatggtttcttataaccctactccacgtctggatgtgtctagtccgaatgaagcaggaaggccggagtgggaagtacatgtgtcgtatcatagttcattttatgtgggaggatgttcagcagccggcagagtcatgggggttaatccctatatcctgaagaagaacatgatcctaatgacaaatcatttctatgcagcgatcntgggatatgatgaagggatcctttcagatgatcatgggctggccgctgccctctggangaactt

SEQ ID NO: 21883 - DNA, 417 bp, Homo sapiens
  SIMILAR (298)..(417): 1001254mologous to Homo sapiens dJ614O4.4 (novel protein weakly similar to Xenopus laevis putative Zic3 binding protein),accession number AL121753,Smith-Waterman Score=213.
agacgtgtccttgggaggtgtgtgtctgtctccattcagaggtgtgatagggaattccctaactgcccccgccacccagctccccagtgactgctttctctgaaccaccttagtgaaattatctaggagatcagagacggcttggcctgggacggcttggtctgggacctgggatggtcagaagcccccctcatgccccgtccccttccttcctctcctctgggaggctggttcctgacgctggctcctcacctctgccctgcctctgtcgcttcctccttccccctcccctggttgcagatacagtacctggactccatgaacggggaggatctgcttctgacaggggaggtgagctggcgccctctagtggagaagaatcctcagagcatcctgaagccccattctccgacttac

SEQ ID NO: 21884 - DNA, 454 bp, Homo sapiens
  SIMILAR (21)..(125): 851254mologous to Homo sapiens dJ468N4.1 (Novel protein similar to putative ZIC3 Binding protein from Xenopus laevis),accession number AL121752,Smith-Waterman Score=155.
  misc_feature (1)...(454): n = a,t,c or g
tgtccagcgcggtggaattccagtgggttccagtatgcagccgattgatacctgtgtctcctacccaaggacagggggacagggctctgtctcgcacttcccaggtcccctggttggaaacttctgcttcagaatggcatcctcagacagggtcttgcnnnnnnnnnnnnnnnnnnnnnnnnnnnnnnnnnnnnnnnnnnnnnnnnnnnnnnnnnnnnnnnnnnnnnnnnnnnnnnnnnnnnnnnnnnnnnngggtgtcagatgcctgatacattcaattcatggtttcttataaccctactccacgtctggatgtgtctagtccgaatgaagcaggaaggccggagtgggaagtacatgtgtcgtatcatagttcattttatgtgggaggatgttcagcagcgcggcagagtcatggggttctgatgggaggccctggtatggggcctgcact

SEQ ID NO: 21885 - DNA, 1892 bp, Homo sapiens
  SIMILAR (190)..(513): 651254mologous to Homo sapiens Secreted protein of clone CR930_1,accession number W69343,Smith-Waterman Score=321.
cgcctcgccccgtaattcccgggtcgacgatttcgtggttattgaggaacatggcgttgctggtgcgagtccttaggaaccagactagcatttctcagtgggttccagtatgcagccgattgatacctgtgtctcctacccaagggacagggggacagggctctgtctcgcacttcccagtggccccagatgagccagtcccaagcatgtggtggatcagaacagattcctggaatagacatacagctgaataggaagtatcacaccacacgtaagctttctactaccaaaagattccccacagcctgttggaggaagaaggttggtgctttcacaaagataatagaagccatgggattcacgggacctttgaaatacagtaaatgggaagatttaagattgcgggccctgcgcattgtatactagctgtgtgggagaaaacttgacttcgagggattcttttctaaggtgttcagatgcctgatacattcaattcatggtttcttattaacccctacttccacgtctggatgtgtctagtccgaatgaagcaggaaggccggagtgggaagtacatgtgtcgtatcatagttcattttatgtgggaggatgttcagcagcgcggcagagtcatgggggttaatccctatatcctgaagaagaacatgatcctcatgacaaatcatttctatgcaagcgatcttgggatatgatgaggggatcctttcagatgatcatgggctggccgctgccctctggaagaaccttcttcaacccggaaatgtgaagaccctcgacatcttgaattgctggtagagtatgtgaggaaacagatacagtacctggactccaatgaacggggaggatctgcttctgacaggggaggtgagctggcgccctctagtggagaagaatcctcagagcatcctgaagccccattctccgacttacaacgaccgagggacttttgatgggctgggccctccgcacggcccgccagctggcttccgaggaacctccagggaagagaagtgcctggttggtcccaggacccctgccagaaagtggcctgaacttgacctcttgaacaagcatctgtccaaatacctggcccccatttgtgttgagtttcctcttagtgtgccccaggagtctgatctgctggggtacagggcttgggagaaccccttagctctcccggggtgtccgtcgtcccttaggggaagccccgagtgagagtcccccagcacacactcccccaaccccctccagcaactacatgtgactgatagcttttcccaaaggccaaggaagggatggtgtaggttcaaaagggaaaccccccagggcctgctgtggcctaggagcagattgtaatgctgccgagtccggtcggtgaccacgcgttgtccgctcggctttcagccatggggttgagttggccattaaaagaaacagagacttctctctgccatggcccttctttattccaggggacttagaaactttgcctgagatggtggacgcagtaatgagggcaccgcgcagctcagttagagacggagaaagggaagaggctgggatggtctctgctgctcttgcctctaagttcatggagatgtgtctctgttcaggccaagatacagccagccaggcctgtcgtctgggacccaggaggccttttgattaccaagggctttcacatcctaagtcatttggaaggaggccttgagaacaaagtcacctttgtcactcccagtgaactgaatgaggaacatgctgtctcctgtcttggcctccctttcatgagatactgggggagaagagaacattcctcctggcttagttgtagcagacccagacctgtgccagctttggtccccttccaactt

SEQ ID NO: 21886 - DNA, 435 bp, Homo sapiens; identical to SEQ ID NO: 4774
  SIMILAR (238)..(2): 971254mologous to Mus musculus Nedd4 WW domain-binding protein 5,accession number AF220209,Smith-Waterman Score=415.

SEQ ID NO: 21887 - DNA, 753 bp, Homo sapiens
  SIMILAR (351)..(232): 801254mologous to Homo sapiens Human secreted protein sequence SEQ ID NO:216,accession number Y87177,Smith-Waterman Score =149.
tcatcgtagctctcccttttgggcatcaccacagccaaacatcgcctcttccaaatctactgcaaactgcggcttgtctcttgcttcattttttacttttgtctggggtcgagacgggcaggccgggcccgtggcagcctcgaatccgagcccggggcccacccgcccctccaggcccagcgcggcctgccaagccccggcgtcgagttgccgcgggccggccagagaggcctgctggtacggctgccgcaggccggctcgaccgccgccagcgccgccaacgccaacgcatggcgcagccggcagcagggaagcagagcgagcgagcgagctagctgaggggcgcggccgctgcggcttgggagcgcaggaactatcatggtctctgcatgtgttccctgattcttcaaaattgcagtgggtggaaggggacttctctagtgatacctctggtgacacagattttccggccacagaaatcggggaagtttttcctggtgtgggctttccgtgggtaactccttgtgtctggtgcaccagttcttgagcttttgggggatacaaaacaggttgttttttggcttctggtttaggatttagctttcttgggtctgctgagtcagttaccacttgcatcctgcttctagctttcagaaatttattgctgcttcctttcctgttgttgtaagtttttttgccttgagcaccaagccatttgcagtagaaccatgaaattgatagagccagcgacat

SEQ ID NO: 21888 - DNA, 872 bp, Homo sapiens
  SIMILAR (579)..(25): 491254mologous to Homo sapiens Human secreted protein sequence SEQ ID NO:183,accession number Y87144,Smith-Waterman Score =269.
ggtatgggccaccgtcatgtagcctctgcaataatcgatgagtcctctgagcgcacagagaaagcgtaagacatggacccccccccttagcacgtgctgacctctaaaaatccatgggatagggtgtaaacctgactatcaggatccattaattagagggagaccaactcctgaaatggccccataccttcctgcagctgaagtggtcaggcaaaaaagacaggaaaaacccaaatccaagttaaaagaggaatgcccatgaaaaaaagttaacatgaaaaatccccatcatttccctatccctcaagctgggtcaagcatcatcaaaaatcatcccgaccccacaaaatcctcatctctccccaggaaccaaaagggatagtagctttcagccttggtccctctccgctttcatcataactgggcagtgttgtagctacattgtaagatgggggctttggaaacccagactcatccttgtagtcaaaaaatatgctgcgctctctgcagaaatgctgctggtaaaggtggaggagccatcacctgcagcctgttcaggttctccagactcttcttcattctgcaactgctggtaaccggctgccgcaggccggctcgatccgccgcccagcgcccgccaacgcccaacgcccataagcgcagccggcagcagggaagcagagcgagcgagcgagctagctgaaggggcgcggccgctacggcttgggagcgctgggaggccgagggggacgcgccttgggtgggtctcgatggccgccgccgctcccgggcgagacgctcttctcaggctgtaagcaccgccgccgccgccgaggctccgacgcggcccctggggaagaggcggggactac

SEQ ID NO: 21889 - DNA, 457 bp, Homo sapiens
  SIMILAR (223)..(426): 321254mologous to Oryctolagus cuniculus immunoglobulin kappa light chain variable region,accession number AF135637,Smith- Waterman Score=76.
tttgttctgagtaaatttattattattatcaggagaggtctctgcaaagcagaaccctgtagaaactgcattcctgtgaatggcatccagaccctcgttaactaaaatgccgctccattttcacgccacgctgcatttcaaggatttagttgggctgtctgtatcttccggctccccgcagagcgtgcactgcgactctttccggcttcctgcctggttctcccaggtggaccatcaggtgtggcacctgcacggctggccgctgccgaccactgctcctcctctgctccagggcgtctggcgagtcgaggtaggcgagcacgagatggcagagattttctcctctgctaagaaggaagctgccggtgctcttcagaggccctgtattcctgtctggtaagatacagcaatgcttctgcagaatgccaggcaaaacctcccagggcaatgaatcctt

SEQ ID NO: 21890 - DNA, 1809 bp, Homo sapiens
  SIMILAR (908)..(1735): 311254mologous to Mus musculus proline-rich protein MP- 3,accession number M12100,Smith-Waterman Score=171.
atgagaggaaacactgcagggggcccaggagacgagaaacctgattccactcatcccccatgggagggaacgctgcaggaggcccaggagatgaaaaaggtagtgcggttcatgtggacatctggtggcccagaccctcaacattggcgtggctcaggtttatatggacagctggtggcccagatgctccacattgacgtggctcaggtttatatggacagctggtggcccagatgctccacattggcgtggctcaggtttatatggacagctggtggcccagatgctccacattggcttcgctcaggtttaggtggacagctggtggcctggatgctacatgttggtgtagctcaggtttatgtagacagctggtggcccagctgctccgcatccatgtggcttagctttatggaacataaacagtgcttgaccctgggctatgaagtagccctttttctacagcattttctatccagggcctttgtcttggtttgggttccccggaaagaaaaggctcaggtattgagacaagggctcagtctcacttttcgggagaaccctggtgtatgtgtgatgagcagttaccgcccctggctcatcactgctgcagctgacatgcagccgtccaagccaggaggcacaggctcctactgcagctactggagccccactgacaacaccccacgccttgctgctgcgtgcacctggaacctgggctctagtcatgggtctgcccctggtgtaaggaccttcattgaggcaggattttcacctcctttcctggcacccaaagccttggccttgacactgagcgacagtgactcccgctggggcccgaaccctgtgtatgctcaaccccaaccgcggaaccggcctggggcccaaatcctgtgtaaggtcaaccccaaccgcggaatcggcctggggcccgaaccctgtgtatgctcaaccccaacagcggaaccgccatggggcccgaaccctgtgtcaaccccaaccgcggaaccggcctggggcccgaaccctgtgtatgctcaaccccaacagcggaaccgccatggggcccgaaccctgtgtaaggtcaaccccaaccgcggaaccggcctggggcccgaaccctgtgtacggtcaaccccaaccgcggaaccggcctggaagccgcaccacaaggcaacctgtactgcagcgctgccctcggtgccaccgacccatcgcaatcctggcaccaatgttcacaaaaccttctgcccgcagacaagggcgcaaagcgagaagcaccttggcgaggccaccgagtggggaggtggaccatcaggtgtggcacctgcacggctggccgctgccgaccactgctcctcctctgctccagggcgtctggcgagtcgagcagacacctgccagtcatcaccgtcaaccaaggccccgccagtcatcaccgtcaaccaaggccccgccagtcatcaccgtcaaccaaggccccgccagtcatcaccgtcaaccaaggccccgccagtcatcaccgtcaaccaaggccccgccagtcatcaccgtcaaccaaggccccgccagtcatcaccgtcaaccaaggccccgccagtcatcaccgtcaaccaaggccccgccagtcatcaccgtcaaccaaggccccgccagtcatcaccgtcaaccaaggccccgccagtcatcaccgtcaaccaaggccccgccagtcatcaccgtcaaccaaggccccgccagtcatcaacgttaaccaaggccccgccagtcatcaccgttaaccaaagccctgccagtcatcaccgttaa

SEQ ID NO: 21891 - DNA, 1367 bp, Homo sapiens
  SIMILAR (619)..(948): 531254mologous to Homo sapiens cytohesin-4,accession number AF075458,Smith-Waterman Score=250.
tttcgtgcctgatacagtctaggtgacgcatccttgccgggccagcccgagcagaagctgggtcggcaagcgacaggagcacgggtcatcttttccccagaggcgtcggaatggacctgtgccacccacagcccgcggagctgagcagcggggagacggatgagttaccgaggatctagtggcaccgaaagcagctcctggaggacatccagaaactgaaggatgagattgcggatgtgtttgcccaaatcgactgcttcgagagtgcgggggacagccggatggcccataaagagaatgagctgtgtattgggcgcaagaagttcaacatggacccccgccaaggtaggtggctgtggagggcccgggccacagggtgtgggggctgcatgggagcacctgcctggtgtcctctcaggcgagggcctcaacaagacagccattggtacctacctgggggagaggtaagaacgagtggagccttagcgaggcaggaaatgaaggtgtgcaggtgtgtacaggtgtgtggatgtgcaggccctcaggtgagtagtcctggggcagggtcccggccctcaagggtggcacagccccagtggctgggggtgtcgcgatcctcgatactgcctctgcaacccaggcgtcttccagtccacaggtgccaggaggggagtgggacccagggctccgggaccccttcagcattgccaggcatagatttcacagaccaggccgccttttgagcgctttgtgtccatgaaccgcggcatcaacaatggtagcgacctgcccgaggaccagctgcgggtgagagaggcgcagcccacccagcctggccccggggaatccaggagggacctgtccttagatggatggcccttcttcaatccagaccgggagggttggctgctcaagctaggtgagagaccgacagacacacgtcgtcgcacacacactcatgcacgcgcgggcacacatcgttgcatgcacaccactgtgagcagggttctcctgggccttcccctgcccccgcctctccccgcacaacccacttcccaactcccactagtaggtgttcaggttgcaggatcccgaggctggagccactgggaaatttcctaaacagaacgtggggagagcagggtggtggagggcaagcacgaatcgtaccgcatctcagccaccagtgccgaggaacgtgaccagtggatcgagtccatccggtaaggggtgcccaggtctggggacggcttcccgtcaccttccagaaggccctgcttcttttgggtcttgcgagattcctggaggtggcactgggggctggtcaccctgagagtcccatcgcctgcagcacctggagacccacc

SEQ ID NO: 21892 - DNA, 356 bp, Homo sapiens
  SIMILAR (155)..(319): 871254mologous to Homo sapiens C11 protein,accession number X81625,Smith-Waterman Score=263.
agaagaagttttaaaattagggagagagttctgcctgagagatttcaagctttttctgctttatttaaattatgacttaaaggatcaggcagggaaaataggctatgggaacattttctattaattgacgaaaaactagatatggggtaaagtagaaaaattgtttgtgttctttgcagtacctccaaatggtctggttgtatactgtggaacaattgtaacagaagaaggaaaggaaaagaaagtcaacattgactttgaacctttcaaaccaattaatacgtcattgtatttgtgtgacaacaaattccatacagaggtaagaagtcaaacccagaacattttcatcgctccag

SEQ ID NO: 21893 - DNA, 3847 bp, Homo sapiens
  SIMILAR (86)..(3844): 991254mologous to Homo sapiens p53 inducible protein,accession number AF160973,Smith-Waterman Score=6568.
cgccccggcgcggggccctgcggtagcctcaggcccctcccctggacccgccgcagagccagtgcagaatacagaaactgcagccatgaccacgcacgtcaccctggaagatgccctgtccaacgtggacctgcttgaagagcttcccctccccgaccagcagccatgcatcgagcctccaccttcctccatcatgtaccaggctaactttgacacaaactttgaggacaggaatgcatttgtcacgggcattgcaaggtacattgagcaggctacagtccactccagcatgaatgagatgctggaggaaggacatgagtatgcggtcatgctgtacacctggcgcagctgttcccgggccattccccaggtgaaatgcaacgagcagcccaaccgagtagagatctatgagaagacagtagaggtgctggagccggaggtcaccaagctcatgaagttcatgtattttcagcgcaaggccatcgagcggttctgcagcgaggtgaagcggctgtgccatgccgagcgcaggaaggactttgtctctgaggcctacctcctgacccttggcaagttcatcaacatgtttgctgtcctggatgagctaaagaacatgaagtgcagcgtcaagaatgaccactctgcctacaagagggcagcacagttcctgcggaagatggcagatccccagtctatccaggagtcgcagaacctttccatgttcctggccaaccacaacaggatcacccagtgtctccaccagcaacttgaagtgatcccaggctatgaggagctgctggctgacattgtcaacatctgtgtggattactacgagaacaagatgtacctgactcccagtgagaaacatatgctcctcaaggtgatgggctttggcctctacctaatggatggaaatgtcagtaacatttacaaactggatgccaagaagagaattaatcttagcaaaattgataaattctttaagcagctgcaggtggtgccccttttcggcgacatgcagatagagctggccagatacattgagaccagtgctcactatgaagagaacaagtccaagtggacgtgcacccagagcagcatcagcccccagtacaatatctgcgagcagatggttcagatccgggatgaccacatccgcttcatctccgagctcgctcgctacagcaacagtgaggtggtgacgggctcagggctggacagccagaagtcagacgaggagtatcgcgagctcttcgacctagccctgcggggtctgcagcttctatccaagtggagcgcccacgtcatggaggtgtactcttggaagctggttcatcccacagacaagttctgcaacaaggactgtcctggcaccgcggaggaatatgagagagccacacgctacaattacaccagtgaggaaaaatttgccttcgttgaggtgatcgccatgatcaaaggcctgcaggtgctcatgggcaggatggagagcgtcttcaaccaggccatcaggaacaccatctacgcggcattgcaggacttcgcccaggtgacgctgcgtgagcccctgcggcaggcggtacggaagaagaagaatgtcctcatcagcgtcctacaggcaattcgaaagaccatctgtgactgggagggagggcgagagccccctaatgacccatgcttgagaggggagaaggaccccaaaggtggatttgatatcaaggtgccccggcgtgctgtggggccatccagcacacagctgtacatggtgcggaccatgcttgaatcactcattgcagacaaaagcggctccaagaagaccctgaggagcagcctggatggacccattgtcctcgccatagaggactttcacaaacagtccttcttcttcacacatctgctcaacatcagtgaagccctgcagcagtgttgtgacctctcccagctctggttccgagaattcttcctggagttaaccatgggccgacgaatccagttccccatcgagatgtccatgccctggattctaacggaccatatcctggaaaccaaagaaccttccatgatggagtatgtcctctaccctctggatctgtacaacgacagcgcctactatgctctgaccaagtttaaaaagcagttcctgtacgatgagatagaagctgaggtgaacctgtgttttgatcagtttgtctacaagctggcagaccagatctttgcttactacaaagccatggctggcagtgtcctgttggataaacgttttcgagctgagtgtaagaattatggcgtcatcattccgtatccaccgtccaatcgctatgaaacactgctgaagcagagacacgtccagctgttgggtagatcaattgacttgaacagactcattacccagcgcatctctgccgccatgtataaatccttggaccaagctatcagccgctttgagagtgaggacctgacctccattgtggagctggagtggctgctggagattaaccggctcacgcatcggctgctctgtaagcatatgacgctggacagcttcgatgccatgttccgagaggccaatcacaatgtgtccgccccctatggccgtatcaccctgcatgtcttctgggaactgaactttgactttctccccaactactgctacaatgggtccactaaccgttttgtgcggactgccattcctttcacccaagaaccacaacgagacaaacctgccaacgtccagccttattacctctatggatccaagcctctcaacattgcctacagccacatctacagctcctacaggaatttcgtggggccacctcatttcaagactatctgcagactcctgggttatcagggcatcgctgtggtcatggaggaactgctaaagattgtgaagagcttgctccaaggaaccattctccagtatgtgaaaacactgatagaggtgatgcccaagatatgccgcttgccccgacatgagtatggctccccagggatcctggagttcttccaccaccagctgaaggacatcattgagtacgcagagctcaaaacagacgtgttccagagcctgagggaagtgggcaatgccatcctcttctgcctcctcatagagcaagctctgtctcaggaggaggtctgcgatttgctccatgccgcacccttccaaaacatcttgcctagagtctacatcaaagagggggagcgcctggaggtccggatgaaacgtctggaagccaagtatgccccgctccacctggtccctctgatcgagcggctggggacccctcagcaaatcgccattgctcgcgagggtgacctcctgaccaaggagcggctgtgctgtggcctgtccatgttcgaggtcatcctgacccgcattcggagctacctgcaggaccccatctggcggggcccaccgcccaccaatggcgtcatgcacgtcgatgagtgtgtggagttccaccggctgtggagcgccatgcagttcgtgtactgcatccctgtgggaaccaacgagttcacagctgagcagtgtttcggcgatggcttgaactgggttggttgctccatcattgtcctgctgggccagcagcgtcgctttgacctgttcgacttctgttaccacctgctaaaagtgcagaggcaggacgggaaggatgaaatcattaagaatgtgcccctgaagaagatggccgaccggatcaggaagtatcagatcttgaacaatgaggtttttgccatcctgaacaaatacatgaagtccgtggagacagacagttccactgtggagcatgtgcgctgcttccagccacccatccaccagtccttggccaccacttgctaa

SEQ ID NO: 21894 - DNA, 3879 bp, Homo sapiens
  SIMILAR (233)..(841): 671254mologous to Arabidopsis thaliana eRF1-3,accession number X97486,Smith-Waterman Score=638.
gctgctctgggtgcacgtccacttggacttgttctcttcatagtgagcactggtcttaatgtatctggccagctctatctgcatgtcgccgaaaaggggcaccacctgcagctgcctggagagagggagccggtgtcctacgtcagagccgccgccgccgccggagccgccgccggggaggagcagccgctgccgcccaggactgggcccttatggaggaggaggcgagaagatggcggacgaccccagtgctgccgacaggaacgtggagatctggaagatcaagaagctcattaagagcttggaggcggcccgcggcaatggcaccagcatgatatcattgatcattcctcccaaagaccagatttcacgagtggcaaaaatgttagcggatgagtttggaactgcatctaacattaagtcacgagtaaaccgcctttcagtcctgggagccattacatctgtacaacaaagactcaaactttataacaaagtacctccaaatggtctggttgtatactgtggaacaattgtaacagaagaaggaaaggaaaagaaagtcaacattgactttgaacctttcaaaccaattaatacgtcattgtatttgtgtgacaacaaattccatacagaggctcttacagcactactttcagatgataggcaagtttgggatttcattgtaataggtgggtagtgggtgcactttttgggcacactcccaagggaaacacaagaggaggtccctggcacaaattcactgtggggatcttccccaaggaaacacgggtaggagggaggtcagttcagccttgcgttttgcccgtttaagaatggaaaagcgacataactatgttcggaaagtagcagagactgctgtgcagctgtttatttctggggacaaagtgaatgtggctggtctagttttagctggatccgctgactttaaaactgaactaagtcaatctgatatgtttgatcagaggttacaatcaaaagttttaaaattagttgatatatcctatggtggtgaaaatggattcaaccaagctattgagttatctactgaagtcctctccaacgtgaaattcattcaagagaagaaattaataggacgatactttgatgaaatcagccaggactcactggcaagtactgttttggcgttgaagatacactaaaggctttggaaatgggagctgtagaaaattctaatagtctatgaaaatctgggatataatgagatatgttcttcattgccaaggcaccagaagaggagaaaattctctatctaactccagagcaagaaaaaggataaatctccatttcacagacaaagagaccggacaggaacatggagcttatcgagagcatgcccctgttggaatggtttgctaacaactataaaaaatttggagcctacgttggaaatgttcacagataaatcccagaaggggtctccagtttgatgaaaggatttgggtggaattggagggtatcttgcggtaccagagtagatttccaggggaatggaataccaagaaggagacgatgaattttttgaccttgatgactactaggtagtcgacatgggtccggcaaaaccgtgcctcacccctccagcatccaaccccaaggagcatacccatggtggaatccaaacagatccctgtccttacaattggaacatttccagaacttaatccatgagcattggatattgaaaagaaaacccgaaacaaaaccagacccagccctacactttggtttgtcatggtgtcagcgcagcagcctaactaactaatgttccttcaaaagccactttggacgtaatttaaaaaagaatcccagtttttacttttactggatggtgaaattggttgctcttgtattttatgaaaaaaaatgatttttttaaccttcatacatagaagcaaaaatactttaactgctgtaaaccttcaaaagttaatagaagtgagatcatactggtttgtttcttatttttgattggagaaaaattaaattgctgcatttcgcctaggtgacccatttacatgggcattctcagcttagactgcgtaagaaagaaatatatgtggtgaaaatgttggaaacccatttcctcctccttgggtcctctgtttaatgttgaaaggggtgagcctaatagggagggcactttccaactttcactcccttcacggttaccccgttcccccttccaggactgggcagtttcaagggatgcaaattgcattgcaaaatcaaactgactcatgaagcatttgggccagtgcactgtttacttccatctgtttgcagacacgatttgtgcccggcgtttgggagccctttgtatcaatgttctgacaagggtccctataaccttaacctactcgaaaccggtttggggatgggatatgatgggggcttctgtggctattgctggggattggggaggaaataaaacatggcaattttaagtggaagcgaagaaatttaaagaggattttattttgcttgggtcaatccttgttaaaagggaggtggatgtgttttccttgtgttggatggcatgagattatgtgaatgttttgatttattaaaatgaactgcaaggtttttcacaggaacgacagacatgtatgactgcatgtaattataaactcctgacctcctggtggggttggagcatctgtttcaaatgtgggacttacaagcacttctcacatgagaaattatgggcgggtgggaagggatgggacacatcttctggcaccatggatttaagaccatgttggatcctaaagttggtctgaaacccctgaagctgatgcttcacagctgggctgtaagtcagacttgaacccagctgatatgcaaggtcatggcgtgcccagggtggtgacagttgaacaaagtgtatagtacgtgcccagtggtagcgatggaaaaaagtataccaaatggactttgaaggaccaaaaggttttaaaagtcaattgggtatcacctccacactgacctagggtagtgggggtgcatttggttttcaaattgggtacttttaacactttagtgcctgactgctgttctttactgaccttgattcagtcactcgtagctttaattgggcctgaaccagctcccttggttccccaggttaacagaccctgcctaatcgttccaataaatcctggtttcacttgaatgaaggggaggtatgtcttaaaatgtaaagtttcttggttctcacacttgtactctgagggtccaaatactgttctggttcaatgtgtaacgctgatgttttcaaccccctgtgagaagagtccattatttggtgttcaccaacgtgggagacttcaccggaacaggcttttttgctttgggctctgctatttgtttgcagaacaccccaggagccgagtaaacatgctctcttcacagccagtacctttagggttttgcccattgtaaaatgggtctgatgtgatatgaccaagacccaggagaaattggatgtaaatttacatttttgaatatgctttgttgtttcacatgataccatttagggtatgccagccccctttgtagtttttatttttactatttaagtttggaaatgatgcccaaatttttgtatttctttaatcaatgtgttctcttcggtgatatatattgcattatatattgatgtgtgtatcaatatatattgatatgtattacacttacacatacaaacacatataagagggggtgaaaaccgtagcctttgcattctctatagcctctgcagagagatactaagcagcaaaatcttggtgttgtgatgtacagaaatggagaagagtattaaaccatatttaagaataa

SEQ ID NO: 21895 - DNA, 394 bp, Homo sapiens
  SIMILAR (6)..(287): 371254mologous to Gallus gallus alpha(IX) collagen- proteoglycan,accession number M28660,Smith-Waterman Score=95.
gtcgaggatgagcgggtgtgcgcaggcccagcgtgggagaggcaggcaggccaggagcggcccgccagaaaggtgcaagggaaagccccagaggcggaggggaagcacggatgccttctggacatcctggtctgcacgtacctagccgagaaggggctctctggcagctgtgggctgacagaggcactggtggcctttggggagggcagcagtttaggaagaaagaactgcagagacccctggggctccctcaggcaggagcctcactggtcagaccctcggatctcttcatgtctagtggccatgctgaagcaggaaggcaacttcttcctcttaggagtgaaagagtggtgtgattaccagcaagatcattattcttatctccatttctcag

SEQ ID NO: 21896 - DNA, 732 bp, Homo sapiens
  SIMILAR (732)..(217): 781254mologous to Homo sapiens ribosomal protein L9,accession number U21138,Smith-Waterman Score=686.
ttaattgcctgatgcagatctgttctgcccggcttgcggcgcagccgccggcagagctcgatctgcgggaatgagacccgtctttgcagtcagcgtggctcggactccaagcccacggcgccaccagccgagcctcagtttcctcgcctgccgtgtggctctataggatccccctttttcagagacatagataccatccaaaaatttcctgatatgctgagcagtttctttttcagagacatagataccatccaaaaatttcctgatatgcttgtttttaactgttgttgcttgctgaatcaaagccgctgaatttgaaacaagctcaatgtcatttccttcaaggattaattcatgtttctgggtttgacatactgaacaagcaacacctggtctcatcctaaccctgcggatgtatttttcacccaagaaatttcggatttcaacaaaagacccattctcccgggtaacgatgttgatggggaagtgagcatacacagatctcatcttgtaatggaagcccagtgtaacacccttgatcatgttctcaccacaagtgttgttaagccggagcctcttttttttctttacaagaagactgagttctatactgatgtgattgaagtccctccacagagttcctctggggcccttcacaataactctgcatcccttcagagtaatgacattttccggaatatcaacagtctgattgctgcggatggtcttcat

SEQ ID NO: 21897 - DNA, 3528 bp, Homo sapiens
  SIMILAR (81)..(347): 931254mologous to Homo sapiens 14-OCT-1993 Human SDF-1-beta cDNA clone insert,accession number Q74091_cd1,Smith-Waterman Score= 435.
cgcggccgcagccgcattgcccgctcggcgtccggcccccgacccgcgctcgtccgcccgcccgcccgcccgcccgcgccatgaacgccaaggtcgtggtcgtgctggtcctcgtgctgaccgcgctctgcctcagcgacgggaagcccgtcagcctgagctacagatgcccatgccgattcttcgaaagccatgttgccagagccaacgtcaagcatctcaaaattctcaacactccaaactgtgcccttcagattgtagcccggctgaagaacaacaacagacaagtgtgcattgacccgaagctaaagtggattcaggagtacctgggagaaagctttaaacaagaggttcaagatgtgagagggtcagacgcctgaggaacccttacagtaggagcccagctctgaaaccagtgttagggaagggcctgccacagcctcccctgccagggcagggccccaggcattgccaagggctttgttttgcacactttgccatattttcaccatttgattatgtagcaaaatacatgacatttatttttcatttagtttgattattcagtgtcactggcgacacgtagcagcttagactaaggccattattgtacttgccttattagagtgtctttccacggagccactcctctgactcagggctcctgggttttgtattctctgagctgtgcaggtggggagactgggctgagggagcctggccccatggtcagccctagggtggagagccaccaagagggacgcctgggggtgccaggaccagtcaacctgggcaaagcctagtgaaggcttctctctgtgggatgggatggtggagggccacatgggaggctcacccccttctccatccacatggtgagccgggtctgcctcttctgggagggcagcagggctaccctgagctgaggcagcagtgtgaggccagggcagagtgagacccagccctcatcccgagcacctccacatcctccacgttctgctcatcattctctgtctcatccatcatcatgtgtgtccacgactgtctccatggccccgcaaaaggactctcaggaccaaagctttcatgtaaactgtgcaccaagcaggaaatgaaaatgtcttgtgttacctgaaaacactgtgcacatctgtgtcttgtttggaatattgtccattgtccaatcctatgtttttggtcaaagccagcgtcctcctctgtgaccaatgtcttgatgcatgcactgttccccctgtgcagccgctgagcgaggagatgctccttgggccctttgagtgcagtcctgatcagagccgtggtcctttggggtgaactaccttggttcccccactgatcacaaaaacatggtgggtccatgggcagagcccaagggaattcggtgtgcaccagggttgaccccagaggattgctgccccatcagtgctccctcacatgtcagtaccttcaaactagggccaagcccagcactgcttgaggaaaacaagcattcacaacttgtttttggtttttaaaacccagtccacaaaataaccaatcctggacatgaagattctttcccaattcacatctaacctcatcttcttcaccatttggcaatgccatcatctcctgccttcctcctgggccctctctgctctgcgtgtcacctgtgcttcgggcccttcccacaggacatttctctaagagaacaatgtgctatgtgaagagtaagtcaacctgcctgacatttggagtgttcccctcccactgagggcagtcgatagagctgtattaagccacttaaaatgtttgtcactttgccaaggcaagcacttgtgggtttttgttttgtttttcattcagtcttacgaatacttttgccctttgattaaagactccagttaaaaaaaattttaatgaagaaagtggaaaacaaggaagtcaaagcaaggaaactatgtaacatgtaggaagtaggaagtaaattatagtgatgtaatcttgaattgtaactgttcgtgaatttaataatctgtagggtaattagtaacatgtgttaagtattttcataagtatttcaaattggagcttcatggcagaaggcaaacccatcaacaaaaattgtcccttaaacaaaaattaaaatcctcaatccagctatgttatattgaaaaaatagagcctgagggatctttactagttataaagatacagaactctttcaaaaccttttgaaattaacctctcactataccagtataattgagttttcagtggggcagtcattatccaggtaatccaagatattttaaaatctgtcacgtagaacttggatgtacctgcccccaatccatgaaccaagaccattgaattcttggttgaggaaacaaacatgaccctaaatcttgactacagtcaggaaaggaatcatttctatttctcctccatgggagaaaatagataagagtagaaactgcagggaaaattatttgcataacaattcctctactaacaatcagctccttcctggagactgcccagctaaagcaatatgcatttaaatacagtcttccatttgcaagggaaaagtctcttgtaatccgaatctctttttgctttcgaactgctagtcaagtgcgtccacgagctgtttactagggatccctcatctgtccctccgggacctggtgctgcctctacctgacactcccttgggctccctgtaacctcttcagaggccctcgctgccagctctgtatcaggacccagaggaaggggccagaggctcgttgactggctgtgtgttgggattgagtctgtgccacgtgtatgtgctgtggtgtgtccccctctgtccaggcactgagataccagcgaggaggctccagagggcactctgcttgttattagagattacctcctgagaaaaaagcttccgcttggagcagaggggctgaatagcagaaggttgcacctcccccaaccttagatgttctaagtctttccattggatctcattggacccttccatggtgtgatcgtctgactggtgttatcaccgtgggctccctgactgggagttgatcgcctttcccaggtgctacacccttttccagctggatgagaatttgagtgctctgatccctctacagagcttccctgactcattctgaaggagccccattcctgggaaatattccctagaaacttccaaatcccctaagcagaccactgataaaaccatgtagaaaatttgttattttgcaacctcgctggactctcagtctctgagcagtgaatgattcagtgttaaatgtgatgaatactgtattttgtattgtttcaagtgcatctcccagataatgtgaaaatggtccaggagaaggccaattcctatacgcagcgtgctttaaaaaataaataagaaacaactctttgagaaacaacaatttctactttgaagtcataccaatgaaaaaatgtatatgcacttataattttcctaataaagttctgtactcaaatgta

SEQ ID NO: 21898 - DNA, 1467 bp, Homo sapiens
  SIMILAR (336)..(608): 351254mologous to Hordeum vulgare pZE40,accession number X68600,Smith-Waterman Score=96.
tcagcctccagacaggcctctgttgctgaattttcctccatcagaaaagtcctctatgctctggtacctccatgatccccacagcagcacaaatgaaatactccttaaatatccgtgaccatcatcacattcagtaagaactgccacatactcgtcgctgaggcagagcgcggtcagcacgaggaccagcacgaccacgaccttggcgttcatggcgcgggcgggcgggcgggcgggcggacgagcgcgggtcgggggccggacgccgagcgggcaatgcggctgcccggcttgcggcgcagccgccggcagagctcgatctgcgggaatgagacccgtctttgcagtcagcgtggctcggactccaagcccacggcgccaccagccgagcctcagtttcctcgccggccgcagcgctggggctccggcgccctctggtggcggcgcctccctccccgctcccagagctctggccagctccattcctgcgcagctgatgaaacccgggagggcgaaggggtccgcgggaaatctacacccgggtggaggggcgccctggagctcggagatccgaccctgcgggagccgcgcgcagcctcgcttgcccttaaatctggccaaagcaaacgccatcgcctctcgcttcttcttcttctttttttctatcagaaaccccagagtgtgcacactgagagtgtgaacagcattgacactggagtcaccctgtgctgcgtgccttctgtcacctttctccttgcatctagctgatgaggtgggttcaatggcaaggccattccctgagaaatggagataagaataatgatcttgctggtaatcacaccactctttcactcctaagaggaagaagttgccttcctgcttcagcatggccactagacatgaagagatccgagggtctgaccagtgaggctcctgcctgagggagccccaggggtctctgcagttctttcttcctaaactgctgccctccccaaaggccaccagtgcctctgtcagcccacagctgccagagagccccttctcggctaggtacgtgcagaccaggatgtccagaaggcatccgtgctggctttctggctgctgcataacagcatgttcatttgaacgagtggcttgagcatgccagacctgggtctttctcatcttcccctccgcctctggggctttcccttgcacctttctggcgggccgctcctggcctgcctgcctctcccacgctgggcctgcgcacacccgctcatcctcgacctggctgagcagcacggccgcatatgctttgccattccacttcccaatggcagagccatgtaaactggagcagggcccagcagcaggcatggcagggatggcagggaggaaggtgtgggcctggtggagctcatatccagtggggaggatgaaccatgggcacaggagcaaggaaatcagatgatacagagagctcat

SEQ ID NO: 21899 - DNA, 323 bp, Homo sapiens
  SIMILAR (2)..(244): 931254mologous to Homo sapiens mitochondrial outer membrane protein,accession number AF043250,Smith-Waterman Score=410.
acggacccccggggctgcaaccgccagcgcctcaggggccgccgaggatggggcctgcggctgcctgcccaacccgggcacattcgaggagtgccaccggaagtgcaaggagctgtttcccattcagatggagggtgtcaagctcacagtcaacaaagggttgagtaaccattttcaggtcaaccacacagtagccctcagcacaatcggggagtccaaataccactttcccatatcctcggtataaatcatgtttataagttatggaagaaccgggacattttacagaaaaaaagcaaaaagcaacaaaaaatatacgtggg

SEQ ID NO: 21900 - DNA, 930 bp, Homo sapiens
  SIMILAR (756)..(685): 581254mologous to Homo sapiens Human apolipoprotein E gene +2 frameshift mutant product,accession number W18652,Smith-Waterman Score=66.
ttgcctgaggacgtggggctttacggttctgcccccagcacgtcccggttgtgcgacctccccgcaggtcgagcccatcgccctgagcctgattctcgtaccctcagacccccaacacagcaggcgcaggggccacaggggcatcatcgggggcatcatcgccgccatcattgctactgctgtggctgccacgggatccttatctgccggcagcagcggaaggagcagacgctgcagggggcagaggaggacgaagagttaaagttcctgtccctcattctacacacccacagaccaaagcatacagtaatgacagggtcgagcccgccgccggccgatggcatctacgtgatcatcagccgatcagttttttggtgtgagatgcagggctctgagctccaggtcacaatgcacgacacccggggccgcagtcccccataccagctggactcccaggggcgcctggtgctggctgacgcccaggtggcgaacgagcgagactacgtgtgcgtgcaaagcagaggcactgaggtctcccccaacaaagggacactgtctgtgatggaggactctgcccaggagctgcaggtgggtgtggagtttgaggccagcacaaggatgcaggacaccagcgtctccttcgggtaccagctggacctgcccaaggccaacctcctcttcaaaggtgatcggcatcgcggaggaaccctgtacacagcttgcgcacgatataaagcaaggcgcacccgcagctcctcgatactctctccgagcatggcctgcacctcgccacgatacttaaccaagcgtcctcttactttctccatattctctcccagccggtctttctatgcctgcaactccttagacaaccgtgcccgcatctcctccgccaccgaggtcagttgttcctccaattccgatttataa

SEQ ID NO: 21901 - DNA, 1080 bp, Homo sapiens
  SIMILAR (577)..(846): 911254mologous to Homo sapiens mitochondrial outer membrane protein,accession number AF043250,Smith-Waterman Score=430.
atgtgggatggaggttctgtgggtcaaggcagcaagtccacatcagtgaggtcaaatcctggcaccagaaatccaggacagttgaaagacaaaaagctggggccccaggccaacaggaaacaagaaactggaaaccagtgccagaatgatcaaatcaagctcatggccatggagggcaaactggaagctgccaggtttcttaagccccggcctgcaatcagcagggtgccacttttcccacattctgtaggtgaccatggggaaagtgttggcagtcagctccctgcctgcagggccgccgccaccacctgtgccggccctcgtgggactgccgccacctccgccctagcatccaggcttcaggctgccgccgctgggaggcggcctgggcgccaggaccagtgtgggtcgaggtttggagcggacccccggagctgcaaccgccagtgctgcagggggtgccgaggatggggcctgccgctgcctgcccaacccctgcacattcgaggagtgccaccggaagtgcaaggagctgtagatggaaggtgtcaagttcacagagaacaaagcgttgtgtccaagatggccatccagacccagcagtcaaagtttgtgaagtggcaggtggatggggagtaccggggctctgacttcacagtggacgtcaccctgtggaacccagacgtcttgatgggttcaggaatcctcgtagcccattacctcaagagcatcacgccttgcttggccctgggcagtgagctggtctaccaccgacggcctggggaggagggcactgtcatgtctgtagctgggaaatacacattgaacaactggttggcaacggtggatgtggagtttgaggccagtacaaggatgcaggacaccaatgtctcctttgggtaccagctggacctgcccaaggccaacctcctcttcaaaggctctgtggacagcaactggattgtgggtgccacgctggagaagaagctcccgcccctgcctttgacactggcccttggggccttcctgaatcaccgcaagaacaagttacggagtggctttggcctcaccatcagctga

SEQ ID NO: 21902 - DNA, 1689 bp, Homo sapiens
  SIMILAR (950)..(1168): 981254mologous to Homo sapiens mitochondrial outer membrane protein,accession number AF043250,Smith-Waterman Score=376.
ggcggcggcagcgggttcggttgcgcgtggcgcacggggtgggagcggagcccaggccgggagcaggcgccgccgccagcgaccatggggaacgtgttggctgccagctcgccgcccgcagggccgccaccgccgcctgcgccggccctcgtggggctgccgccacctccgccctcgccgccgggcttcacgctgccgccgctgggaggcagcctgggcgccggcaccagtacgagtcgaagttcggaacggacccccggggctgcaaccgccagcgcctcaggggccgccgaggatggggcctgcggctgcctgcccaacccgggcacattcgaggagtgccaccggaagtgcaaggagctgtttcccattcagatggagggtgtcaagctcacagtcaacaaagggttgagtaaccattttcaggtcaaccacacagtagccctcagcacaatcggggagtccaactaccacttcggggtcacatatgtggggacaaagcagctgagtcccacagaggcgttccctgtactggtgggtgacatggacaacagtggcagtctcaacgctcaggtcattcaccagctgggccccggtctcaggtccaagatggccatccagacccagcagtcgaagtttgtgaactggcaggtggacggggagtatcggggctctgacttcacagcagccgtcaccctggggaacccagacgtcctcgtgggttcaggaatcctcgtagcccactacctccagagcatcacgccttgcctggccctgggtggagagctggtctaccaccggcggcctggagaggagggcactgtcatgtctctagctgggaaatacacattgaacaactggttggcaacggtaacgttgggccaggcgggcatgcacgcaacatactaccacaaagccagtgaccagctgcaggtgggtgtggagtttgaaggccagcacaaggatgcaggacaccagcgtctccttcgggtaccagctggacctgcccaaggccaacctcctcttcaaaggctctgtggatagcaactggatcgtgggtgccacgctggagaagaagctcccacccctgcccctgacactggcccttggggccttcctgaatcaccgcaagaacaagtttcagtgtggctttggcctcaccatcggctgagccctcctggcccccgccttccacgcccttccgattccacctccacctccacctccccctgccacagaggggagacctgagcccccctcccttccctccccccttgggggtcggggggggacattggaaaggagggaccccgccaccccagcagctgaggaggggattctggaactgaatggcgcttcgggattctgagtagcaggggcagcatgcccagtgggcctggggtcccgggagggattccggaattgaggggcacgcaggattctgagcaccaggggcagaggcggccagacaacctcagggaggagtgtcctggcgtccccatcctccaaagggcctgggcccgccccgagggggcagcgagaggagcttccccatccccggtcagtccaccctgccccgtccactttcccatctcctcggtataaatcatgtttataagttatggaagaaccgggacattttacagaaaaaaaacaaaaaacaacaaaaaatatacgtgggaaaaaaaa

SEQ ID NO: 21903 - DNA, 434 bp, Homo sapiens
  SIMILAR (63)..(200): 391254mologous to Homo sapiens Human secreted protein encoded by gene 89 clone HNEBI60,accession number W74817,Smith-Waterman Score=71.
catttgttcataatgctactgccaaggaattctctctcctccaccttgtccaccttttctcctggggagtgcccagacgagcgccatctgctcctgggtcagaggagtccctgcagagtcatcgacttcctcatttccaaaagccccataggttgcactggagtcccgaggcgaagcgccgacacttcatctgcccgtcacctcccgatttttgcaatgtgtttcttctgaacaagaatgtgtgccctggaagccaactcaagtcccagacctaggtttctcgacatttccccaagtcccacctgcgtcaggttgtaggctccggggccagtccctttcgatccgcatcaaaaaacctggcgatcccctttgggcacaagagctcagggcgttggtccccgcgatcgcgactcgtgccgaattgttccagggca

SEQ ID NO: 21904 - DNA, 2142 bp, Homo sapiens
  SIMILAR (1303)..(1893): 551254mologous to Homo sapiens Neural thread protein,accession number R95913,Smith-Waterman Score=437.
ttgctgaacctcaaaggaaaaatgaattgactctttattatgaacttcccgcacacaaatcgccatctcagtgtctgtttcctagggaactgaccgatgacaaaaagcaagtgactgatgcctacggtggtctcttgaggtcaaagtaagtctaaatgtggcccagtctttcaggaatcatttaccataacaagaagataaatttccacaaagcatgccgtttgatagtagcttataatgtggaagtaaggcatcctgtcatccggccggttagctcagttggttagagcgtggtgctaataacgccaaggtcgcggggtttagaagggaaggtgaggagagtcaaaggcacatggagcattaacagttggaataaacgacagagacacggaaacctccgaggtttccagagcggacccggaaatgacgccaggggatgcaaacccttctgcccctttttgctacccctgaagcttactgttatgtggtcgagtttttctggaagtgggcttccgcgatcgcggggaccaacgccctgagctcttgtgcccaaaggggatcgccaggttttttgatgcggatcgaaagggactggccccggagcctacaacctgacgcaggtgggacttggggaaatgtcgagaaacctaggtctgggacttgagttggcttccagggcacacattcttgttcagaagaaacacattgcaaaaatcgggaggtgacgggcagatgaagtgtcggcgcttcgcctcgggactccagtgcaacctatggggcttttgggaaatgaggaagtcgatgactctgcaagggacttctctgacccaggagcagatggcgctcgtctgggcactccccaggagaaaaggtgcatcgggaagcagcctggcttgtggatggtggacaaggtggaggagagagaattccttggcagtagcattatgaacaaatgcagggctgagaaacagcatggtggccttactaagtttatggcgacagcagatggagtcttgctctgtcgcccaggctagagtgcagtggcgcgaatctcagctcactgaaacctctgcctcccgggttcaagtgattctcctgcctcccgaataactgggatttcaggtgcccgccaccatgcccagctaattttttgtatttttagtagagatgaggtttcaccatgttggccaggctggtctcaaactcctgacttcgggtaatccacccaccttggtctcccaaagtgctgggattacagtcgtaagccaccgccccggcccccaagaccaatcatttctttcttttttttttttgagatggagtctcgctcttgtcgcccaggctggaatgcagtgggacgatctcagctcactgcaacctctgcctcccgggttcaagtgattctcctgcctcagcctcctgagaagctgggattacgggtgcccaccaccacgcctggccaattttgtgtgtgtgtgcgtttgtgttttagtagagatgggggtttcaccatgttggccaggcttggtctcgaactcctgacctcaggtgatctgccccccttcggcctcccaaagtgcttgggatttacaggcatgagccactgcgctaggccaatcttttttttttcttgagatggagtcttgctttgccacccaagctggagtgcagtgttgcgatctcagctcattgcaacctctgcctcccaggttcaagtgattctcctgcctcagcctcctgagtagttgggactacaggcacatgccaccatgcctggctaatttttttttggcatttttagtagagacagggtttcatcatgttggccaggcaggtctcaaactcctgacctcaagtgatccacctgtctcagcctcccaaagtgctgggatttacaggcatggagccactgcacccggcctaaaaatgattacttcttataaaaaggatttcttccccttcacaacactcagcttcctttttctttcctggtaactatgggtctggtgttgtcataaggatctaccttccacatgctggacagtgggggttgctgcttgaggagactcaggccagatacagatcactgtggggaacactaagcttacttggttagagcacggcactaacatttctgcctct

SEQ ID NO: 21905 - DNA, 421 bp, Homo sapiens; identical to SEQ ID NO: 4347
  SIMILAR (189)..(419): 961254mologous to Homo sapiens HERC2,accession number AF071172,Smith-Waterman Score=380.

SEQ ID NO: 21906 - DNA, 417 bp, Homo sapiens
  SIMILAR (293)..(412): 411254mologous to Drosophila melanogaster CG9812 gene product,accession number AE003460,Smith-Waterman Score=70.
tgttcagccagagagctgttcttcagattctcacttgtaggcccacttaatcagggtcaggtcttagagtctccaagttttatctagtttatcccctgcttttagctagaatatacttcaaagcatgatcctactttacagttcaaatcttaacactgttctgcttttataaacagctgcttgtcctaatcttaaaaggtcttcaggaaaaagacggtttgctggtttccttgataaaatatccccgagcatctcattccttctctttgtgcatctgtttctctttgggtaacataagcactcctggagaagttgcatcttggctgccggcgctgccctccagtccccggaatcctgggactcaggttcgagctgtcgctgtcgctgtcgctgcgcctgtgaagcgcccctcgtgcc

SEQ ID NO: 21907 - DNA, 185 bp, Homo sapiens
  SIMILAR (5)..(106): 401254mologous to Neurospora crassa related to transcription factor TAF25,accession number AL513409,Smith-Waterman Score=61.
atggcaggggaggcctcggaatcatggcgagaggcaaaaggcacttcttatgtagcagcagcaagagaaaatgaggaagatgcaaaagcagaaccccccacccccggaataaaaccatcagatctcgctggtgttgtctgtggcttttccaggcacacgatgcaagttggatctgccattctggg

SEQ ID NO: 21908 - DNA, 516 bp, Homo sapiens; identical to SEQ ID NO: 4349
  SIMILAR (1)..(516): 981254mologous to Homo sapiens HERC2,accession number AF071172,Smith-Waterman Score=876.

SEQ ID NO: 21909 - DNA, 2610 bp, Homo sapiens; identical to SEQ ID NO: 4352
  SIMILAR (1303)..(1854): 891254mologous to Mus musculus Herc2,accession number AF071173,Smith-Waterman Score=870.

SEQ ID NO: 21910 - DNA, 2178 bp, Homo sapiens
  SIMILAR (771)..(872): 571254mologous to Volvox carteri f. nagariensis hydroxyproline-rich glycoprotein DZ-HRGP,accession number AJ242540,Smith-Waterman Score=104.
tcaccaccagctgcgaactctttccatagagtcctgagtgtggacattgcaagcagctctcaccatgcacagtcctgttttgcaaggtaaatttccactggaggatcttactcctgattcaggggcatagaatctgctggaggaggccacattcttgcagcaaattatactatttagcagcatcaataagtcctttaatatggaagatgtcacactggaaataggggacaggggagggcttcctagagcaggccacatttgagctggacctagaaggatgcgcagaatatcagcatgggcagtcagcactcctctgactgattcaccttcaccagggcaccagcctgcagtgaagtagctggggctggttccttttagtgacacccaccaccccttgcccttccaggtattgtccacagatgacacctcctcctcctcctcctgctcctcctcctgctctgcctcctcctcctccccctgctcctgcttctcctcctcttcctcctgctccttctcctcctcctcatgctcctcctcaagctcttcctcctcctcctgctcttcctcctcctcctcctgcttctcctcctcttcttcctcctgctctttctcctcctcttcctgctcctcctctccttctgctcctcctgcttctcctcctcctgctcctcctcctccacctgctcctcctccttctcctcctcctgctcctcctccttctgctccttcttctcctgctcctcttcctcctgctcctgcttctcctcctttctcctgctcctcctcctcctgctcctcctcctgctcctcatcctccttctcctcctgctcctccttgtcctcctctgcccaggccgaggggtccctccgtgccccaagagaaagttcaccaagtttagatcccagtgccccgcagcgggtgaaggtggtcccgccccaggccggatctggccacagggctggcggcgcgctggaaaaccgcccacgtgggaagaagccctggctgcatttccgccctggactgcgctcccgcctgccagcgcggtccctgcgcagccgccccgcgcccactaggtggcgcctgcgctctagtgggcgcttcacaggcgcagcgacagcgacagcgacagctcgaacctgagtcccaggattccggggactggagggcagcgccggcagccaaggtaggattcctgagccccgggcgtctccctggagcctctgaggtcggggtggacagcggggcggccgctgggcaccgcttgcggtccccacccgaatttcatcttgaattgtactcccataaatcccatgtgttgtgggagggacccagtgggagataatttgaatcatgggggcggtttcccccatactgttctcttggtagtgaataagtctcacgagatctgatggttttattccgggggtggggggttctgcttttgcatcttcctcattttctcttgctgctgctacgtaagaagtgctttttgcctctcgccatgattcagaggcctccttgtgggtatgcagtaagccaccccaaaatacgaggagagtagatatcagtgaactgcacgcaacatctgtgattactgatttgcagaagtccttaaggacaggacaggatgtgtctctggacaaagctgcctctgcagcgaggcggcagggaagggtgcgtgccctttcatgaccttcatgagcagcgtgatccactgcggggagctgagggcgccgcacacctgcggcgtgagagcgatgctccgcacaaaccccagcatgcaccagctccggtgttgctccctgtacaccagcctgtttggagaagggggaaaaagccctgggttgcattttccgccttgaattgcgttcccgcttgcaagcgcgttccttgcgcagccgccccgcgcccattaggtggggcctgcgttttagtgggcgcttcacaggcgcagcgacagcgacagggacagctcgaacctgagtcccaggattccggggattggagggcagcgccggcagccaaggtaggattcctgagccccgggcgtctccctggagcctttgaggtcggggtggacagcggggcggccgctgggcaccgcttgcggtaacaagggctttagctgccgctgtgttctgatgactctgttgggaggaaaattcttcctcttccat

SEQ ID NO: 21911 - DNA, 2004 bp, Homo sapiens
  SIMILAR (625)..(1521): 531254mologous to Homo sapiens protocadherin gamma B5 short form protein,accession number AF152521,Smith-Waterman Score=756.
atgatagaagatataaatgataacccacctcattttccccaaaatagcattgttttacaaatcaatgaactagcaattccaggcattcggtttggcctggaatctgctatagatgcagatgtagggcctcactctctccagagttaccagctcagttctaatgaacatttctctctgatgatggacaagactaaaggcaagaacgctccagaattagtgctggagaagcccctgggccaggagcaacagagctctcatctcctggtcctggaagcaatggacatgggtgacccagtcccaactggcactgctgcaattcaaattgaggtcactgatgccaacgataatgccccagtttttagccaggatgtatacaaagtcagccttagagagaatgtgcccccaggcacctctgtactaaaggtgacagccactgaccaggatgagggtgtcaatgcggagatcacctactctttcaaatccctacgagatgatattggaaatatgtttgtgctagaccatcaaaatggggaaattaaatccaaagacttaatagacttcgaatttcgtagcagttataccatgagagtagaagctaaggatggtggaggcatgaccagcgaatgtaaaattatagtagaaatccagatccgctacaggattcccgaggaaatgcccaagggctccgtagtggggaacctcgccacggacttggggttcagcgtccaggagttaccgactcgaaaactgcgcgtcagttcggagaagccttacttcaccgtgagcgcagagagcggggagttgcttgtgagcagcaggctagacagggaggagatatgcgggaagaagccagcttgtgctctggaatttgaggctgttgctgaaaatccactgaacttttatcactacccgcctttccgggatgaagagttaaaagtaaaagttaatgaaaatgcggctgcagggacacggttagtgcttcccttcgcgcgggatgcggatgtgggtgtgaactctctccggagttaccagctcagctccaatctgcacttctctctggatgtggtaagcggaactgatggacaaaagtatccggagctggtgttggaacagcccctagaccgcgagaaagagactgttcacgacctcctcctcacagctttagatggcggagacccggtactctccggcaccacgcacatccgtgttacggtcctcgacgcaaacgacaatgcgcccctgttcaccccatccgagtacagcgcttccacggtcattcactatgagatcccggaggaaagagagaggggtttcgctgtgggcaacgtggtcgctaaccttggtttggatctcggtagcctctcaccccgcagggtccagctggtgtctggagctagccgaagattctttgaggtgaaccgggagaccggagagatgtttgtgaacgaccgtctggatcgagaggagctgtgtgggacactgccctcttgcactgtaactctggagttggtagaggagaacccgctggagctgttcagcgtggaagtgagcgcgcaggatgctgatgtgggaagcaactctttacaaacgtatgagctgagccgaaatgaatactttgcgcttcgcgtgcagacgcgggaggacagcaccaagtacgcgcagctggtgttggagcgcgccctggaccgagaacgggagcctagtctccagttagtgctgacggcgttggacggagggaccccagctctctccgccagcctgcctattcacatcaaggtgctggacgcgaatgacaatgcgcctgtcttcaaccagtccttgtaccgggcgcgcgtcctggaggatgcaccctccggcacgcgcgtggtacaagtccttgcaacggatctggatgaaggccccaacggtgaaattatttactccttcggcagccacaaccgcgccggcgtgcggcaactattcgccttagaccttgtaaccgggatgctgacaatcaaaggataa

SEQ ID NO: 21912 - DNA, 9616 bp, Homo sapiens
  SIMILAR (2428)..(4866): 971254mologous to Homo sapiens protocadherin gamma C4 short form protein,accession number AF152525,Smith-Waterman Score=4070.
atggtcccagaggcctggaggagcggactggtaagcaccgggagggtagtgggagttttgcttctgcttggtgccttgaacaaggcttccacggtcattcactatgagatcccggaggaaagagagaagggtttcgctgtgggcaacgtggtcgcgaaccttggtttggatctcggtagcctctcagcccgcaggttccgggtggtgtctggagctagccgaagattctttgaggtgaaccgggagaccggagagatgtttgtgaacgaccgtctggatcgagaggagctgtgtgggacactgccctcttgcactgtaactctggagttggtagtggagaacccgctggagctgttcagcgtggaagtggtgatccaggacatcaacgacaacaatcctgctttccctacccaggaaatgaaattggagattagcgaggccgtggctccggggacgcgctttccgctcgagagcgcgcacgatcccgatgtgggaagcaactctttacaaacctatgagctgagccgaaatgaatactttgcgcttcgcgtgcagacgcgggaggacagcaccaagtacgcggagctggtgttggagcgcgccctggaccgagaacgggagcctagtctccagttagtgctgacggcgttggacggagggaccccagctctctccgccagcctgcctattcacatcaaggtgctggacgcgaatgacaatgcgcctgtcttcaaccagtccttgtaccgggcgcgcgtcctggaggatgcaccctccggcacgcgcgtggtacaagtccttgcaacggatctggatgaaggccccaacggtgaaattatttactccttcggcagccacaaccgcgccggcgtgcggcaactattcgccttagaccttgtaaccgggatgctgacaatcaagggtcggctggacttcgaggacaccaaactccatgagatttacatccaggccaaagacaagggcgccaatcccgaaggagcacattgcaaagtgttggtggaggttgtggatgtgaatgacaacgccccggagatcacagtcacctccgtgtacagcccagtacccgaggatgcccctctggggactgtcatcgctttgctcagtgtgactgacctggatgctggcgagaacgggctggtgacctgcgaagttccaccgggtctccctttcagccttacttcttccctcaaagaattacttcactttgaaacccagtgcagacctggatcgggagactgtgccagaatacaacctcagcatcaccgcccgagacgccggaaccccttccctctcagcccttacaatagtgcgtgttcaagtgtccgacatcaatgacaaccctccacaatcttctcaatcttcctacgacgtttacattgaagaaaacaacctccccggggctccaatactaaacctaagtgtctgggaccccgacgccccgcagaatgctcggctttctttctttctcttggagcaaggagctgaaaccgggctagtgggtcgctatttcacaatacatcgtgacaatggcatagtgtcatccttagtgcccctagactatgaggatcggcgggaatttgaattaacagctcatatcagcgatgggggcaccccggtcctagccaccaacatcagcgtgaacatatttgtcactgatcgcaatgacaatgccccccaggtcctatatcctcggccaggtgggagctcggtggagatgctgcctcgaggtacctcagctggccacctagtgtcacgggtggtaggctgggacgcggatgcagggcacaatgcctggctctcctacagtctcttgggatcccctaaccagagcctttttgccatagggctgcacactggtcaaatcagtactgcccgttccagttccaagacacagattcacccaggcagactctcacggtcttgatcaaagacaatggggagccttcgctctccaccactgctaccctcactgtgtcagtaaccgaggactctcctgaagcccgagccgagttcccctctggctctgccccccgggagcagaaaaaaaatctcaccttttatctacttctttctctaatcctggcttctgtggggtttgtggtcacagcgttcggagtaatcatattcaaagtttacaagtggaagcagtctagagacctataccgagccccggtgagctcactgtaccgaacaccagggccctccttgcacgcggacgccgtgcggggaggcctgatgtcgccgcacctttaccatcaggtgtatctcaccacggactcccgccgcagcgacccgctgctgaagaaacctggtgcagccagtccactggccagccgccagaacacgctgcggagctgtgatccggtgttctataggcaggtgttgggtgcagagagcgcccctcccggacagatccgctacccggtcccagaggagtcacaggaagggacttttgtagggaatgtcgctcaagatttcctgctggatacggacagtctgtcagctcgcaggctgcaggtcgctggagaggtgaaccaaagacacttccgtgtggatttggacagcggagccctgctcatcaagaacccaatcgaccgagaggcactgtgtgggctcagtgccagctgcatcgtgcccctggagtttgtcaccgaaggtcctttggaaatgtaccgagcagaggtagagatcgtagatgtgaatgatcacgccccccgttttccgcggcagcagctggacttggaaattggggaggcagctcctccaggacagcgtttcccgttggaaaaggctcaggatgcagatgtggggagcaattcgattagcagctataggctgagctccaatgaacactttgcactggatgtgaagaagcgcagcgacggcagcctggtcccagagctgctcctggagaagcctttggatcgagagaagcaatcggactaccgcctggtgctgactgctgtcgatggagggaacccgccgagatctggcaccgcagagctccgggtatccgtgctggacgtaaacgacaacgccccagccttccagcaatccagctacaggattagtgtgttggagagcgcaccagcgggcatggtgctcatccagctcaatgcctcagacccggacctgggtcccagtggtaacgtcaccttttatttcagtggtcatacccctgatcgtgtaagaaacctctttagcctgcaccccactactggaaagcttactcttttggggcccctagactttgagagtgagaattactatgaatttgatgtgcgggctcgcgatgggggttctccagccatggagcaacattgcagccttcgagtggatctgctggacgtaaatgacaatgccccttacatcacagtgacctcagagcttggaaccctccccgagagtgcagaacctggcactgtggtggcacttatcagtgtgcaggatccagactcagggtcaaacggagatgtgagcctccgcattcctgaccacttgccatttgccctcaagtctgccttcaggaaccagttctccctggtgactgctggacccttggatcgagaggccaaatctagctatgacatcatggtcactgcttctgatgctgggaaccctcctctcagtacccacagaactattttcctcaatatttcagatgtgaatgataatccaccctctttctttcagaggtcacatgaggtgtttgttcctgagaacaatcgcccaggggacctgctttgctcccttgcagcctctgacccagactctggcttgaatgcgcttatctcctactcactcctggagcccaggaatcgagatgtatcagcttcctctttcatctctctgaacccccagacaggagctgttcatgctactcgatcctttgactatgagcaaacccagacactgcagtttgaggtgcaggcccgggatcggggcaacccaccccttagcagcactgtaacagttcgtctatttgtgctggacctcaatgacaatgctccagctgtgctccgtcctcgggcccggcctggttccttatgtccccaagcactgcctccatcagttggtgctggccacctaatcacaaaggtgactgctgtggacttggattcaggttacaatgcttgggtttcctatcagctcctggaggccccagatcccagcctgtttgcagtctctcgatatgctggggaggtgcggacggctgttcctatcccagctgacctcccaccacagaagctggtcattgtggtaaaggatagtggtagtccaccactctctacctctgttactctcttagtgtccttagaggaagacactcatccagttgtcccagatcttcgagaatcttcagctccaagggaaggagaatctcgtctaaccctctacttggctgtgtccctagtggcaatttgctttgtctcctttggctcattcgtggcactactctctaagtgtcttcgtggggcagcctgtggagtcacatgctttcctgctggcacctgtgcctgtctcaccagatctcgaaggagggaggggcttcccccttccaatgggatcctccgaatccagctagggtcagatgaccctatcaagtttgttgatgtgggaggccactctcatggctgtacacccttggcttctgcacccactcggagtgatagcttcatgatggtgaagtcacccagtgcacctatggcaggggagcctgttcgcccaagctgcccaccctctgatcttctctatgggctagagcttcgttactcagtggtggaggagtctgagccggggacgctggtggggaatgttgctcaggatctgggcttaaagatgacagatctgttgagccggcggctgcaattgggctctgaggagaatgggcgctatttttccctgagcttgatgagtggtgccctggcagtgaatcaaaagattgaccgagaaagcctatgtggagccagcaccagctgcctgctgccagtgcaggtggtgactgaacaccccctggagctaatccgtgtagaggtagagatcctggatctcaatgacaactctcctagctttgccacccctgagcgagagatgcgcatctcagaatcagcagcatctggggcacgattcccactggacagtgcccaggatccggatgtgggcaccaatactgtgagcttttacactctaagccccaacagccacttctctctgaatgtgaagaccctaaaagatgggaagccattcccagagctggtgctagagcagcagctggatcgtgaagcccaggcaagacatcagctggtgcttactgctgtggatggggggaccccagcccgctcagggaccacccttatctctgtcatcgtgctggacatcaatgataatgctccaaccttccaatcctcagttctacgtgtgggaatcccagagaatgcacccattggtactctgctgctccgcctcaatgccactgatccagacgagggcaccaacggccaactagactattcttttggagaccacacatctgaggcagtgcggaacctctttggcctagaccctagcagtggggcaatccatgtgttgggtcccatagactttgaggagtcacgtttctatgaaattcatgcaagagcccgtgaccagggacagcctgccatggagggccactgtgtgattcaagtggatgtgggggatgtcaatgacaatgccccagaggtgctattggcctctttggccaaccctgtcctagagagcacaccagtgggcacagtagtggggttgtttaatgtgcgagaccgggactcaggtagaaatggtgaagtgagccttgatatctctccggacctgccatttcagattaagccttctgagaaccactactcgctgctaaccagccagcctttggaccgggaggccacatcccactatatcatcgagctgctggccagcgatgctggttcaccttccctacacaaacatctcaccatcaggctcaacatttcagatgtcaatgacaatgcaccccgcttcaaccagcagctttacactgcttacatcctagaaaaccggcctccgggctcccttctttgcactgtggctgcctcagatccagacactggggataatgcccgcctcacctactccattgtaggaaatcaggttcagggagccccagcctcctcctttgtgtatgtcaacccagaggatggacggatctttgcccagcgtacctttgactatgaattgctgcagatgctgcagattgtggtgggggttcgagactccggctctcccccattgcatgccaacacatctctgcatgtgtttgtcctagacgagaatgataatgccccagctgtgctgcacccacggccagactgggaacactcagccccccagcgtctccctcgctctgctcctcctggctccttggtcaccaaggtgacagccgtggatgctgatgcaggccacaatgcgtggctctcctactcactgttgccacagtccacagccccaggactgttcctcgtgtctacacacactggtgaggtgcgcacagcccgggccttactggaggatgactctgacacccagcaggtggtggtcctggtgagggacaatggtgacccttcactctcctccacagccacagtgctgctggttctggaggatgaggaccctgaggaaatgcccaaatccagtgacttcctcatacaccctcctgagcgttcagaccttaccctttacctcattgtggctctagcgaccgtcagtctcttatccctagtcaccttcacctttctgtcagcgaagtgccttcagggaaacgcagacggggacgggggtggagggcagtgctgcaggcgccaggactcaccctccccggacttctataagcagtccagccccaacctgcaggtgagctcggacggcacgctcaagtacatggaggtgacgctgcggcccacagactcgcagagccactgctacaggacgtgcttttcaccggcctcggacggcagtgacttcacttttctaagacccctcagcgttcagcagcccacagctctggcgctggagcctgacgccatccggtcccgctctaatacgctgcgggagcggagccagcaagccccgcccaacacggactggcgtttctctcaggcccagagacccggcaccagcgggccatacactggctttgaagcagaattcaccattgaacctggaagccccaccaactgcctctcatgtgtcctctggggtgagcaccttacccctgcctcaactcccattccatcaaatgagaggcttagtggcctggaatacatgtgggagctcttggagatatggaggagaagctcccaaaatggcgatgacaccggcacctggcccaacaaccagtttgacacagagatgctgcaagccatgatcttggcgtccgccagtgaagctgctgatgggagctccaccctgggagggggtgccggcacccatgggattgagcgcccgctacggaccctagttcaccctgcagcacgtgctgcagggtgaactggggtccgactaccgccagaatgtctacatcccaggcagcaatgccacactgaccaacgcagctggcaagcggggatggcaaggccccagcaggtggcaatggcaacaagaagaagtcgggcaagaaggagaagaagtaacatggaggccaggccaagagccacagggcagcctctccccgaaccagcccagcttctccttaccttgcacccaggccttcagagtttcagggcttaacccccagaatactggttaggggccaagggccctggttcccttgggaaacagaaacaagtgcccagtcagcacctaccccttcccccccagggggttgaatatgcaaaagcagttccgctgggaacccccatccaatcaactgctgtacccatgggggtagtggggttactgtagacaccaagaaccatttgccacaccccgtttagttacagctgaactcctccatcttccaaatcaatcaggcccatccatcccatgcctccctcctccccaccccacttccaacagttcctctttcccgagttaaggtggttggggtgttgaagtaccaagttaacctacaagcctcctagttctgaaaagttggaagggcatcatgacctcttggcctctcctttgattctcaatcttcccccaaaagcatggtttggtgccagccccttcacctccttccaagagcccaagatcaatgctcaagttttggaggacatgatcaccatccccatggtactgatgcttgctggatttagggagggcattttgctaaccaagcctctttcccaacgccctggggaccagtcttctgttttgtttttcattgttttgacgttttccactgcaatgcctttgacttcccccacctcctcctcaaacaaggaggattccattgcatgtttccaaggacagtatggggggttggtaaggttaagggaaggggaagtgtgtggatgtggatggtgggggcatggacaaagcttgacacatcaagttatcaaggccttggaggaggctctgtatgtcctcaggggactgacaacatcctccagattccagccattaaaccaataactaggctgggacccttcccacttacataattagggcttcagccagggcaggccagctttgggctgagctaacaggaccaatggattaaactggcatttcagtccaaggaagctcgaagcaggtttaaggaccaaggtccccttgagaggtcagaggggcctctgtgggtgctgggtactccagaggtgccactggtgggaagggtcagcggacccccagcaggaagggtgggccagccaggccatttcttagtccctgggttggggaggcagggagctaggggcagggaccaaattgaacagaaagtttttagcccaggatggggctttctttcaacagggccccctgcccctcctgaagcctcagtcccttcaccttgccaggtgccgtttctcttccgtgaaggccacttgcccaggtccccagtgcggccccctagtggccatagcctggttaaagttcaccaagtgcctccttgtgcaaaaaaccttcttctcccacccccttctgccccctgggtccccggccaatcccaagcggggctgcccagagaaccccaaaacctgcccttacaagtagtgtagcgccccctcccatctttcgggctggtgtagaatagccagttagtgttagttgcggtgtgctttttacgtgatgggcgggtggggcagcgggcggcggggttccgcgcagccgttctgttccttgattctgcccgcggcggcccgtgttgtgttttgtgctgtgtccacgcggctaaaggcggaccccccctcccccgtactgacttctcctataagcgcttctcttcgcataagtcacgtagctcccaccccaccctcttcctgtgtctcacgcaagttttatactctaatatttataatggctttttttcttcgacaaaaaaataataaaacgtttcttctgaaaaaaaaaaaaaaaaaaa

SEQ ID NO: 21913 - DNA, 560 bp, Homo sapiens; identical to SEQ ID NO: 15466
  SIMILAR (1)..(33): 1001254mologous to Homo sapiens A human proliferation and apoptosis related protein,accession number Y84901,Smith-Waterman Score=61.

SEQ ID NO: 21914 - DNA, 1946 bp, Homo sapiens
  SIMILAR (378)..(623): 431254mologous to Homo sapiens unknown protein,accession number M22332,Smith-Waterman Score=191.
ataatgggaagattgatttgaatgtgatgatggatgaagttaaaaatgttacagagtcgacctgcaggcatgcaagcttggcttgcggttctttcacaaaaaccttcgttccaaggcttgttggccttggaatacgccccccagtaaaaattagggtggaagggcccttgatgtcaaccaagccctttgccacctcagttggggacccctctccacaagtccaggaggaagaggaggaagaaaaggtgaagaggaaggcccagagtgcccttaagaaaaaactcacaaaacctgtcgctgtgggcgtggatgtggtaaaaggggaacactctaacactgctggtgggagtgtaatctattacaaccactatggaaaatggtgtggagagtggcttaaagaactaaaagtagaactactatgtgatctagcagttccactactggtatcaacccagaggaaaagaagtcattatatgaaaaagatacctgtacacacgtttatggcagcacagctcgcaattgcaaaaaagtggaaccaacccaaatgcccatcaatcaacaagtggttacagaaactgtggtatatttatatgatggaatactattcagccataaaaaggaatattaacggcatttgcagcaacctggatgagattggagactattattctaagccaaggggatcctctagagtcgacctgcagtcgatcgcaagcgaaccgacaagagataacaagtgtgccgaaagcatagaggaaggagaacccttgtacactgtggttggaaatgtaaagtggtataaccttaacagaaaacagtatggatgttcctcaaaaaattggagcagaactaccatacgattcagcaatcagtggggtcgggccagggaacaggggatgtggagatgctgccacctgggcttggtcggcccattcgtgggcaccgatggcggcaggagcccgggcagctggagggcaggaggactctcagggaggggagagtcagctgcacagaatcagagccggagggcgtggctccaggacacagagggtggccacggggaggatgagatgccctctgctgatggggatgagaggcgtctgatttgggctttgggggtcagccgtggactcctgtgggaccctcagcagagacatcctaaagtctcccaacaagctggcgacacaaggagggtgccttggctaaaagctgtgaggggatcctcacaaccatcacaccccgggttgtgtttttccggacccattgggtgcctgtggcccacagcttcagcagatttaatcattccctgcttgctggctctgaagagagcagctgatcccgacaagagggattctcccagcacagcgcaccgactctggaagggtgcctggctaaaaggctgtgatcaccgggccaagtatgcccagtcccaagttctgcctgcagaagttccccgggccacctgttcacttaccgtgcaggaagtgcctctcactggccagcagctgcaccagtgcccagaatgcatcctcctcaggaaattaaaggaggaacaaggcggcgatgtggctcagagcacctgggggaaggggtgtctgtggcccacagcttcagcagatttaatcattccctgcctgctggctctgaagagagcagctgatcccgacaagagggattctcccagcacagcgcaccgactctgggtcgacagatacctcatacaagagagctccatttggcatcagcgtggtgcccctctgggacgaagcttccagaggaaggagcagggagcaatctttgctgttctgcaggcttcactggtgacacccaggcaaacagggtctggagtggacctccaacaaacttcagcagacctgcagaagaggggcctgactgttagaagaaaaactaacaaacagaaagcaacaacatcaacatcagcataa

SEQ ID NO: 21915 - DNA, 469 bp, Homo sapiens
  SIMILAR (430)..(26): 361254mologous to Streptomyces coelicolor A3(2) putative integral membrane protein,accession number AL096844,Smith-Waterman Score=101.
attcccgggtcgacgatttcgtaagacgccgaggcctgggccatggaactggcggacgtgggggcgtgagccagctcgcagggtgcgccgcagccagaggagccagcggcctccttgggtgtaaatgagaagggtggggcaggcggacgctcggggcggcggccactggggcgcgaccgtccccgccccactcggctcctctaagagagggctgcctccctctgccttgtgttacgcggcgggtacctctagaggaatggcttcacccagcaggagtagggtggggcgcgtccacactacaaatacgtgtcgagggtttatctgcgccgtcctttcctctgtgaggggcgaggtggggcgggaatccctcagccagcccgacgaaaactgcagaggcttctgggccttttaactttggagaagttgaggaccttgtcgctcatttggcagaaggtgggacccggatctc

SEQ ID NO: 21916 - DNA, 2566 bp, Homo sapiens
  SIMILAR (154)..(2289): 901254mologous to Homo sapiens DNA polymerase iota,accession number AF140501,Smith-Waterman Score=3242.
atggagaagctgggggtggagccggaggaggaaggcggcggcgacgacgaggaagacgccgaggcctgggccatggaactggcggacgtgggggcggcagccagctcgcagggtgcgccgcagccagaggagccagcggcctccttgggtgtaaatgagaagggagttcatgatcaagtgttgcccacaccaaatgcttcatccagagtcatagtacatgtggatctggattgcttttatgcacaagtagaaatgatctcaaatccagagctaaaagacaaacctttaggggttcaacagaaatatttggtggttacctgcaactatgaagctaggaaacttggagttaagaaacttatgaatgtcagagatgcaaaagaaaagtgtccacagttggtattagttaatggagaagacctgacccgctacagagaaatgtcttataaggttacagaattactggaagaatttagtccagttgttgagagacttggatttgatgaaaattttgtggatctaacagaaatggttgagaagagactacagcagctgcaaagtgatgaactttctgcggtgactgtgtcgggtcatgtatacaataatcagtctataaacctgcttgacgtcttgcacatcagactacttgttggatctcagattgcagcagagatgcgggaagccatgtataatcagttggggctcactggctgtgctggagtggcttctaataaactgttggcaaaattagtttctggtgtctttaaaccaaatcaacaaacagtcttattacctgaaagttgtcaacatcttattcatagtttgaatcacataaaggaaatacctggtattggctataaaactgccaaatgtcttgaagcactgggtatcaatagtgtgcgtgatctccaaaccttttcacccaaaattttagaaaaagaattaggaatttcagttgctcagcgtatccaaaagctcagttttggagaggataactcccctgtgatactctcaggaccacctcagtcctttagtgaagaagattcatttaaaaaatgttcatctgaagttgaagctaaaaataagattgaagaactacttgctagtcttttaaacagagtatgccaagatggaaggaagcctcatacagtgagattaataatccgtcggtattcctctgagaagcactatggtcgtgagagtcgtcagtgccatattccttcacatgtaattcagaaattagggacaggaaattatgatgtgatgcccccaatggttgatatacttatgaagctttttagaaatatggtgaatgtgaagatgccatttcgccttacccttctaagtatgtgcttctgcagccttaaagctgtaaatactgctacgacacggcttattgattattatttaatgccaacaatatcaattacttcacgctctggcaagcacagttttaaaatgaaagacactcatatggaagattttcccaaagacaaagaaacaaaccgggatttcctaccaagtggaagaattgaaagtacaagaactagggagtctccactagataccacaaatttttctaaagaaaaagacattaatgaattcccactctgttcacttcctgaaggtgttgaccaagaagtcttcaagcagcttccagtagatattcaagaagaaatcctttctggaaaatctagggaaaaatttcaagggaaaggaagtgtgagttgtccattacatgcctctagaggagtattatctttcttttctaaaaaacaaatgcaagatattcccataaatcctagagatcatttatccagtagcaaacaggtatcctctgtatctccttgtgaaccgggaacatcaggctttaatagcagtagttcttcttacatgtctagccaaaaggattattcatattatttagataatagattaaaagatgaacgaataagtcaaggacctaaagaacctcaaggattccactttaccaaattcaaaccctgctggtgtctgcttttcattccatttcccaacttgcagagtgagcaacttttctccagaaaccacactacagatagccataagcaaacagtaggcaacagactcttcatgaaggacttacaggaaaataggaggagccagattctgttgatgaggaaaattacctttccccctcctgacattggacccctcaagttttcctatgaacctccccgaagcagtacaaaggggaacctgcctggcagagtggaagagagccgggatcagatttcccacattggacataaataagcatattcagcaaaaaggtctgaaaagccaagggaatacccattattttcggattagcggtttattaagctcttcctatattaaacactaatagatattcaataacggagtaaactgttccagataaagcaagaatagttgcaagaagtaaattctggcacaaagcgtaaaaatataacagaagaaataatgtaaaatacttatcttttatgtctaaagccattttatatatacttttcaataaaaagaatatcatggtcaaaaaaaaaaaaaa

SEQ ID NO: 21917 - DNA, 434 bp, Homo sapiens
  SIMILAR (2)..(124): 971254mologous to Homo sapiens RLIP76 protein,accession number L42542,Smith-Waterman Score=195.
ggagcagtttctgcgccggcagattgcctcagaaaaagaagagattgaacgcctcaaagctgagattgctgaaattcagagtcgccagcagcacggccgaagtgagactgaggagtactcctctctccttctgcagttctaaaccacagtctataagcccgagtcaccaggacggcctgtctggccacagacaggggctgcctgtggagcctgcccaccggcccccggcagtgcagtccagcggggaggaggctgcccgttcctgccagttcctcactgcggggaccagcaaaggccttctcactgggttggtcaaaggtagtcaccttggcctggtgcatccacagaggatgttgttcaaaccaaaaatcttttaaacgactgaccttccttaaaaacagaatgactcccaatgcttgttgggctagaatgac

SEQ ID NO: 21918 - DNA, 489 bp, Homo sapiens
  SIMILAR (279)..(214): 541254mologous to Homo sapiens C2H2 type Kruppel-like zinc finger protein splice variant b,accession number AF085244,Smith- Waterman Score=50.
  misc_feature (1)...(489): n = a,t,c or g
aattccgnagcacggagcctggcctgtcttcgcggtnctgtcactnctgacagagtgcgcctgcagcacgttgccttccaggggcccagctggcttggtttggcaaatgccttctcacaagtntcacatttaaacactcttgtttaagagcatatatatggcttattcaggcaaggagacgtgtacattctagcccaagcaagcaatcggagtcattctgtttttaaggaaggtcagtcgtttaaaagatttctggtttgaacaacatcctctgtggatgcaccaggccaaggtgactacctttgaccaacccagtgagaaggcctttgctggtccccgcagtgaggaatggcaggaacgggcagcctcctccccgctggactccagacggccacgcaggctgctcagatggacgtctccttcctatccctgctgggcgatgctttgccggctccttgccctnctttggctgctctttagctgcttttg

SEQ ID NO: 21919 - DNA, 1056 bp, Homo sapiens
  SIMILAR (195)..(296): 471254mologous to Homo sapiens Fragment of human secreted protein encoded by gene 10,accession number Y36430,Smith-Waterman Score=77.
tcagcgctgcgcctgctgtggccgccgcgagccacgccctctgggatctctggtaccgtcactcttgcttgtgccttccacaccttctcggtgcagatccctatgggggagctgcctcacgttctctgactggtcagagcagcgcctggtgggtgttccctggcccactctcctctctccttctgcagttctaaaccacagtctataagcccgagtcaccaggacggcctgtctggccacagacaggggctgcctgtggagcctgcccaccggcccccggcagtgcagtccagcggggaggaggctgcccgttcctgccagttcctcactgcggggaccagcaaaggccttctcactgggttggtcaaaggtagtcaccttggcctggtgcatccacagaggatgttgttcaaaccagaaatcttttaaacgactgaccttccttaaaaacagaatgactccgattgcttgcttgggtttgtacccctcacctctgcagacacggggagaaccccggacccctggcatgcatgctggcggcggcatgcctcccttccacaagcccatgctgctgcagagggagcctgtgtttgcaaaacccagtggactgggctgggtctgctgtctgagcagctcctggctccggtgggaaccagtgtaggcaggaaagtctgggttttcttcataaccttcaaaagcagtcttgttgaacttcagttttttcattggcaaaatggtggagataatcttgatttccaaaggctgcttagataaataatggctagtaagtacctggcatagggcttttggcgtcatactccaattcattttccagcctcctactgatccctgcaggccacctaccactcgcaaagggacacggcttgctagtaaaagactgagccaagcggatgggtctggggcagctgtgccctgtccatgactgaccctggctgcccccagggtggcagtgatgccgcagcagccactacagccacaagctgtgacccccacaagccgtgaccaccacaagccatgacgaccactagtggtcat

SEQ ID NO: 21920 - DNA, 1580 bp, Homo sapiens
  SIMILAR (690)..(1502): 571254mologous to Homo sapiens RLIP76 protein,accession number L42542,Smith-Waterman Score=702.
tttcgtcctcgtttgtggtgctctcgggggccgggggtggagagttaggagtccccaggcctcggggaagctcttggggggcgcctggacagaggctaggggacccagccctcacggttggtggatcgtgcccggcatagtggccaggctccagggcttacccaggggaccaggacaggctcctggtgtcgcccaccgctggcactgagcagtgggcgcctttgggtgctgcgatccttccttcaggtttcagtgggaatggacagacagatctgaagttgaaaattcttttcacaactcatgttcaactatgtgtgttgtcagaatgctcttaatgaggtgtaatggataggtaacagagaagacctcgtcccttccctagtcagggcatcagcatgactgagtgcttcctgccccccaccagcagccccagtgaacaccgcagggtggagcatggcagcgggcttacccggacccccagctctgaagagatcagccctactaagtttcctggattgtaccgcactggcgagccctcacctccccatgacatcctccatgagccctcctgaagtaatggcttgatggatgagaaagaccatgggaagaaaaaaggaaattttaagaaaaaggaaaagaggaccgaaggctatgcagcctttcaggaagatagctctggagatgaggcagaaaagcttatgcctagatttgaagaggcttatgggaggaccacagagactgagaaagtgcaggaattccagcgtttactcaaagaactgccagaaggtaactatcttctgatttctttgttcgttgtgcacatggaccatgtcatcacaaaggaactggaagcaaaaatgaatatacagaacatttatatagtggtcagcccaactgtgcagatcagcaatctagtcctgtatgtgttcttcacacatgtgcaagaactctttggaaatgtggttctaaagcaagtgacgaaaactcggcgatggtctaacgtggccacgatgcccacgctgccagagacccaggcaggcttcaaggaggagatcaggatacaggagttgcttttgaattgtttacatcaagatctgcagggtgggataaaggatttgtctgaagaagaaagattatgggaagagaaagagatcctgactaaacaggaggagctcctgggcatggagcagtttctgcgccggcagattgcctcagaaaaagaagagattgagtgcctcagagccgagactgcggaaattcagagtcaccagcagcagggcctaagcgagactgaggagtactcctccgagagcgagagtgaggatgaggaggagctgcagatcattctggaagatttacagagacagaacgaagagctggaaataaagaacaaccatttgaatcaagcaattcacgaggagagtgaggccgtcatcgagccgcgcatgcagccctggctgctccagttgcagccagacagggccaagcagcaggcgcaggaggacgaggagcccgagtggcgcggaggtgccatgcagacgcccaagaatggcatcctcgagccagtagcagctaaatag

SEQ ID NO: 21921 - DNA, 4507 bp, Homo sapiens
  SIMILAR (2107)..(2211): 311254mologous to Homo sapiens RLIP76 protein,accession number L42542,Smith-Waterman Score=42.
agtctggtttaactggttggaacgactaaagcacgctggcgcaaggaaagctctcaacttcgggagctgaggcgcaggctggccagagcgtggagaggaaagccctttccatcctcaaggccgttgcaggagatgcccgcgagccaccttcgccagcaccacaccggggtgtaatggataggtaacagagaagacctcgtcccttcctagtcagggcatcagcatgactgagtgcttcctgccccccaccagcagccccagtgaacaccgcaggggtggagcatggccagcgggccttaccccgggacccccagcctctgaagagatccagcccctacctaagtttcctggattgtacccgcactggcgagccccctcaccctcccccctgacatccctcccatgagccctccctgatgtagtgtcctgatgatgagaaagatcatgggaagaaaaaagggaaatttaagaaaaaggaaaagaggactgaaggctatgcagcctttcaggaagatagctctggagatgaggcagaaagtccttctaaaatgaagagggtccaagggaatccatgttttcaagaagcccagcttttctaaaaaggagggaaaaggattttaaaataaaagagaaacccaaagaagaaaagcataaagaagaaaagcacaaagaagaaaaacataaagagaagaagtcaaaagacttgaccagcagctgatgttgttaaacagtggaaggaaaagaagaaaaagaaaaagccaattcaggagccagaggtgcctcagattgatgttccaaatctcaaacccatttttggaattcctttggctgatgcagtagagaggaccatgatgtatgatggcattcggctgccagccgttttccgtgaatgtatagattacgtagagaagtatggcatgaagtgtgaaggcatctacagagtatcaggaattaaatcaaaggtggatgagctaaaagcagcctatgaccgggaggagtctacaaacttggaagactatgagcctaacactgtagccagtttgctgaagcagtatttgcgagaccttccagagaatttgcttaccaaagagcttatgcccagatttgaagaggcttgtgggaggaccacggagactgagaaagtgcaggaattccagcgtttactcaaagaactgccagaatgtaactatcttctgatttcttggctcattgtgcacatggaccatgtcattgcaaaggaactggaaacaaaaatgaatatacagaacatttctatagtgctcagcccaactgtgcagatcagcaatcgagtcctgtatgtgtttttcacacatgtgcaagaactctttggaaatgtggtactaaagcaagtgatgaaacctctgcgatggtctaacatggccacgatgcccacgctgccagagacccaggcgggcatcaaggaggagatcaggagacaggagtttcttttgaattgtttacatcgagatctgcagggtgggataaaggatttgtctaaagaagaaagattatgggaagtacaaagaattttgacagccctcaaaagaaaactgagagaagctaaaagacaggagtgtgaaaccaagattgcacaagagatagccagtctttcaaaagaggatgtttccaaagaagagatgaatgaaaatgaagaagttataaatattctccttgctcaggagaatgagatcctgactgaacaggaggagctcctggccatggagcagtttctgcgccggcagattgcctcagaaaaagaagagattgaacgcctcagagctgagattgctgaaattcagagtcgccagcagcacggccgaagtgagactgaggagtactcctccgagagcgagagcgagagtgaggatgaggaggagctgcagatcattctggaagacttacagagacagaacgaagagctggaaataaagaacaatcatttgaatcaagcaattcatgaggagcgcgaggccatcatcgagctgcgcgtgcagctgcggctgctccagatgcagcgagccaaggccgagcagcaggcgcaggaggacgaggagcctgagtggcgcgggggtgccgtccagccgcccagagacggcgtccttgagccaaaagcagctaaagagcagccaaaggcaggcaaggagccggcaaagccatcgcccagcagggattaggaaggagacgtccatctgagcagcctgcgtggccgtctggagtccgtgagactgaaaggacccgtgcatcttactgtaacccgggggccaggccggctctctcgctgtacattctgtaaaggtgtcttctcttctcagactcttcctctgtcacacgtctgactccttcacgtcaggctcaggttccatgggaggacgaagcagtggacgcattgtgggctttagggacagatgagttttccagatagtgtcagcttatttgaagattaattttctttgttaacttaaaaataactattttaacccttgagtggcttctttttaaaccaaaaaccgtctttctttgcttttttatcacagcagaaatcaggatctctttctcattcaaggggggaaccaccccagggtcagcgctgcgcctgctgtggccgccgcgagccacgccctctgggattcttttggtaccgtcactcttggcttgtgccttccacaacttctcggttgcagatccctatggggggaagctgcctcacgttctctgactggtcagagcagcgcctgggtggggtgttccctgggcccactcttcctcttcttccttcttgcagtttttaaaaccacagtcttataaaggcccgagttcaccagggacgggcctgtttgggccacagacagggggcttgcctgtgggagccttgcccaaccggcccccggcagttgcagttccagcggggaggaggctgcccgttcctgccagttcctcactgcggggaccagcaaaggccttctcactgggttggtcaaagatagtcaccttggcctggtgcatccacagaggatgttgttcaaaccagaaatcttttaaacgactgaccttccttaaaaacagaatgactccgattgcttgcttggggttaggaatgttacacgtctccttgcctggaataagccatattatatggttcttaaaacaaaagtttgaaattatccatatcactctcagtttatccttctggtggactcccaattgacaagatggagcagtagaaaaaaattcctttcctttgaatgatagctgtgattcaccccaccccattttcttgtttctggtccatccgatgagacggatgctctgatgctctgaggcttctggggaggctgggccctggggagggcaacgtgctggcagggcgcacttctgtcagagttgaacagcacccgcgaagacagggccaggctcgtggcttcggaagaccaaacccccacacacactcaaggggtccgaaaacaaacccccacacgaagggctcttcacctccttctcctagggtagtatttattttttcagtcacctgtttgatgccagtttttaaacccctcctaccctattgccactgttgtgaccccgttggcccattattttgatttttgtacggaaaaaaagcttttgtttataggaaatcagccatactatttttttttaaatctggagagaagatattctggtgactgaaagtatggtcgggtgtcagatataaatgtgcaaatgccttcttgcctgtcctgtcggtctcagtacgttcactttatagctgctggcaatatcgaaggttccttttttgtttgtgtaaactctaatttctatcaaggtgtcatggatttttaaaattagtatttcattacaaatgtctcagcattggttaactaatttttgccaggaccattattggatcaagcaaataaattcaacagccgatttgggaaaaaagaaaagcttctagttttttttgtacacatccttttctgtggagggaggattggagtactctgcagctggcgaggagttggttgaggcacttcttcaaggcccaagggggaacacagtgttttgtttccagcttcactttgtaccccctcacctctgcagaccacggggagaaccccggacccctggcatgcatgctggcggcggcaatgccctccccttccccacaagccccatgctgcctgcagagggagcctgtgtttgcaaaaccccagtggactgggctgggtcctgctgtctgagcagctccctggtctccggtgggaactgcacacaagtcccactggcctggcttggccccaggcattgcaattgacagacatttgcatttcatacggtaaatgaggactcagcacagccaaccataatcagcatgtctgggatagactggtctagaataaaaatgaagtttacattgataagattgactttaaaaattccacaataaaaatatctgacattgaaagcttaaaaaaaaaaaaaaaaa

SEQ ID NO: 21922 - DNA, 382 bp, Homo sapiens
  SIMILAR (20)..(370): 391254mologous to Homo sapiens retinoic acid-induced protein,accession number AF136587,Smith-Waterman Score=136.
ccagctgggctgtgcagcacattacaccctcccatggaaaataaagcaaaaggcaccggggtgcagctgctcactccagactcttggaatatcccgctaacagatgctcggaggaaggccccctccccggtggctacagctggccaaagccagggccctggcccgtcggcgtccaccaccgtctctccatctgacactgccaactgctctgtcactaaaatccccacgccagtgcccaagtccatccccatcagcgagactccaaatatccctcctgtctccgaccctgctcgtgccgtaccccgtgatcgtgcccctaccggtgcccatccccatccccatccctatcccacacgtcagcgactccaagcccccctgtatt

SEQ ID NO: 21923 - DNA, 2464 bp, Homo sapiens
  SIMILAR (64)..(1212): 291254mologous to Volvox carteri f. nagariensis hydroxyproline-rich glycoprotein DZ-HRGP,accession number AJ242540,Smith-Waterman Score=264.
atggacattttctacaaagagacccaggccaatcttccagctgggctgtgcagcacattacaccctcccatggaaaataaagcagaaggcaccggggtgcagctgctcactccagactcttggaatatcccgctaacagatgctcggaggaaggccccctccccggtggctacagctggccaaagccagggccctggcccgtcggcgtccaccaccgtctctccatctgacactgccaactgctctgtcactaaaatccccacgccagtgcccaagtccatccccatcagcgagactccaaatatccctcctgtctccgtccagccacctgctagcatcgggcctccccttggcgtcccgcctcggagccctcccatggtgatgaccaaccgcggcccggtgccgctgcccatcttcatggagcagcagatcatgcagcagatccgcccgcccttcatccgcgggcctccgcaccatgcctccaaccccaacagccccctgtccaaccccatgcttcccggcatcgggcccccgcccggtggccccagaaacctgggccccacttccagccccatgcaccggcccatgctatcgccccacatccaccccccgagcacccccaccatgcccgggaaccccccaggcctgctgcccccgccgcctccgggcgccccgctgccgagtcttcccttcccgccagtgagcatgatgccaaatggcccgatgccggtgccccagatgatgaatttcgggctgccgtcgcttgccccgctggtgccgcccccgaccctgctcgtgccgtaccccgtgatcgtgcccctaccggtgcccatccccatccccatccctatccctcacgtcagcgactccaagccccccaacgggttctccagcaacggggagaacttcattccgaacgcccctggcgactccgcggcggcgggcggcaagccaagcggacactccctgtccccccgggactccaagcagggctcgtccaagtccgcggactcgccccccggctgctcgggccaggccctgagcctggcgcccacgcccgccgagcatggccggagcgaggtggtggacctgacgcggcgcgccggcagccccccgggccccccgggcgcgggcggccagctcggcttcccaggcgtgctgcagggcccgcaggacggcgtcatcgacctgaccgtgggccaccgagcccggctgcacaacgtgatccaccgcgcgctgcacgcgcacgtcaaggcggagcgcgagccgagcgccgcggagcgcaggacctgcggcggctgcagggacggccactgcagcccgcccgccgccggcgacccaggcccgggcgccccggcgggccccgaggcggccgcggcctgcaacgtcatcgtgaacggcacgcgcggcgccgccgccgagggcgctaagagcgcggagccgcctcccgagcagccgccgccgccgccgccgcccgcgccccccaagaagctgctgtcgcctgaggaaccggcggtgatgcgagctagagtcggtcaaggagaataactgtgcttccaactgccacctggacggggaggcggccaaaaagctgatgggcgaggaggccctggcggggggcgacaagtcagacccgaaccttaataaccccgcggacgaggaccatgcctatgctctgcggatgctgcccaagaccggctgcgtgatccagcctgtgccaaaacccgcggagaaggctgccatggcaccgtgcatcatctcctcgcccatgctcagcgccgggcctgaggacctggagccgccgctcaaaaggaggtgcctccgaattagaaatcagaataagtaaaaggaacgttcactcacagggtacgctcatggagagagggcgcagagcaaaccatgtcacgccatccaatgacaccagctggtcagctcaccaccccctctggctaaaactcaagcaaataaagccgcttcctgtcattaagcatcttaaaagaaagcagccttccttcgatggcctctagcccagagaagcccgcgcatcttggacccaccaagcaggcccagccttcctgctgccaccatctctgcttctccccagaggaacttagagatttcacccctggcttttaaaaaaaacgaaataccgacaagccacaaggaccaatgtaggtattctccccgccccatcttcaaggctcagcgactgaggctggaagatgatatggattggaacacaaaaaatcttttttttaatctttttaaaaactgctgtggttttgctgctacactaagaattgtgatttgcattgtacggttttggacctatattgttcacgttttgatggcggagaggggtggtcctggaggcccaatgcttcagagtcatctctgtcctgcccgggatgcacttttaaatgaagagttagaatattttattggctaaaaaaaaaaaaaaaaa

SEQ ID NO: 21924 - DNA, 6519 bp, Homo sapiens
  SIMILAR (1276)..(2049): 691254mologous to Homo sapiens dJ1076E17.1 (KIAA0823 protein (continues in AL023803)),accession number AL121889,Smith-Waterman Score=833.
  misc_feature (1)...(6519): n = a,t,c or g
caggtggctactggctctgcattaggcagcatagccagaccttgctgatacttacagggccactgtaaggatttgcacttctcttgaggagcaatggaaggaaaacctcaaaagcgtttcgaacacggggcgttgggggacgatcagatctgagttgtggagtctgacacatgtgttcatctgtgtctccctccctgcacaggccacaccatgaggccccagccccaccagaggccccgcgctgccctggcccccggtgcaccgtgctagcccccagccagggcgtttttttnngggagggcggtgccatggccagtcacgtggacctgctgacggagctgcagctgctggagaaggtgcccacgctggagcggctgcgggctgcccagaagcgccgggcccagcagctgaagaaatgggcacagtacgagcaggacttgcagcaccgcaagcgaaagcatgagcggaagcgcagcacgggcggccgccgcaagaaagtgtccttcgaggccagcgtggccctgctggaggcctcgctgaggaacgacgccgaggaagtacgctacttcctgaagaataaggtcagccctgatttgtgcaatgaggacggactcacagccctacaccagtgctgcatcgacaactttgaggaaattgtgaagctgctcctctcccatggtgccaatgtgaacgccaaggacaacgagctgtgggacacctctccatgctgcagccacctgcggccacatcaacctgggtgaagatcctcgttcagtatgggggccgacttgcttgcttgttcaacttgggattggggaacatgccatattgaccttttgcgagggatggaacccaccctgggatgttcattcgaggaccttgcattggcataaccagggggcatcacccaagaggaaaatcaacgagatgcgggtggctcctgagcagcagatgatttgcggacatccacttcatgatcgcagcgggccaggacctggactggatagatgcccagggtgccacactgctgcacatagctggagccaatggatacctgcgggcagctgagctcctcctggaccatggagtgcgtgtggatgtgaaggactgggatggctgggagcccctgcatgcagctgccttctggggacagatgcagatggcagagctattggtgtcccatggagctaatcctcaatgcaaggacatccatggatgagatgccaatagacctgtgcgaggaggaagagttcaaggtcctgttgctggagctaaaaacacaagcatgatgtgatcatgaagtcacagctgaggcacaagtcatccttgagccggaggacctcccaccgccaggcaagcccgtgggaaaggtggtgcggcgaacccagcctgtcggaacaggacccaacctgtaataggaaggagtatgaagggaagaggccatcctgtggcagcggagtgccagctgaggatcagcggacctccacctacaacggggacatcagggagacccaggacagaccaagagaataaggaccctaaccccaggctggagaagcaccgtgctactctccgaatttcctaccaagatcccacgaggtgaactggacatgcctgttgagaatggcctccgggctccggtcagtgcctaccagtatgcgctggccaacggggatgtctggaaaggtgcatgaggtgcctgactacagcatggcctatggcaaccctggcgtggccgacgccaccccgccctggagcagctacaaggaacagagccctcagacgcttctggagctgaagcggcagcgggctgcagccaagctgctcagccaccccttccttagcacacacctgggcagcagcatggccaggacgggcgagagtagcagtgaaggcaaggcccccttgatcggaggcagaacttcaccgtacagcagcaatgggacctcggtatattacacggtcaccagcggagatcccccactcttaaagttcaaggcccccatagaggagatggaggagaaggtgcatggctgttgccgtatctcctaatctccgtgtgatggaggagggagatgcctggggaggggctcctggaatccaggccagcccaacagccctggctggggaggtgtcagggcagctggggagaggtgggctctgcttttcagaggaactcagaccccagccctcagctggctgcccatagcatcccatgtcccacgtcccgtggttctgcttcctgctgcatcgtctgccatctgacacaaggcctgtcgtggcctcctggttcactctgctgtctgatcttgggagggtgggcttgagatcccagctctattcttggtataaaggcttctccggatcagtacatgcatgtcacattaacacacacacacacacacatatacacacacacacaagctcgatcagtgtgtgtaggaatgacatacctgggctcaggggaagcaagggggcttagaatttgtggggtattcccaaaaggatggaagttaagactcagagtctcattaccactgccaatgtggttttagcaggggaggggacctgctaagctgagacccatagtcctgctcagagttatcccaaagtctgagccaccagccacacctgacaggggtgagaagtcctcgctgtgttcagagggagccaggaatctacatgggtagatgagatagacacagacctgctccccgcagccttgttgagagccacacttctgcccatgccaggagccagctgtgtgaccatccaggggtggagggggaaaaccaggcaatttcgttcctggaatcaaccaaatcatgttttcctcttggatggaagtgtcaaaggcagaagggtgtgggagggggacaaggtcagtatttaccaaagtgtatctgattttaaaaattcctttagtctgtaaaactcctagagggagggaggtaactgaattcacttctttttgtggatcgtatcaaggtcactgggttttactggctggtgctgggaaaatgaagctaagtgaggagcttccattggaatgcttttccagggagagaggccagttaatttaaaaaaaacagtcgctagttaacagcgacagagcccagcaccctggggtctttgtgaatatccagactgtttcagcccagcccatctcagccaaccctccttagactgagctgtcagagcaagcaattaggggccagcctgcctccacctcccacccccttccacctccatcagtcatgtgtgcagagtcagtgctcgggatcccgggcccagcttttgcctttttggggatgcttggtgagacagatttgccagtcagcccttttgagttcccgcctcacccaggggctcccagcctgcacttgcaggagtggtgatgccccaagtctgcgaatccagggtgcacgtggtcaatatcccctcctgcattcaggagagccatggtagggctggagttgggtcttgcccagccctgcagtttcatagtcccagccttcctggtgctggggagggaggactgtgaatggctgttctcccctcactgctgagtctcccaggaccccctttggagatgcccatggcatgggcactgcccacaggctcagccagaacctcttggtgtacccgataagctgcaggttatcccttgctctgtgcgccttttatttgtccttaaactacctccttagagctctgaaggggtctcctagttccagattttaatttggggaacagatctgggttctttttaaccctcttctttctcagtctatgagaaacttgccctgaggggcacctgggctaggggcttgggactggaagaccatccccgccttgtgccacaactttggtcatgggatctgctctttgtcattcttagccccctactgtggcccccatagccccataacccagagagggagctggacttcagggagcctgagtgatgctttcccaggagcagggcagctggctggaccagaaagtagagggcccatgggagtgactgcacccttggtggctgctggaaagggagaggttctcagcatcaggccacctccaccccaatgccaggatagatgtattcttagagtaggggtggaggcggcccagggaggctgaatgacaggtgcacagatgctttcccacgaccttgccatttggggtgggctcttcaacatcttcaggctgtggctggaacaggacaggatgatctaaaacacacgtaccattggctgtaaaacagtatgagcccagactgacgctgaaatccctcatgagccaaccttagctacaaggtagggagttctgagggaagccgcgtgctcctcaggagagagctgtttaggttttccgatctttttgctcaggggccaaacactgaaggcacgtactgcccaacccactgagcgcctgaggccattccctccttttccgcatgcctcctgcctcctgggctattcctctccacccagaaggctgggaatcccagctgattccctgacaggagccgacttcacacacaggtgactctcaggcattggctcatgttttcagccagggataaaccatcccttcttggggctttaagtccctggggagctttccctgtaggtctcctgggtgttgagagacaagttggagaccaacctccaatgaatgagccgcggtcattcattaattcactcacgtaatttactgagtagctgcaacatgccagcctctacgttaggttctgcggataaaggaggaataagacagagtcaggagaactgttccttgtggtttccgtcccttggggaccacaggcatcagcagtcccattcaagtcacctgaggcaaagtgtctgcatcttcgtccagcgaccctttgcttttcggctcctagaatccttagagtctgaattcctttagctgggaacagctgtcatggtcacccctggataacatttgccaccaagtatagatgctggatcttgggttccaggcagacatcatccaggtccatctggaactttcagtgatagctgccttcagccagcatctttgggggactctattattagcagcttgagatcagtgtctagaagactgttctgcaatttgctgccaaatggcntttcaggtttttaaagtcattgtttcttgctcatggtggctcatttattacatagtcccctcaccccactaatggataatgggaggaaaagttgctgcttccttcagcatcaaagcctttccttgggaatctgcctccctccatggcaggggtggattcgggagctgggagtaaccagggcaaagtcaaccagatgcctagctcctgctgagacccaggtcctatggcagctcctcattagattaaaggagaccacttccaaagcaggtgctgcatggctcaccatcatatgccccaaacaactgaaagttgggcggttatcaccagactgttgagtttctgggcaagttagcttggggggaagctgaattaaacttttagggcccagggttactaaagacttcaggatagaattctccatcaaatatacagcataagtaaaactgctctgcactgtttaatccatttccaaggggcttagaaaagctaacaagggtgtgtcccctgtcctgccccaccggtttgctggctttgtaataacataacaccattgtggttgttggtgtcaaaaaaaccttccccaccctgagctctcctaaccctacctgctctctctccctagagcaggaatactggggtaacttttaaaaaagggtgcctcccttttaaaaatgccccagaaaaagctgtatttaactcttgcctatttgttaacttggggggatgggtctccccctggccccggggcacattaaggaggcaaaggctcccaatgggtcagtgggatggactctggccaaaagtggaccccctgtggccagaagctatagccctctcccccaacaggtctctcttgttgggccagagggccttggcttccccatggggcattgcaagtgcccacccgtgcgggggccctggctcctgcacaccccaggaaaagtcttgcaggacccccccagcccctccggcaataattccaccccagacccagaagcccactgggtgtaccagagaacacttaaaaaaaatgtattttatgtgaaaaaaaaattaaaactctgtatacctgtatccagcagctttgtgtaaaaatggcaatcaagagagtcgtaatatatttaaaactttttttaaaaaaaatcttcgcagatctttgatatcgtactgaggtaacttccacgtagccccttgccactgcggcaccggtgggccttgggtccaaaatctgtggctcagccacatcccaaagggggcacatgtccctggagttgcttccagcttgccaagggcctgtgacagaattcgctgttaagagtttttagattagaattattaaattccttttaataaccaaaaaaaaaaaaaaaaatgggggg

SEQ ID NO: 21925 - DNA, 306 bp, Homo sapiens
  SIMILAR (2)..(133): 971254mologous to Homo sapiens dJ591C20.4.1 (novel phosphoribulokinase),accession number AL118506,Smith-Waterman Score =214.
atccaaagaggccttcgccatcggcttgggaggcggcagtgcctctgggaagaccactgtggccagaatgatcatcgaggccctggatgtgccctgggtggtcttgctgtccatggactccttctacaagatgcctttgacttcgacctcatcatttccaccctcaagaagctgaagcaggggaagagtgtcaaggcgcccatttatgacttcaccacgctcagccggaagatggactggaaaacactgtatggtgcaaacgtcatcatctttgagggcatcatggcctttgctgacaagacactg

SEQ ID NO: 21926 - DNA, 573 bp, Homo sapiens
  SIMILAR (233)..(334): 1001254mologous to Homo sapiens dJ591C20.4.1 (novel phosphoribulokinase),accession number AL118506,Smith-Waterman Score =169.
tgaacacggcacgcaatccaaagaggccttcgccatcggtgagagcagcgggggggtgggacctgctgccggacgcctgcctccggctcccctccagtgcctgtggagcaggagaaggaagccgggcaaccgcaggcagcggcagcgggatgggcacctctgggacctatctgtgccggcagcctgcctgttcctcacagagggtctccactcccgccggcaggcttgggagggcggcagtgcctctgggaagaccactgtggccagaatgatcatcgaggccctggatgtgccctgggtggtcttgctgtccatggactccttctacaaggtgggcccccgcccagctcccccgaggacccctttgtcctctccctgaccctggaccccctgcaaaagtaggtccctggtctcagccccagcgtggctgctcctgggaggcctagagcccctgtccgctggcattgggtgagggccctactgtgcccacagctgctccacagcctcccccaccaggtgctgactgagcagcagcaggaacaggccgcacacaacaacttcaacttcgaccac

SEQ ID NO: 21927 - DNA, 1380 bp, Homo sapiens
  SIMILAR (520)..(765): 961254mologous to Homo sapiens dJ591C20.4.1 (novel phosphoribulokinase),accession number AL118506,Smith-Waterman Score =406.
gcagcggggcgggacgggacagccaagagacactgagccagctttgccccccacccccctctcttgaggggccgcgcaccacctcggggaggagccagggcggggcctgaccccacaaagctttagttcccccggggagaggctggggacaagctacccattctggggtatgacacctatcagcacgtgtgagcccgccctgtgcccggcccacttctgcttcctcttagcgcaggaggggtcccgcactgggaggggccctcacagcctaccccgctagctttctgcctgatggtgagcttgccccgttgttcgccgccatctttcgcctttgcctgacagctcaggtagggcgacgtctccccccagctcagccccaggcagaagtcaggcccgctctgcacctcgtgctgtgcctggcccgtgtgttcccctcacagtgacgcacagccgtcctgtggggagggagggctctgggaaaagacccccttcttgagtgttccccatcggtttgtccccagggctgcgctggcctcggcacaccagtgccacccgctgccccggacgctgagcgtcctgaagagcacgccgcaggtacggggcatgcacaccatcatcagggacaaggagaccagtcgcgacgagttcatcttctactccaagagactgatgcggctgctcatcgagcacgcgctctccttcctgccctttcaggactgcgtcgtacagaccccgcaggggcaggactatgcggatcaccggtgtgtccattctgcgcgccggtgaaaccatggagcccgcgctgcgcgctgtgtgcaaagacgtgcgcatcggcaccatcctcatccagaccaaccagcttaccggggagcccgagctccactacctgaggctgcccaaggacatcagcgatgaccacgtgatcctcatggactgcaccgtgtccacgggcgcggcggccatgatggcagtgcgcgtgctcctggaccacgacgtgcctgaggacaagatctttttgcttgtcgctgctcatggcagagatgggcgtgcacttcagtggcctatgcatttccgcgagttaagaaatcatcaccacggcggtgggacaaagcgggtcaattgacctttttccgcatcatcccaggcattgggaactttggcgaccgctactttgggacagacgcggtccccgatggcagtgacgaggaggaagtggcctacacgggttagctgcccaagtgagccatcccgtccccaccaccctcctcctgcctcctgacccaggactgctgaatacaaagatgttaatttttaaaatgttactagtataatttattctatgcattttataaaataaataaagctttagaaaaatgaaaa

SEQ ID NO: 21928 - DNA, 2747 bp, Homo sapiens
  SIMILAR (666)..(1019): 941254mologous to Homo sapiens dJ591C20.4.1 (novel phosphoribulokinase),accession number AL118506,Smith-Waterman Score =563.
cctgcctcagcctccctagtaggtgggataacaggcacccaccaccgcacccaggtaatttttttttttaatttttagtagagacgggtcttcaccatgttggccaggctggtctcaaactcctgacctcaaatgatccacctgcctcggcctcccaaagtactgggattacaggcatgagccaccacgcccagcccaggcagagttcttatgtacccccaatgagcctgcccgcctcagccatgcctgttgagggggtggggggggatgccctgtgggccggccatgccagcgggtacctgggaggtggccagctctgggccacatccgagtacatccctctctgcagcagcaatgcagagtccctggacaggctcctgccacctgtgggcactgggcgctctccccggaagcggaccaccagacagtgcaagtcagagcctcccctgctgcgtacaagcaagcgtaccatctacaccgccgggcggccgccctggtacaatgaacacggcacgcaatccaaagaggccttcgccatcgtgcctgtggagcaggagaaggaagccgggcaaccgcaggcagcggcagcgggatgggcacctctgggacctatctgtgccggcagcctgcctgttcctcacagagggtctccactcccgccggcaggcttgggaggcggcagtgcctctgggaagaccactgtggccagaatgatcatcgaggccctggatgtgccctggggtgggtctagcctgtccatggactccttctacaaggtgctgactgagcagcagcaggaacaggccgcacacaacaactgcaacttcgaccacccagatgcctttgacttcgacctcatcatttccaccctcaagaagctgaagcatgggaagagtgtcaaggtgcccatttatgacttcaccacgcacagccggaagaaggactggaaaacactgtatggtgcaaacgtcatcatctttgagggcatcatggcctttgctgacaagacactgttggagggcccaggtcctgccccttgtacaggcccagaggactccatcatccggcacatagcagcccccagcctccacaaggcctcttcacgggccaactactgtgtgctgagcatggggacagaccctaaactcgccacgtcccccattccccagtgtgttggtgcaagttaccccaagcaaaggtgccctggggaagtggctctggccaggcccacggaccaggcggcctcagtgcaggggctggtcccagtgtctccatgcccactgctggcatctggccactcactggcccgctgtctccaccagctcctggacatgaagatctttgtggacacagactccgacatccgcctggtacggcggctgcgccgggacatcagtgagcgcggccgggacatcgagggtgtcatcaagcagtacaacaagtttgtcaagccctccttcgaccagtacatccagcccaccatgcgcctggcagacatcgtggtccccagagggagcggcaacacggtgggccatcgaccttgattgttgcagcacgtgcacagccagctggaggaggtgagcggggtcccacgtccccacggcctagcccccagcccctctacccacttctccgctgccaccacccccagctggcctgtacacctcatccccctgcgttcactgtcccctgccagctctgtcctcgcagcccgcacagctctgccagcaggaactgggcaactgcagcaagaagcttgggctgggccggggccgcatcccactgtccctccccaagggcaggcatgcagggggggctgcgctggcctcggcacaccagtgccacccgctgccccggacgctgagcgtcctgaagagcacgctcgcaggtacggggcatgcacaccatcatcagggacaaggagaccagtcgcgacgagttcatcttctactccaagagactgatgcggctgctcatcgagcacgcgctctccttcctgccctttcaggactgcgtcgtacagaccccgcaggggcaggactatgcgggcaagtgctatgcggggaagcagatcaccggtgtgtccattctgcgcgccggtgaaaccatggagcccgcgctgcgcgctgtgtgcaaagacgtgcgcatcggcaccatcctcatccagaccaaccagcttaccggggaggcccgagctccactacctgaggctgcccaaggacattcagcgatgaccacgtgatcctcatggacttgcaccgtgttccacgggcgcggcggccatgatggcagtgcgcgtgctcctggaccacgacgtgcctgaggacaagatctttttgctgtcgctgctcatggcaaagatgggcgtgcactcagtggcctaagcatttccgcgagtgagaatcatcaccacggcggtggacaagcgggtcaatgaccttttccgcatcatcccaggcattgggaactttggcgaccgctactttgggacagacgcggtccccgatggcagtgacgaggaggaagtggcctacacgggtcctgcccaccctgctttccgagcaggccccccccgggctccccgagaggagtcgccgccgtggtttactgaggaagaggaggcgccagtgtctttctgcgtggaagtccacggccaaaagcgtggcgtcctcggagcctggcacctcgattatgccggatcccggatcctggacaggggtctgctgacgaagggagggacggcgtaa

SEQ ID NO: 21929 - DNA, 488 bp, Homo sapiens
  SIMILAR (22)..(333): 381254mologous to Mus musculus erythroid ankyrin isoform,accession number U73972,Smith-Waterman Score=208.
tttaagtgtgatggtaaaattatactaaaaatgcatttgtcaggacttgaaagacagtgagatgattcaagctcagaggaagagcggagagtcactacccgagttattcgccggcgtttgattataaagggagaggaagcaaaaaacattcctggtgaatctgtcacagaagaacaatttactgatgaagaaggcaacctcatcaccagaaaaatcactcggaaagtattaagacgaattgttatcccacaagagagaaaacgtgatgatgtgcagggagaaggttttaaggtgaaaacgaagaaagaaatccggcatgtggaaaagaagagccactcgtaacagcgaacggtcagtcaaggatcataagtttttactgccagtattgagaaattcgtggaagaaatgtcagcaggaagtaaaaattcaccgagaagtgtgtgtgtgttcgctgcttccacacattaatggcatgattttttttatgc

SEQ ID NO: 21930 - DNA, 1089 bp, Homo sapiens
  SIMILAR (556)..(879): 701254mologous to Homo sapiens ankyrin G119,accession number U43965,Smith-Waterman Score=356.
atgaatgacttgtgtcaggcatatgccccccctgctggtgacactttttctcaatccagtgacccatacccaagagagagaaaaactttctggaagaagggaggctacaccaaatggagagaggaagtctggggcctggggaaggctctggggcaggttatggtcattctacacacagagtacaaagtaatcttaaatgtcaacactgaagtataccgcgttatcacggcgatgaacagacgttctccgaacgctattacactagcgcgttcttgtcatactataacacgagaagtcgtcttcttcgtgagaacaagacagcactctttgtttatagaagatgcggccgccgctctgctcatggaaatgtggaaagcacaaggcttgttggagagcaaggggactaccagaggatgtagagttgagtgccacattgtgagtggccagtcagtgattaggatgagcaccatagcccgtggccacaggaaggatggccacttcagcagcatgactgtgtgctctttgctcatgaggtattggaacatccataccccaattactaaggactctttggctaagaaggaggttgtgcaactggaatggaccagtggagctgacactttcaaaagggaagcttttgatgtgggcttactctctacatctgcaggtgaagatgcaatgaccggggacacagacaaatatcttgggccacaggaccttaaggaattgggtgatgattccctgcctgcagagggttacatgggctttagtctcggagcgcgttctgccagttcggataggtcttacaccttgaacagaagctcctatgcacgggacagcatgatgattgaagaactccttgtgccatccaaagagcaggctgcagctgccatagataatgattcctctgatggatgtgggcaaagtaaattgaatgccttctggaaaggattcaccattctagatgccattaagaacattcatgattcatgggaggtcaaaatagcagcattaacagaagtttggaagaaggtgactccagtcctcatggatgactatgaggattcaagacttcagtggaggaagtaa

SEQ ID NO: 21931 - DNA, 501 bp, Homo sapiens
  SIMILAR (1)..(162): 981254mologous to Homo sapiens ankyrin G,accession number U13616,Smith-Waterman Score=259.
atggacatagcgacaactctgctggaatatggtgctgatgccaacgcagttacccggcaaggaattgcttccgtccatctcgcagctcaggaagggcacgtggacatggtgtcgctgctcctcggtagaaatgcgaatgtgaacctgagcaataagataggagaagttgttggcaattttgaaggaacttgtgaagactgttccctaaactcttcaaacacccatgctgtcatctttgatatgctcattattcatgaagaaaagactagagttttgtcaagcaaagtgaaagttcagccgacaattaaccagaaacttgttaatgaagttactgcctctccctctgatgccttaacttcggtcttgacaaaaattaatcgaatagatatagtgacactgctagaaggaccaatatttgattatggaaatatttcaggcaccagaagttttgcagatgagaacaatgttttccatgaccctgttgatggtaatcgaatttag

SEQ ID NO: 21932 - DNA, 3397 bp, Homo sapiens
  SIMILAR (131)..(3394): 1001254mologous to Homo sapiens ankyrin G119,accession number U43965,Smith-Waterman Score=5633.
ggagctcttctcactcaagcccgagtttctatgttcagacatagtacattcatcactgtgtccttccaggatttggaagtctgacaaaacaccattccagtagctgcatctccaggttttgagtctagaaatgaatttaagatgtgatctcttggataagaaagctaaccccaatgccaaagccctgaatggctttacccctcttcatattgcctgcaagaagaatcgaattaaagtaatggaactccttctgaaacacggtgcatccatccaagctgtaaccgagtcgggccttaccccaatccatgttgctgccttcatggggcatgtaaatattgtatcacaactaatgcatcatggagcctcaccaaacaccaccaatgtgagaggagaaacagcactgcacatggcagctcgctccggccaagctgaagttgtgcggtatctggtacaagacggagctcaggtagaagctaaagctaaggatgaccaaacaccactccacatttcagcccgactggggaaagcagacatagtacaacagctgttgcagcaaggggcatctccaaatgcagccacaacttctgggtacaccccacttcacctttccgcccgagaggggcatgaggatgtggccgcgttccttttggatcatggagcgtctttatctataacaacaaagaaaggatttactcctcttcatgtggcagcaaaatatggaaagcttgaagtcgccaatctcctgctacagaaaagtgcatctccagatgctgctgggaagagcgggctaacaccactgcatgtagctgcacattacgataatcagaaagtggcccttctgcttttggaccaaggagcctcacctcacgcagccgcaaagaatggttatacgccactgcacatcgctgccaaaaagaaccagatggacatagcgacaactctgctggaatatggtgctgatgccaacgcagttacccggcaaggaattgcttccgtccatctcgcagctcaggaagggcacgtggacatggtgtcgctgctcctcggtagaaatgcgaatgtgaacctgagcaataagagcggcctgaccccactccatttggctgctcaagaagatcgagtgaatgtggcagaagtcctcgtaaaccaaggggctcatgtggacgcccagacaaagatgggatacacaccactgcatgtgggctgccactatggaaatatcaagattgttaatttcctgctccagcattctgcaaaagttaatgccaaaacaaagaatgggtatacgccattacatcaagcagcacagcaggggcatacgcatataataaatgtcttacttcagaacaacgcctcccccaatgaactcactgtgaatgggaatactgcccttggcattgcccggcggctcggctacatctcagtagtggacaccctgaagatagtgaccgaagaaaccatgaccacaactactgtcacagagaagcacaaaatgaatgttccagaaacgatgaatgaagttcttgatatgtctgatgatgaaggtgaagatgcaatgaccggggacacagacaaatatcttgggccacaggaccttaaggaattgggtgatgattccctgcctgcagagggttacatgggctttagtctcggagcgcgttctgccagcgataggtcttacaccttgaacagaagctcctatgcacgggacagcatgatgattgaagaactccttgtgccatccaaagagcagcatctaacattcacaagggaatttgattcagattctcttagacattacagctgggctgcagacaccttagacaatgtcaatcttgtttcaagccccattcattctgggtttctggttagctttatggtggacgcgagagggggctccatgagaggaagccgtcatcacgggatgagaatcatcattcctccacgcaagtgtacggcccccactcgaatcacctgccgtttggtaaagagacataaactggccaacccacccccacatggtgaaaggagagggattagcagtaggctggtagaaatgggtcctgcaggggcacaatttttaggccctgtcatagtggaaatccctcactttgggtccatgagaggaaaagagagagaactcattgttcttcgaagtgaaaatggtgaaacttggaaggagcatcagtttgacagcaaaaatgaagatttaaccgagttacttaatggcatggatgaagaacttgatagcccagaagagttagggaaaaagcgtatctgcaggattatcacgaaagatttcccccagtattttgcagtggtttcccggattaagcaggaaagcaaccagattggtcctgaaggtggaattctgagcagcaccacagtgccccttgttcaagcatctttcccagagggtgccctaactaaaagaattcgagtgggcctccaggcccagcctgttccagatgaaattgtgaaaaagatccttggaaacaaagcaacttttagcccaattgtcactgtggaaccaagaagacggaaattccataaaccaatcacaatgaccattccggtgcccccgccctcaggagaaggtgtatccaatggatacaaaggggacactacacccaatctgcgtcttctctgtagcattacagggggcacttcgcctgctcagtgggaagacatcacaggaacaactcctttgacgtttataaaagattgtgtctcctttacaaccaatgtttcagccagattttggcttgcagactgccatcaagttttagaaactgtggggttagccacgcaactgtacagagaattgatatgtgttccatatatggccaagtttgttgtttttgccaaaatgaatgatcccgtagaatcttccttgcgatgtttctgcatgacagatgacaaagtggacaaaactttagagcaacaagagaattttgaggaagtcgcaagaagcaaagatattgaggttctggaaggaaaacctatttatgttgattgttatggaaatttggccccacttaccaaaggaggacagcaacttgtttttaacttttattctttcaaagaaaatagactgccattttccatcaagattagagacaccagccaagagccctgtggtcgtctgtcttttctgaaagaaccaaagacaacaaaaggactgcctcaaacagcggtttgcaacttaaatatcactctgccagcacataaaaagattgagaaaacagatagacgacagagcttcgcatccttagctttacgtaagcgctacagctacttgactgagcctggaatgagtgagtttcctgacacgtccactaatccgggtcaatgttttaggagaagagacattttttctatgcgctctaaattatga

SEQ ID NO: 21933 - DNA, 1656 bp, Homo sapiens
  SIMILAR (261)..(323): 471254mologous to Homo sapiens ankyrin G,accession number U13616,Smith-Waterman Score=48.
atgaaagaggacctaatgcggatgaccgcaatactacagacagatgtgcctgaggagaagccattccaacctgaactcccaaaggaagggagaatagatgatgaagaacctttcaaaattgtagagaaagtaaaggaagacttagtgaaagttagtgaaatccttaaaaaggatgtatgtgtagataataaaggatcacccaaatcaccaaagagtgacaaaggacactctcctgaagatgactggatagaatttagttcggaagaaatccgggaagccagacaacaagctgctgcgagccagtctccatctctgccagagagagtgcaagtaaaagcaaaagccgcctccgaaaaggattataacttgaccaaagttattgattacctaacaaatgatattgggagtagttcactgacaaacttaaaatacaagtttgaggatgcaaagaaggatggtgaggagagacagaaaagagttttaaaaccagcaattgctttgcaggaacacaaactcaaaatgcctccagcctccatgaggacttccacctctgagaaagaattgtgtaaaatggctgattccttttttggaacagatactattttagagtctcctgatgacttttctcaacacgaccaagataaaagtcccttgtctgacagtggctttgaaacaagaagtgaaaagacaccttcagccccacaaagcgctgaaagcactggtcctaaaccactttttcatgaagttcccatccctcctgtcattacagaaacaagaactgaagtggttcatgttatcaggagctatgatccctcagctggggatgttccccagacccaaccagaggagcctgtgtcacctaaaccttcacctacttttatggaattggaaccaaagcccaccacctctagtattaaagaaaaggttaaagcatttcaaatgaaagccagtagtgaagaagatgaccacaatcgggttttaagcaaaggcatgcgtgttaaagaagagactcacataaccacaaccaccagaatggtttatcattctccaccaggcggtgaaggtgcatctgaaagaattgaagaaaccatgtcagtccatgacatcatgaaggcctttcagtccgggcgggatccttccaaagaactggcaggtctgtttgaacataagtcggcagtgtctccagatgttcacaagtctgctgctgaaacctcagcccagcatgcagagaaggacaaccaaatgaaacccaaactggagcgtataatagaagtccacatcgaaaaaggtaaccaagctgagcccactgaagtcattattagagaaaccaaaaagcatccagaaaaagaaatgtttctggttagctttatggtggacgcgagagggggctccatgagaggaagccgtcatcacgggatgagaatcatcattcctccacgcaagtgtacggcccccactcgaatcacctgccgtttggtaaagagacataaactggccaacccaccccccatggtggaaggagagggattagccagtaggctggtagaaatgggtcctgcaggggcacaatttttagggatctttgtaaaccagattgttgatcttatcacgtttgtgtttaaaaccttcagtggcttctcagtgcaaacaggataa

SEQ ID NO: 21934 - DNA, 1852 bp, Homo sapiens
  SIMILAR (1183)..(1650): 971254mologous to Mus musculus ankyrin 3,accession number L40631,Smith-Waterman Score=808.
atggactccaacacaagagaaaacaaagggaattttcatggttatgatgaaggaagacccaagagcacatctgtgtgcagtggacctacaaggaatatgacaagttatccttcccttcaagtggaactggaaacccccacagggttgcactacacaccacctacccctttccagcaagatgattattttagtgatatctctagcatagaatctccccttagaacccctagtagactgagtgatgggctagtgccttcccaggggaacatagagcattccgcagatggacctccagtcgtaactgcagaagacgcttccttagaagacagcaaactggaagactcagtgcctttaacagaaatgcctgaagccagggatgtagatgagagccagttggagaatgtatgtctgaagcctagaaaactaggagtaagctctgagcagcaggagaaaggaaaatctggtcctgatgaggagatgatggaagagaaactcaaatctctatttgaggacattcaacttgaagaaggagtagagtctgaggagatgacagaagaaaaagtacaggctattcttaagcgtgttcagcaagcagaactggaaatgtcttcaattacaggttggcagaatgagacatcaagtggaaacctagagtcctgcgctcaagctcgaagagtaactggtgggttactagatcgactggatgacagccatttcagcactagagagtgccctaagccccggaatgctgcaactcttacagactccttgatacacagctttggtagattttgggaaaataagggagaattccctgggttaccagaacttgatagcccagaagagttagggaaaaagcgtatctgcaggattatcacgaaagatttcccccagtattttgcagtggtttcccggattaagcaggaaagcaaccagattggtcctgaaggtggaattctgagcagcaccacagtgccccttgttcaagcatctttcccagagggtgccctaactaaaagaattcgagtgggcctccaggcccagcctgttccagatgaaattgtgaaaaagatccttggaaacaaagcaacttttagcccaattgtcactgtggaaccaagaagacggaaattccataaaccaatcacaatgaccattccggtgcccccgccctcaggagaagactgccatcaagttttagaaactgtggggttagccacgcaactgtacagagaattgatatgtgttccatatatggccaagtttgttgtttttgccaaaatgaatgatcccgtagaatcttccttgcgatgtttctgcatgacagatgacaaagtggacaaaactttagagcaacaagagaattttgaggaagtcgcaagaagcaaagatattgaggttctggaaggaaaacctatttatgttgattgttatggaaatttggccccacttaccaaaggaggacagcaacttgtttttaacttttattctttcaaagaaaatagactgccattttccatcaagattagagacaccagccaagagccctgtggtcgtctgtcttttctgaaagaaccaaagacaacaaaaggactgcctcaaacagcggtttgcaacttaaatatcactctgccagcacataaaaagtcaccaaatggacacattcttttccgtgtggcaagggagggccgtatacctttgtctggggcgtccacatgagccccttggtttacgaggacttctgccacattcactcgatcttcttgagcagccaaatggagtggggtcaggccgctctgcaaaagattcaaagggcacagtcatcgtacaggaaggaatgtcacacacatag

SEQ ID NO: 21935 - DNA, 15187 bp, Homo sapiens
  SIMILAR (193)..(9222): 981254mologous to Homo sapiens ankyrin G,accession number U13616,Smith-Waterman Score=15077.
  misc_feature (1)...(15187): n = a,t,c or g
gggacaccatcatttgggtttttaaaagcttcagcttctccagcatctttgcattgtgaatatcttcctgcttctagtcaaagctttctctctagtgattggaatgctgctgtaagcctattagaggtgcctgaggatatcaccttttacaaggaagccgtgtgtgcttgagaggatctttttaaatgcattatggctcatgcagcctcacaattaaagaaaaacagggatttagaaatcaatgctgaagaagagcctgagaaaaaaaggaaacaccgcaaacggtcccgggatcggaagaaaaagtctgatgccaatgcaagttacttaagagcagctcgagctggacaccttgaaaaggccctcgactacataaaaaatggagttgacatcaacatttgcaatcagaatgggttgaacgctctccaccttgcttccaaagaaggccatgtagaggttgtttctgagctgctgcagagagaagccaatgtggatgcagctacaaagaaaggaaacacagcattgcacatcgcatctttggctgggcaagcagaggtggtaaaagtcttggttacaaatggagccaatgtcaatgcacaatctcagaatggtttcacgccattgtatatggcagcccaggaaaatcacctggaagttgtcaagtttcttcttgacaatggtgcaagccagagcctagccacagaggatggcttcacaccattggcagtggctttgcaacaaggtcacgaccaagtcgtttcgctcctgctagagaatgacaccaaaggaaaagtgcgtctcccagctcttcatatcgcggcccgcaaagacgacacaaaagccgccgccctgctgctgcagaatgacaacaatgcagatgtggaatcaaagagtggcttcactccgctccacatagctgctcactatggaaatatcaatgtagccacgttgctgttaaaccgagcggctgctgtggatttcaccgcaaggaatgacatcactcctttacatgttgcatcaaaaagaggaaatgcaaatatggtaaaactattgctcgatcgaggagctaaaatcgatgccaaaaccagggatggtctgacaccactgcactgtggagcaaggagtggccacgagcaggtggtagaaatgttgcttgatcgagctgcccccattctttcaaaaaccaagaatggattatctccattgcacatggccacacaaggggatcatttaaactgcgtccagcttctcctccagcataatgtacccgtggatgatgtcaccaatgactacctgactgccctacacgtggctgcccactgtggccattacaaagttgccaaggttctcttggataagaaagctaaccccaatgccaaagccctgaatggctttacccctcttcatatcgcctgcaagaagaatcgaattaaagtaatggaactccttctgaaacacggtgcatcccatccaagctgtaaaccgaggtcgggggcctttacccccaatcccatgttgctgccttcaatggggtatgtaaatattgtatcacaactaatgcatcatggagcctcaccaaacaccaccaatgtgagaggagaaacagcactgcacatggcagctcgctccggccaagctgaagttgtgcggtatctggtacaagacggagctcaggtagaagctaaagctaaggatgaccaaacaccactccacatttcagcccgactggggaaagcagacatagtacaacagctgttgcagcaaggggcatctccaaatgcagccacaacttctgggtacaccccacttcacctttccgcccgagaggggcatgaggatgtggccgcgttccttttggatcatggagcgtctttatctataacaacaaagaaaggatttactcctcttcatgtggcagcaaaatatggaaagcttgaagtcgccaatctcctgctacagaaaagtgcatctccagatgctgctgggaagagcgggctaacaccactgcatgtagctgcacattacgataatcagaaagtggcccttctgcttttggaccaaggagcctcacctcacgcagccgcaaagaatggttatacgccactgcacatcgctgccaaaaagaaccagatggacatagcgacaactctgctggaatatggtgctgatgccaacgcagttacccggcaaggaattgcttccgtccatctcgcagctcaggaagggcacgtggacatggtgtcgctgctcctcggtagaaatgcgaatgtgaacctgagcaataagagcggcctgaccccactccatttggctgctcaagaagatcgagtgaatgtggcagaagtcctcgtaaaccaaggggctcatgtggacgcccagacaaagatgggatacacaccactgcatgtgggctgccactatggaaatatcaagattgttaatttcctgctccagcattctgcaaaagttaatgccaaaacaaagaatgggtatacgccattacatcaagcagcacagcaggggcatacgcatataataaatgtcttacttcagaacaacgcctcccccaatgaactcactgtgaatgggaatactgcccttggcattgcccggcgcctcggctacatctcagtagtggacaccctgaagatagtgaccgaagaaaccatgaccacaactactgtcacagagaagcacaaaatgaatgttccagaaacgatgaatgaagttcttgatatgtctgatgatgaagttcgtaaagccaatgcccctgaaatgctcagtgatggcgaatatatctcagatgttgaagaaggtgaagatgcaatgaccggggacacagacaaatatcttgggccacaggaccttaaggaattgggtgatgattccctgcctgcagagggttacatgggctttagtctcggagcgcgttctgccagcctccgctccttcagttcggataggtcttacaccttgaacagaagctcctatgcacgggacagcatgatgattgaagaactccttgtgccatccaaagagcagcatctaacattcacaagggaatttgattcagattctcttagacattacagctgggctgcagacaccttagacaatgtcaatcttgtttcaagccccattcattctgggtttctggttagctttatggtggacgcgagagggggctccatgagaggaagccgtcatcacgggatgagaatcatcattcctccacgcaagtgtacggcccccactcgaatcacctgccgtttggtaaagagacataaactggccaacccacccccacatggtgaaaggagagggattagcagtaggctggtagaaatgggtcctgcaggggcacaatttttaggccctgtcatagtggaaatccctcactttgggtccatgagaggaaaagagagagaactcattgttcttcgaagtgaaaatggtgaaacttggaaggagcatcagtttgacagcaaaaatgaagatttaaccgagttacttaatggcatggatgaagaacttgatagcccagaagagttagggaaaaagcgtatctgcaggattatcacgaaagatttcccccagtattttgcagtggtttcccggattaagcaggaaagcaaccagattggtcctgaaggtggaattctgagcagcaccacagtgccccttgttcaagcatctttcccagagggtgccctaactaaaagaattcgagtgggcctccaggcccagcctgttccagatgaaattgtgaaaaagatccttggaaacaaagcaacttttagcccaattgtcactgtggaaccaagaagacggaaattccataaaccaatcacaatgaccattccggtgcccccgccctcaggagaaggtgtatccaatggatacaaaggggacactacacccaatctgcgtcttctctgtagcattacagggggcacttcgcctgctcagtgggaagacatcacaggaacaactcctttggacgtttataaaagattgtggtctcctttacaaccaatgtttcagccagattttggcttggcagactgccatcaagttttagaaactgtggggttagccacgcaactgtacagagaattgatatgtgttccatatatggccaagtttgttgtttttgccaaaatgaatgatcccgtagaatcttccttgcgatgtttctgcatgacagatgacaaagtggacaaaactttagagcaacaagagaattttgaggaagtcgcaagaagcaaagatattgaggttctggaaggaaaacctatttatgttgattgttatggaaatttggccccacttaccaaaggaggacagcaacttgtttttaacttttattctttcaaagaaaatagactgccattttccatcaagattagagacaccagccaagagccctgtggtcgtctgtcttttctgaaagaacgaaagacaacaaaaggactgcctcaaacagcggtttgcaacttaaatatcactctgccagcacataaaaaggagacagagtcagatcaagatgatgagattgagaaaacagatagacgacagagcttcgcatccttagctttacgtaagcgctacagctacttgactgagcctggaatgattgaacggagtacaggagcaacaagatccctccccaccacttactcatacaagccattcttttctacaagaccataccagtcctggacaacagctccgattacagtgcctgggccagccaagtcaggcttcacttccttatcaagttcttcctctaatacgccatcagcttctccgttaaaatcaatatggtctgtttcgacaccttctccaatcaaatccacattaggcgcgtcaactacatcttcagttaaatccattagtgacgtggcatctccaattagatccttacggacaatgtcttcgccgataaaaactgtggtgtcacaatctccatacaatatccaggtttcctctggtaccctggctagagctccagcagtcacggaagctacgcccttaaaagggctggcatccaattctacgttttcctctcgaacctctccagtgactacagcagggtctcttttggagaggtcatcaattactatgacaccccctgcctcccccaaatcaaacattaatatgtattcctcaagtttgccatttaagtcaattattacatcagcagcaccgctaatatcttcacctttaaagtcagtggtgtctccagttaaatcacgagttgatgtcatttcatcagccaaaattacaatggcatcttctctctcatcacctgtgaagcagatgcctggacatgcagaggtagcattagtcaatggatctatttcccctctaaaatatgcatcatcctcaactttaattaatggatgcaaagccactgccacgttacaggaaaaaatttcttctgctacaaactctgtgagctctgtggtcagtgcagccactgacacagttgagaaagtgttttctaccacgactgcaatgccattttccccactcaggtcatatgtttctgcagcaccatcagcttttcagtctctaagaactccttccgcaagtgcactctatacatcccttgggtcgtcaatatctgcaactacctcatctgtaacttcatcaattataacagtgccagtatactctgtagtcaatgttttgccagaaccagcattaaagaaacttccagactctaattcatttacaaaatcagcagcagccttgctgtcacccattaaaacattgactacggagacacatcctcagcctcacttcagtcgaacttcatctccagttaagtcatctttgttccttgcaccctctgcccttaagttgtctacaccatcttctttatcttccagtcaggagatactaaaagatgtagctgaaatgaaagaggacctaatgcggatgaccgcaatactacagacagatgtgcctgaggagaagccattccaacctgaactcccaaaggaagggagaatagatgatgaagaacctttcaaaattgtagagaaagtaaaggaagacttagtgaaagttagtgaaatccttaaaaaggatgtatgtgtagataataaaggatcacccaaatcaccaaagagtgacaaaggacactctcctgaagatgactggatagaatttagttcggaagaaatccgggaagccagacaacaagctgctgcgagccagtctccatctctgccagagagagtgcaagtaaaagcaaaagccgcctccgaaaaggattataacttgaccaaagttattgattacctaacaaatgatattgggagtagttcactgacaaacttaaaatacaagtttgaggatgcaaagaaggatggtgagggaggacagaaaagagttttaaaaccagcaattgctttgcaggaacacaaactcaaaatgcctccagcctccatgaggacttccacctctgagaaagaattgtgtaaaatggctgattccttttttggaacagatactattttagagtctcctgatgacttttctcaacacgaccaagataaaagtcccttgtctgacagtggctttgaaacaagaagtgaaaagacaccttcagccccacaaagcgctgaaacgactggtcctaaaccactttttcatgaagttcccatccctcctgttattacagaaacaagaactgaagtggttcatgttatcaggagctatgatccctcagctggggatgttccccagacccaaccagaggagcctgtgtcacctaaaccttcacctacttttatggaattggaaccaaagcccaccacctctagtattaaagaaaaggttaaagcatttcaaatgaaagccagtagtgaagaagatgaccacaatcgggttttaagcaaaggcatgcgtgttaaagaagagactcacataaccacaaccaccagaatggtttatcattctccaccaggcggtgaaggtgcatctgaaagaattgaagaaaccatgtcagtccatgacatcatgaaggcctttcagtccgggcgggatccttccaaagaactggcaggtctgtttgaacataagtcggcagtgtctccagatgttcacaagtctgctgctgaaacctcagcccagcatgcagagaaggacaaccaaatgaaacccaaactggagcgtataatagaagtccacatcgaaaaaggtaaccaagctgagcccactgaagtcattattagagaaaccaaaaagcatccagaaaaagaaatgtatgtatatcagaaagacttatcccggggagatattaacctaaaagattttctgccagaaaaacacgatgcttttccttgttcagaggaacagggtcagcaagaagaagaagaacttactgctgaagagtcattgccttcttatctggagtcttccagagtaaacactcctgtgtcccaagaagaagatagccgccctagttctgctcaactcatatctgatgactcttataaaacattgaagcttttgagtcaacactcaatagaataccatgacgatgagttgtcagaactaagaggggagtcttacaggtttgctgagaaaatgcttctgtcagaaaagctagatgtgtctcattctgatactgaggaatcggttacagaccatgcaggaccccctagctcagagttacaggggtctgataagcggtccagagaaaaaatagccactgcccccaaaaaagaaattctctccaaaatctataaagatgtttctgaaaatggtgtaggtaaagtgtctaaagatgagcattttgataaagtgacagtgttgcactattctggcaatgttagtagtccaaaacatgccatgtggatgcgctttactgaggacagattagacagaggtagagagaagttgatatatgaagatagggtggacaggactgtgaaggaggctgaagaaaaactgactgaagtgtcacagttttttcgtgacaaaactgaaaagctaaatgatgaactgcagtccccagagaaaaaggcacgccctaaaaatggcaaagaatattcttctcaaagccctaccagtagcagccctgagaaagtgctactgacagaactgctggcatccaatgatgagtgggttaaggcaagacagcatggccctgatggacaaggcttccccaaggccgaggagaaggcacccagtctgcccagcagcccagagaagatggttctctcccaacagactgaggacagcaagtccacagtggaagccaaaggaagtatttcacagagcaaagcaccagatgggccccagtctggattccagctcaaacaatctaaactcagttccattagattaaaatttgaacaaggcacacacgcaaaaagtaaggacatgtctcaagaagacagaaagtcagatggccagtccagaatcccagttaaaaaaatacaggagagcaagctacccgtctaccaagtttttgctagagaaaaacagcagaaggccatagacctcccagatgaaagtgtatctgtgcaaaaagattttatggtattaaaaaccaaagatgagcatgcccaaagcaacgaaattgttgtaaatgattctggctctgataatgtgaaaaaacagagaactgaaatgtcaagtaaagcaatgcctgactctttttctgagcagcaggctaaagacttggcatgtcatataacctcagatttagcaactaggggaccatgggacaaaaaggtctttagaacatgggagagttcgggagccactaacaataagtctcagaaagaaaaactttcgcatgtacttgttcatgatgtaagagagaatcacattggtcaccctgagagtaaaagtgttgatcaaaagaatgaatttatgtctgtgactgagagagaacgcaaattgttaacaaacggctctctctcagaaattaaagaaatgactgtaaaatctccctccaaaaaagtcttatatagggaatatgttgtgaaagaaggggaccatccaggcggattgcttgatcagccttccaggaggagcgagagctcagcagtgtcacacattcccgtcagagttgctgatgagaggagaatgctgtcttctaatattcccgatggtttttgtgaacagtcggcatttccaaaacatgaactatcacaaaaattgtcccagtcaagcatgagtaaagagacagttgagactacagcactttaattctatagaagatgaaaaagttacctattcagaaatcagcaaaggttccaaacaccagagttatgtaggtttatgcccacctctcgaggaaaccgaaacctcccccaccaaatctcctgattctttagagtttatcccaggaaaggaatctccctctagtgatgtattcgaccacagtcccattgatggattggaaaaactcgcaccactagcccagacagagggagggaaagagataaaaactttacccgtttatgtcagttttgtacaagtggggaagcaatatgaaaaggagatacaacaaggaggtgtaaaaaaaatcataagtcaggaatgtaagacagtacaagaaaccagggggaccttttatacaactagacagcaaaagcaacctccttctccccaaggtagtccagaagatgatactctagagcaagtatcctttctagacagctctgggaaaagccctttaaccccagaaacacccagttcagaggaagtgagttatgaatttacatctaagacacctgactcgctcatagcttatataccaggcaaacccagcccaattcccgaggtttctgaggagtcagaggaggaggaacaggccaagtcaacctcccttaagcagactacagtggaggaaacagcagttgagcgtgaaatgcctaatgacgtgagcaaagactctaaccaaagacccaaaaataacagagttgcctatattgaatttccccctcctccaccactggatgcggaccagattgagtcagataagaagcatcattatctcccagaaaaagaggttgacatgattgaagtcaatctgcaagatgagcatgacaagtaccagctggctgaacctgtcattagagtgcagccaccttcaccagttcctcccggggcagacgtcagtgattcaagcgatgacgaatctatttatcagccagtcccagttaaaaaatataccttcaaattaaaggaagtggacgatgaacaaaaagaaaaacccaaagcttctgctgaaaaggcttccaaccagaaagaactggaaagtaatggatctggataagataactgaatttggccttggccttgattcacctcagaatgaaattgcccagaatgggaacaacgaccagtccatcacagagtgctccattgccaccacagcagagttttctcatgacacggatgccacagagatcgactctctggatggctatgacctgcaagatgaagatgatggcttgacagagagtgattctaaactcccaattcaagccatggaaattaagaaagatatctggaacacagagggcattctgaagccagctgaccgctcttttagccaaagtaaacttgaagttatcgaggaggagggaaaggtgggaccagatgaggacaagccaccttctaaaagttcttcatctgaaaagactcctgataagactgatcagaagtcaggggcccagttcttcacactggaaggcagacatcctgacagatcagtgtttcctgatacttacttcagttacaaagtagatgaagaatttgccactccttttaaaacagtagctaccaaaggtctagattttgacccttggtctaataaccgaggggatgatgaagtttttgacagtaaatcacgggaagatgaaactaagccatttgggctggcggtagaagaccgctctccagcaacaacccctgatacaacgccagccagaacgccaactgatgaaagtaccccaactagtgagcctaaccccttcccatttcatgaaggaaaaatgtttgagatgactcgcagtggtgcaattgacatgagcaagagggattttgttgaagagaggctccaatttttccagattggtgagcatacttctgaagggaagtcaggggaccagggggaaggggataaaagtatggtcactgccacaccacagccacagtcaggggacaccactgtagaaaccaatctagagagaaatgtagagacacctacagtggaacctaaccccagcatcccgaccagcggagagtgtcaggaaggcacatccagtagtggctccctggagaaatcagcagcagccactaacacctctaaagttgaccccaagttgcgcacgcctataaaaatgggaatttctgcatccaccatgaccatgaagaaagaaggccctggagaaataacagataagatagaagcggtgatgaccagttgtcagggattagaaaatgaaactataacaatgatttcaaatacagccaatagccagatgggcgttaggccccatgaaaaacatgattttcaaaaagataactttaataacaacaacaatttggattcttccactatacagacagataacattatgagtaatatagttctgacagaacattctgcacccacttgtaccacagagaaagataacccagtgaaagtctcatcaggaaaaaagacaggggtactacaaggacactgtgtaagagataagcagaaagttcttggagaacagcaaaaaacaaaggaattgatagggattaggcaaaaatccaaacttcccataaaggccacttcaccaaaagataccttcccaccgaaccatatgtcaaacactaaagcaagtaaaatgaagcaggttagtcaatccgagaaaaccaaagcccttactacttcttcatgtgtagatgtaaagtccagaattccagtgaaaaacacacacagggataacataattgcagttagaaaagcatgtgccacacaaaagcaagggcagccagagaaaggcaaggccaaacagcttccatccaagttgccagtaaaggtaagatccacctgtgtcactaccaccaccaccactgccaccaccaccaccactaccaccactaccaccaccaccagctgcacagttaaagttaggaaaagtcagctcaaggaagtatgtaaacattccattgaatattttaagggaattagtggtgagaccttaaagcttgtggaccgcctctctgaagaagaaaaaaagatgcagtccgagttgtccgatgaggaagaaagtacctcaagaaacacgtcgttgtccgagacttcccggggtggccagccttcggttacaacgaagtctgctagagataagaaaacagaggcagcacctttaaaatcaaagagtgaaaaggccggcagtgagaaaaggagcagtagaaggactggtccacagagtccatgtgaacggacagatatcaggatggcaatagtagccgatcacctgggacttagttggacagaactggcaagggaactgaatttttcagtggatgaaatcaatcaaatacgtgtggaaaatccaaattctttaatttctcagagcttcatgttattaaaaaaatgggttaccagagacggaaaaaatgccacaactgatgccttaacttcggtcttgacaaaaattaatcgaatagatatagtgacactgctagaaggaccaatatttgattatggaaatatttcaggcaccagaagttttgcagatgagaacaatgttttccatgaccctgttgatggttggcagaatgagacatcaagtggaaacctagagtcctgcgctcaagctcgaagagtaactggtgggttactagatcgactggatgacagccctgaccagtgtagagattccattacctcatatctcaaaggagaagctggcaaatttgaagcaaatggaagccatacagaaatcactccagaagcaatgtacaaaatctactttcccagaatccccaaagtgatgtagggaaaacagagtacccaagggaaacttctgaaaccaaaaatacatggatctggtcatgttgaagaaccagcatcaccactagcagccatatccagaaatcctcctagaagaaaacccagcaagccttataatagaagagacctaaacccctgtgtgcccctgtcaagtatgaaaaaagatgaagtaggaccttcctcccagccagaatggcaagccaaggcttaggcttccatggaaggaaggaggggtcccagtgggttttgaggcaaaaggcaggggaggaaggtttttaagggtgaaaacgaagaaagaaatccggcatgtggaaaagaagagccactcgtaacagcgaacggtcagtcaaggatcataagtttttactgccagtattgagaaattcgtggaagaaatgtcagcaggaagtaaaaattcaccgagaagtgtgtgtgtgttcgctgcttccacaacattaatggccatgattttttttatgcaaaaagaaaagaaaagaaaaccacccaacattttaatttagcatgagcccaatttacagagcatggaaatcactttcatttccggattggcgcgtgtgcaattagcaatgcagtgtatatacaagaagccatgctgttaacagtttatctcaagtaatttggtgtcatttacaaaaggaagaaattcctgccatcagaagggacagaaggagatggaatgatcaaatcacagaggaaacactaaaattacttaaatctacaacagctcgccttatttttcttgggacccaaactgttcagggtataaacactatttgtttcttttttaaaacatcgatagttttgctgtaaataataacactgtataaattctaacagaaaaatagaatattctgtttgtgttctaagaggcagtgcctcttagaacacaaacagaatattgcaaatgcatttaacaaataggggtctcaagtgacttcaccctagaagaggagggagggattctgggtgggggtgactcttcactgattcttgtgatattgaggcaattatgaatgtttggtatatgcaaaactgctagcttggatttaaaaaaaaaacaaatctttaaaatctgctgcaaatttaaataattcccaaaatgaggaattctgtagttctgtgaaaaatttttttcttcagaatactaatattttgatgcatgtgtatcaccttattttgattaaatcttttccaattttgcaaacactacagtatactgcaacacaaaagattttatctgtaaacacaaagcccttcatctaatatttgttggctattgccaatttttcaatggaaatggaccctaaaaacaaccaaaaaaaaataaccttatacggtagttgcctttagggggggtggggggggatggccatcctggttaggtgccttaaaagggggggtaaaaagccttgccccctttagagggtggggtggtgccccataaaaggccccccantcgggggtatttaaaaagggaccgaaccagaaaccccttagcctagtagaagggccagcacgcctgtaaaattattacctgtattgtgtaccgggcctataagatgtagacacctttccagtaagccaaatcatttgtaacccattcctagcagtgtcatattaggttagttaaggctgcctgtgttttaaagggcatttttatttgggttttggtgaaattctttaatttgttgattatattcacataaaatcacgcattcattgacacatagcttctaatgacatatgtatgaaaaacccatacactggatgaccctagtcgacttatttaaggcataaaataaattgtgttaaacttcttcacctatctgtgctctacagtctccttgtgttttctggcaaaaggtagttgtctaatcccttgtcatatgagtcctggccaatccaccccattggtcctctttgtgcctctgtggtcactgaagagataatctctaacattcatatgtgccctgcaagctcccagcttataaattctgtgcatttcatgggggagccaagaattaaagattaattgacaagtaagctttgcccacatctgttcaggccttcttgaaaagtgaagaattggagatactatagccagcatgtcaaaaagttgac

SEQ ID NO: 21936 - DNA, 360 bp, Homo sapiens
  SIMILAR (10)..(147): 971254mologous to Rattus norvegicus R-cadherin,accession number D86742,Smith-Waterman Score=229.
atggtactgaaagttcagcagtacacagtcatcgttcaggccacagatatggaaggaaatctcaactatggcctctcaaacacagccacagccatcatcacggtgacagatgtgaatgacaacccgccagaatttaccgccagcacgtctctatttgctctcttccggccagtgagcaatggtcaggaaaagctcagggccaggctgccggggagtctggacataggggaagcagctgctaaccccagggccctgaagaataataacgtccaggcccaagagcgcagcagggctgcacccacacagctggccggacagccccagctgtccttcctccctgactccgagaaagaaaaggaa

SEQ ID NO: 21937 - DNA, 2580 bp, Homo sapiens
  SIMILAR (748)..(1224): 981254mologous to Homo sapiens dJ1107C24.2 (cadherin 4, R- cadherin (retinal)),accession number AL109911,Smith-Waterman Score= 810.
atgcctcttgggttccaacgtctggtgccctctcaggagttccaccggcaacgacccgacgtgcagggactgtggcagagcctggcacatcggcagccctcccgcgagtcagcctgggtgactgcgactgccctgggctctaaaccccggggtacgggccaggcagtcgactacgagctcaacagagctttcatgctgacagtgatggtgtccaaccaggcgcccctggccagcggaatccagatgtccttccagtccacggcaggggtgaccatctccatcatggacatcaacgaggctccctacttcccctcaaaccacaagctgatccgcctggaggagggcgtgccccccggcaccgtgctgaccacgttttcagctgtggaccctgaccggttcatgcagcaggctgtgagatactcaaagctgtcagacccagcgagctggctgcacatcaatgccaccaacggccagatcaccacggcggcagtgctggaccgtgagtccctctacaccaaaaacaacgtctacgaggccaccttcctggcagctgacaatggtgtgggtgtggccgtgtgctctgccgtgtctgttgaggtgccgtgcgcagtggctgtgtgcgtgtgtgcagctgcgggtgtgggtgtggccgtgtgctttgccgtgtctgttgaggtgccgtacgcagtggtgtggctgcccatggcgtgtggcagggtgtcggtcaggagccatggctggactgtggggatacccccggccagcggcaccgggaccctccagatctatctcattgacatcaacgacaacgcccctgagctgctgcccaaggaggcgcagatctgcgagaagcccaacctgaacgccatcaacatcacggcggccgacgctgacgtcgaccccaacatcggcccctacgtcttcgagctgccctttgtcccggcggccgtgcggaagaactggaccatcacccgcctgaacggtgactatgcccaactcagcttgcgcatcctgtacctggaggccgggatgtatgacgtccccatcatcgtcacagactctggaaaccctcccctgtccaacacgtccatcatcaaagtcaaggtgtgcccatgtgatgacaacggggactgcaccaccattggcgcagtggcagcggctggtctgggcaccggtgccatcgtggccatcctcatctgcatcctcatcctgctgagacctgtgacgcctgtgggcagctcccaggtggacttagcagagggaaggagacctgggccactctcgagggcagccgcagtggagggcatccgcagtggggccggggccacggtcaacagcagatccgcctgctgcccggcttctgcccagtcgtgggcacctcagccctggcagggcgatgccgccaatacccacagagctcctcccaagcctccactccgcttcggaatcctcctcacgacatcaggcagccacagccaattaatcgggttggcaaaaaacagccctcctgactgggggatacacgtatgcatgcttacacagacgcatgaagcacctacatccacgactcctgcggatacacgtatgcatgcttacacagacatgcatgaagcacctacatccacgaatgcacacgcacgtgggccgcacatgtgcacagatgtgtccttgcacatccaggcctgcatgtgcagagacatgcgcgtgtgcagtacagccatggtcctgctgtttgtcatgtggatgaagcggcgagagaaggagcgccacacgaagcagctgctcattgaccccgaggacgacgtccgcgacaacatcctcaagtatgacgaggaaggcggtggcgaggaggaccaggactacgacctcagccagctgcagcagccggaagccatggggcacgtgccaagcaaagcccctggcgtgcgtcgcgtggatgagcggccggtgggcgctgagccccagtacccgatcaggcccatggtgccgcacccaggcgacatcggtgacttcatcaatgaggctctgttttgcgccattgcgcctgcacatgccgcagtccctctggagtggccgtcgcgcctgcacgggccgcagtccctctggagtggccacggcgcctgcacgggccgcagtccctctggagtggccacggcgcctgcacatgccgcagtccctctggagtggccacggcgcctgcacatgccgcagtacctctggagtggccaccgcgcctgcacgggccacagtccctctggagtggccatcgcgcctgcacgggccgcagtccctctggagtggccatggcgcctgcacgggccgcagtccctctggagtggccatggcgcctgcacatgccacagtccctctagaggccgtcgcgcctgcatgggccgcagtccctctggagtggccatggcgcctgcacgggccgcagtccctctggagtggccatggcgcctgcacgggccgcagtccctctggagtggccatggcgcctgcacgggccgcagtccctctggagtggccattgcgcctgcacgggccgcagtccctctagagtggccatgggtgccttga

SEQ ID NO: 21938 - DNA, 3156 bp, Homo sapiens
  SIMILAR (152)..(1369): 931254mologous to Homo sapiens 19-APR-1993 Human cadherin-4 coding sequence,accession number T85433_cd1,Smith-Waterman Score= 1937.
tttcgtccgctccgaggccgcggggcgctgggggacgcgctgggcacacgcttcgggcgggcggaaactttcctgggcgagttgagcctcccaccgggctgcgggtgcgatttggagcttcgtggccgatgaagaaagccgcggtttagagcttttcgcccataatgaggatcttacaactagagagacctgcaaggctgggttctctgaagatgattacacggcattaatctcccaaaatattctagaaggggaaaagctacttcaagtcaagttcagcagctgtgtggggaccaaggggacacaatatgagaccaacagcatggacttcaaagttggggcagatgggacagtcttcgccacccgggagctgcaggtcccctccgagcaggtggcgttcacggtgactgcatgggacagccagacagcagagaaatgggacgccgtggtgcggttgctggtggcccagacctcgtccccgcactctggacacaagccgcagaaaggaaagaaggtcgtggctctggacccctctccgcctccgaaggacaccctgctgccgtggccccagcaccagaacgccaacgggctgaggcggcgcaaacgggactgggtcatcccacccatcaacgtgcccgagaactcgcgcgggcccttcccgcagcagctcgtgaggatccggtccgacaaagacaatgacatccccatccggtacagcatcacgggagtgggtgccgaccagccccccatggaggtcttcagcattaactccatgtccggccggatgtacgtcacaaggcccatggaccgggaggagcacgcctcttaccacctccgagcccacgctgtggacatgaatggcaacaaggtggagaaccccatcgacctgtacatctacgtcatcgacatgaatgacaaccaccctgagttcatcaaccaggtctacaactgctccgtggacgagggctccaagccaggcacctacgtgatgaccatcacggccaacgatgctgacgacagcaccacggccaacgggatggtgcggtaccggatcgtgacccagaccccacagagcccgtcccagaatatgttcaccatcaacagcgagactggagatatcgtcacagtggcggctggctgggaccgagagaaagttcagcagtacacagtcatcgttcaggccacagatatggaaggaaatctcaactatggcctctcaaacacaagccacagccatcatcacggtgacaagattgtgaatggacaaccccgccaagaatttaccgccagcacgtttgcaggggaggttcccgaaaaaccgcgttggagaccgtggtcggcaaaccttcacgggttaattgaccgagattaagccccactctccaaactggaatgccgtttaccgcatcatcagtggggatccatccgggcacttcagcgtccgcacagaccccgtaaccaacgagggcatggtcaccgtggtgaaggcagtcgactacgagctcaacagagctttcatgctgacagtgatggtgtccaaccaggcgcccctggccagcggaatccagatgtccttccagtccacggcaggggtgaccatctccatcatggacatcaacgaggctccctacttcccctcaaaccacaagctgatccgcctggaggagggcgtgccccccggcaccgtgctgaccacgttttcagctgtggaccctgaccggttcatgcagcaggctgtgagatactcaaagctgtcagacccagcgagctggctgcacatcaatgccaccaacggccagatcaccacggcggcagtgctggaccgtgagtccctctacaccaaaaacaacgtctacgaggccaccttcctggcagctgacaatgggatacccccggccagcggcaccgggaccctccagatctatctcattgacatcaacgacaacgcccctgagctgctgcccaaggaggcgcagatctgcgagaagcccaacctgaacgccatctacatcacggcggccgacgctgacgtcgaccgcaacatcggcccctacgtcttcgagctgccctttgtcccggcggccgtgcggaagaactggaccatcacccgcctgaacggtgactatgcccaactcagcttgcgcatcctgtacctggaggccgggatgtatgacgtccccatcatcgtcacagactctggaaaccctcccctgtccaacacgtccatcatcaaagtcaaggtgtgcccatgtgatgacaacggggactgcaccaccattggcgcagtggcagcggctggtctgggcgcccagtgccatcgtggccatcctcatctgcatcctcatcctgctgaccatggtcctgctgtttgtcatgtggatgaagcggcgagagaaggagcgccacacgaagcagctgctcattgaccccgaggacgacgtccgcgacaacatcctcaagtatgacgaggaaggcggtggcgaggaggaccaggactacgacctcagccagctgcagcagccggaagccatggggcacgtgccaagcaaagcccctggcgtgcgtcgcgtggatgagcggccggtgggccctgagccccagtacccgatcaggcccatggtgccgcacccaggcgacatcggtgacttcatccaatgagggactccgcgctgctgacaacgacccccacggcacccccttatgactccctgctggtcttcgactacgaggggagcggctccaccgcagggctccgtcagctccctgaactcatccagttccggggaccaagactacgattacctcaacgtactgggggcccagattcaagaagctggcggaacatgtatggaggtggtgaagaggattgactgacctcgcatcttcggaccgaagtgagagccgtgctcggacgccggaggagcaggactgagcagaggcggccggtcttcccgactccctgcggctgtgtccttagtgctgttaggaggccccccaatccccgacgttgagctgtctagcatgagcacccaccccacacagcgccctgcaccacggccgctgcccagcaccgcgctggctggcactgaaggacagcaagaggcactctgtcttcacttgaatttcctagaacagaagcactgtttttaaaaaaag

SEQ ID NO: 21939 - DNA, 1579 bp, Homo sapiens
  SIMILAR (421)..(702): 741254mologous to Homo sapiens bA305P22.1 (novel protein),accession number AL121673,Smith-Waterman Score=327.
  misc_feature (1)...(1579): n = a,t,c or g
gcggccgccacctctccccagcccaggagacggctgcggagccgcagccgcccagaccgcgcagcgcgggaggcaggttccgcacgaaataaatcagaatgagttatgcagaaaaacccgatgaaatcacgaaagatgagtggatggaaaagctcaataacttgcatgtccagagagcagacatgaaccgcctcatcatgaactacctggtcacagagggctttaaggaagcagcggagaagtttcgaatggaatctggaatcgaacctagtgtggatctggaaacacttgatgaacgaatcaagatccgggagattgatacctgaaaaggtcagattcaggaggccattcgcctttgattcaacagcctccacccagagctttttgggacacaaaccggtatctttacttccattttgcaagcaacagcattttgattccgagctgattccgccagcgggaagaccagaggccggcgctggggagttgcacagactcagctggcggacaaggggcgaggagagccgagagtgcctcacagagatggagcgtaccctggcactgctggcctttgacagtcccgaggagtcgcccttcggagacctcctccacaccatgcagaggcagaaggtgtggagtgaagttaaccaagctgtgctagattatgaaaatcgcgagtcaacacccaaactgggcaaaattactgaaactactactttgggctcagaacgagctggaccagaagaaagtaaaatatcccaaaatgacagacctcagcaagggtggtgattgaggagcccaagtagcgcctgcgcttgcgtggtggatccaacaccagccctgcgttcgtggggacttgcctcagatcagcctgcgactgcaagattcttactgcagtagagaactctttttctcccttgtactttttttttgacctgggcatctttttatagggaaaaatggcctttgtaggcagtggaaaacttgtcaaggaaagctgcccgtctcttttggcagtcttgatgcagagcctgcactctgggcacttcgctggaagaatctgggaaggttgcggtttgctccttcccagtgttcgggggcctctggctgctgaaggattcggtctaccacggagggctttgctgtttagggctgcatcccactcaaaatacaggaaaagcaccgaatcatgattctgctttctgttaagccttaggccagacattgggccttcacctacaagtttttccttacccctgtggtttttgtgtttttttttttttttctttttccataaggaaagaatatataaatttgtaaatcctaattcaaagatggccncgtgtgtgagggccattgagttttgatttgttttccctttggtctgggttagctgtggcttttgggggatgcgtgtgagggggctatgtgttttttaattttttaaatatatattttggtgctgtgtgtgggtaaggagacttgttcctagtggatcaatgaaccatctcttctgggcagttttgttgaaaataaaggtttctctttgatttcaagaatgaccaaaaaaaaaaaaaaa

SEQ ID NO: 21940 - DNA, 454 bp, Homo sapiens
  SIMILAR (196)..(234): 761254mologous to Gorilla gorilla protein 4,accession number V00658,Smith-Waterman Score=63.
gaaatcatagcttgggagttgtttatgcttcagagatttttaaatcaaggctaccttttaatgtaaatgcacttaaattgaccccacttatttaaatgatgtgaaatagctcagcaatgttcccatgacctgtttttataccttttgatattttatgtgacctccaataagctggacagataataacagaacccttggcattgggctaccactgccactgtgatgctgagtctggtgtcagcagtgaagatgagggtgggaagccaccgaggaagctggaggttgacacaagtggcagtaagggcacatcattacctaggaagaaccttcagaaatcctctgcaaaagacggcctgtttccacccttcctattcttgtttcttccttctgccactttttttttttttctttcaactaaggaatagaatggccagaagtagttgacaggccctaa

SEQ ID NO: 21941 - DNA, 840 bp, Homo sapiens
  SIMILAR (408)..(40): 971254mologous to Homo sapiens A secreted protein encoded by clone dt674_2,accession number W80408,Smith-Waterman Score=614.
ttagctgctacagccatcggtacagctgccaaatggaactgccaacacctccctctcctttgcggctgtttctgccgtttcaccacctccgtgtagaacttccacagccacaacccttcctcctcccatgccctcattcttttgtgtgtttccttctccttccatgtccccgtccccttccgagttcctgtcctgcatcgcttctgtctccagagtgcactctttgtcctcttcctcctctgggtcctcatccaccgcttcctccctgaacttttctgccattatgggatcttcctcagcaacagcttcctgggtccttagcacgacatccactcctccttgcccttcagctctcccctccagtcctgcgcaggagtcgtgatctttggctgctagctcctctgcctggctctcagagcatccatcattctcatctttcacattgtcatgggcatctggtgccttctgtgatgaggtttcactctctttttcagggtctaaattatcttttttatcatccaaaggtgactgcggtattccattcatttgaacatcagcctgtccttcttcattagatttttcaccttgtttctcctcatctacttcaaagtcttcttcatactctgaaataggaaaatctccacagccaatctgaagagccccaggtctggatgggaccaggcccagggtgccgtagacatggcttggagtcactgggcttcctgcagggatgggcactacaggcacgaggatgcaggagcggtgaccgccccaggggcctctctccttgacacctagacattcgaaggcccttggaactttaattctggccctcttcat

SEQ ID NO: 21942 - DNA, 1497 bp, Homo sapiens
  SIMILAR (1156)..(995): 381254mologous to Homo sapiens A secreted protein encoded by clone dt674_2,accession number W80408,Smith-Waterman Score=87.
ctagacctgcacgttgttgggggaaacatctgcagtctcgctttctccttgcaccatatgctgttgcttctctcgggtttcagtgaaatcaggcttcactggaagtgttgccatcgcctgtagactctccggactcaattccctctctccctcccgtgataatcctaatcggaatttttcagctgctcctgtctcctgcctcccatcgccactcccagtggctgcctcctggccctctgacccttcctcttgctcctgtcctagccctgaggtcttccgctccagggctcctggagtgcccaccccagcctctgttgtatatgtcactgtcatctcctctgctgctggcacttcctccccactccgtgctaattcctctaccaccaccttccctgcagctgctgtttttcctactaactcatcctgttggtgccaggtttcttcctcagcaacatctgaaaaggaggaggctttatttgctattgttttctcctcggctgtctccgaacctgccaacacctccctctcctctgcggctgtttctgccgtttcaccacctccgtgtagaacttccacagccacaacccttcctcctcccatgccctcattcttttgtgtgtttccttctccttccatgtccccgtccccttccgagttcctgtcctgcatcgcttctgtctccagagtgcactctttgtcctcttcctcctctgggtcctcatccaccgcttcctccctgaacttttctgccattatgggatcttcctcagcaacagcttcctgggtccttagcacgacatccactcctccttgcccttcagctctcccctccagtcctgcgcaggagtcgtgatctttggctgctagctcctctgcctggcctgtggctgggatcagcccctcaggggcctgcacctttcctgctggctcagcttcaggagctgctaaggccccctctccatcttggcggtgcccttccttcagggccctattctccctgctggacagctcttctctgtctttgtgctctgtgtctctggcttcactcagtctttcccctcctccttctttcctcagagctgttatgtttccagcgactttcaaatccaggcgttgcttcaaatatgggaaccactgtctctttagtgatcttctctggttggaggtatgtgcactgtaggagatcaagaacaacagcatgggctgaaaaggaaccttcaagaggtcaaaaacatgcctgttagcatggtgtcctggaagctggaaggttctcacaagctgcagaatggtcaaataagatgagcacagttggcccaaagagtaatcgtggccatagtgttctggttgatgaaggacattccagtccgttagcactctaaccttctcagaagatggggaccatcttcttcctgcttgcttgaatttccttttttcaactctacttttaccaattctctcccttggttgctgtctttgacaggatgttttctctctcat

SEQ ID NO: 21943 - DNA, 1341 bp, Homo sapiens
  SIMILAR (600)..(4): 871254mologous to Homo sapiens putative p150,accession number U93565,Smith-Waterman Score=915.
ctatagttcttttaattgtgatgttagggtgtggattttaaatctctcctgctttctcttgtgggcatttagtgctataaatttccctctacacactgctttaaatgtatcccagagattctggtacgttttgtctttattctcattggtttcaaagaacatctttatttctgccttcattttgttatgtacccagcggtcattcaggagcaggttgttcagtttccatgtagctgtgtggttttgagtgagattcttaatcctgagttctaatttcattgcactgtggtctgagagacagtttgttgtgatttctgttcttttacatttgctgaggagtgctttacttccaactatgtggtcaattttagaataagtgtgatgtggtgctgaaaagaatgtatattctgttgatttggggtggagagttctgtagatggctattaggtccgcttggtgcagagctctgttcaagtcctgtatatccttgttaattttctgtctcgttgatctgtctgatactgacagtggggtgttaaagtctcccactagtattgtgtgggagtctaagtctctttgtaggtctctaagaacttgcttatgaatctgggtgctctctcttcttgcttgtagggtttctgcagagacatctgctgttaatatgatgggcttccctttgtggataacccgacctttctctctggctgcccttaacattttttctttcattccaaccttggtgaatctgacaactatgtgtcttggggttgctcttctcaaggagtatctttgtggtgttctctgtatttcctgaatttgaatgttgtcctgccttgctagattggggaagttctcctggataatgtcctgaagagtgttttctaacttggttctgttctccccattacttctctgaagcttctgccgcggggtccaaaagggatcctgcaaaaatgagccattctcaccccgctgggtaagtgacaactggagcttttccacgctgtggcaggtggcggcttcagccagctgcccctcctcctccctcctgatgagattgctttgcaggacttgaagggccagaggcccctcttcactgtcttgctgaagctcctgggtatttctctctggaagaaatagctcagacttgggaaggccactggatcctctggcaacatcagcccctgtaggtggggagtggatttttcccaaagggtaaatgaccctcaaggccagcaggtgtcgcaatagctccatgttttcagcatgatttttggcttttctgctttgctgtaacatattaattgggtgtttggcagcatggaactttcctgcgatggg

SEQ ID NO: 21944 - DNA, 1551 bp, Homo sapiens
  SIMILAR (576)..(1): 1001254mologous to Cloning vector pSacBII SacB,accession number U09128,Smith-Waterman Score=1018.
cgtgtttgaagtgatcagcggcttcattacttttttcaatgtgtaatcattatttaactctatgataccgagggcgccgttcgctaactcagcatcgcgttttttagcgctctgctgaagcttctggctttctttacggaagaagttcgtgccgccgccgtagtacgctttgttaaataaagattcttcgccttggtatccgttttctgttcccgtgttggcttcgaatacaaggtatttatggcctttgtcttcaacgtagtgagggtctctcagcgtatggttgtcgccggatgtataattgccttcatcgataaactgctgaacgttctgatatgtttttccgtctccgtcaaaaatcgttttgtgatcttccactccgttgattttgagtgtgtcatcagattttgacacatttacctgcgctgttgtcaggctttgtttgccgtaatgtttaccggaatagtcagtgtagaataaacggatttttccgtcagatgtaaaggttgcagaaccggaccattcttgcgtctgatctttcaggatcggatcgttggcgtcgaacttatcgctgtccaccctccgcacctgccgcggggtccaaaagggatcctgcaaaaatgagccattctcaccccgctgggtaagtgacaactggagcttttccacgctgtggcaggtggcggcttcagccagctgcccctcctcctccctcctgcaaagctcacggactggaatgtccttcatcaaccagaacactatggccacgattactctttgggccaactggtgggtggggagacaggattggcatgttattttcaacagaccttcttgtgtgctctccattaattgcgttgcgctcactgcccgctttccagtcgggaaacctgtcgtgccagctgcattaatgaatcggccaacgcgcggggagaggcggtttgcgtattgggcgccagggtggtttttcttttcaccagtgagacgggcaacagctgattgcccttcaccgcctggccctgagagagttgcagcaagcggtccacgctggtttgccccagcaggcgaaaatcctgtttgatggtggttccgaaatcggcaaaatccctgccgcggggtccaaaagggatcctgcaaaaatgagccattctcaccccgctgggtaagtgacaactggagcttttccacgctgtggcaggtggcggcttcagccagctgcccctcctcctccctcctgccagtctcaggtgtttcttcatagccatatgaaaatgaactaatacggtaaataggtaccattagagtggggtactgctgtaaagaacctgaccatacccgagaggtcttctcaacactatcaccccggagcacttcaagagtaaacttcacatcccgaccacatacaggcaaagtaatggcattaccgcgagccattactcctacgcgcgcaattaacgaatccaccatcggggcagctggtgtcgataacgaagtatcttcaaccggttgagtattgagcgtatgttttggaataacaggcgcacgcttcat

SEQ ID NO: 21945 - DNA, 3423 bp, Homo sapiens
  SIMILAR (1082)..(1056): 1001254mologous to Homo sapiens A secreted protein encoded by clone dt674_2,accession number W80408,Smith-Waterman Score=50.
caccaccttccctgcagctgctgtttttcccactaactcatcctgttggtgccaggtttcttcctcagcaacatctgaaaaggaggaggctttatttgctattgttttctcctcggctgtctccgaacctgccaacacctccctctcctctgcggctgtttctgccgtttcaccacctccgtgtagaacttccacagccacaacccttcctcctcccatgccctcattcttttgtgtgtttccttctccttccatgtccccgtccccttccgagttcctgtcctgcatcgcttctgtctccagagtgcactctttgtcctcttcctcctctgggtcctcatccaccgcttcctccctgaacttttctgccattatgggatcttcctcagcaacagcttcctgggtccttagcacgacatccactcctccttgcccttcagctctcccctccagtcctgcgcaggagtcgtgatctttggctgctagctcctctgcctggcctgtggctgggatcagcccctcaggggcctgcacctttcctgctggctcagcttcaggagctgctaaggccccctctccatcttggcggtgcccttccttcagggccctattctccctgctggacagctcttctctgtctttgtgctctgtgtctctggcttcactcagtctttcccctcctccttctttcctcagagctgttatgttttccagcgacttttcaaatccaggcgttgcttcaaatatgggaaccactgtctcttttagtgaatcttctcctagaagccctggattgtcagacaactcagaagcctccacaggtgcttcgttctcagcatcagatcccatttcatttgggggagcttttgtctcttcctcagctcttacttctgtctctgtttccccttcttccgctttaagtttttgctcttctttaaaagcatcttcatccttgagtgcatttgcccttgtcacctcttctctctcagagtcagttttcctcagagatgtttttggcctctcagctttccttcgctctcttgctaaatctaattccttgggtaaaatttctttcctatcatcttccctattagcttctgcctcagtcaccatctcttccccttccacatcttccttgcaaaggaaggcttcctttgcaaggcttccttcctcagggctgccctccgaaacctgcatccggcttgcctctgcctctcctgtgaaggggctcaagcgtgtttctgttctcataacctcttttctctctttggctggttcctctcccccaagaattgcctcttcagaaccgtcctctctctttgatgctgtgtcctccatgggtcctgtgtcctctaggtctatggatgcttcctcttcactttctccgacatcactcacagccaccccaccctcagcctctccctcctccgatgtcgctgcctctctcagggctgctacttcatgaagatgctccaagttcagggctgctgcttcatttgcaagcactgccttctctaaaccctgttccccttcagaagctgctttgtctgtctcaagcactgtgagcatcaaggcttgcttttcaggagcctcatctttactcagacccacagcatcttttgctgctgcttgtcctatggggtctgaccccccttcacccagccttctgaccccttctgcttctgctgctccctctgcccccctttctatgcctggagggatctcccttttttctgtaaactcttctgccaattctggctgctctgctgttggcttccacgccctcaagggagcctcatgaacagctcctgcttctccccacagtgctgcctccccttttccctgtactatgtcagcatctctgtgctggggcgcttcatcttcctccattgcttctttcttctccagtgtatacgttttttgcaccaattgctgggattccttgtttgagttgattgctgctgtttcatccaccatgaaattcattgttggtgcaccaagagccaggacataggctaatggcaatgaatcctttctgccacttgtgtcaacctccagcttcctcggtggcttcccaccctcatcttcactgctgacaccagactcagcatcacagtggcagtggtagcccaatgccaagggttctgttattatctgtccagcaccttcctccaacccagggagacctgcctttttgtccttcacctgagcagtgctttcttcccaaagcttactcttatccttttccttttcttctgcagaaacatgtttcccggacttctcagataaaccctctgcaatctcttgggttcctttctccgttccttctttaagaacattctcaaagctttcgtctattggcatcggcttggtctccacatctgcttttgttatttcttggtcttcaatttcaatttctaaggattcctcaattggaaggtgagactttcttggcttatcattttcactcagttcctgagaagatgaccttctggcactttcatctgtgctgctgtcagtgtgggcttccctgtcccccactgcagattcatcctcactgtcactagaataagggtgacttctggatgaggttgatgaagcagttttcatattcagtaaacagcctatgttacatgataagctgaacaactcgccttgtttatcctcttccagttcactctcagagcatccatcattctcatctttcacattgtcatgggcatctggtgccttctgtgatgaggtttcactctctttttcagggtctaaattatcttttttatcatccaaaggtgactgcggtattccattcatttgaacatcagcctgtccttcttcattagatttttcaccttgtttctcctcatctacttcaaagtcttcttcatactcatattttaaagtattttcctggtcgtcttccaagacttcttgtcctggttttcctttacttgtcatttcctccacagcagttaccacttctttgagccctgtttttatttcttgagctgaaaatttggctgaaacagaggttttgttctccttgatctcatttctttttggtatcacatactctctctctttcctcactttcccctcagccttcttcagttcctctcctttctcagtgctcttttctttcctagatttcggcaaagacggttttttgtcaaggcccattgcaataatgcacctaaccctgtaccatttaaaccagtctgactcaacttttacctgacctttttcaagtagtttgcctttgtagacacaaaggttttccccaccacagtgctgctgataaactttaatttcatcccggaagtcaggattatcagaagataggtgcacatttttccccaaatagatcattgtaatagctgcattactatgtaaggatgttttatgaatccttcttgaatccat

SEQ ID NO: 21946 - DNA, 4374 bp, Homo sapiens
  SIMILAR (2618)..(2644): 1001254mologous to Homo sapiens A secreted protein encoded by clone dt674_2,accession number W80408,Smith-Waterman Score=50.
gcgcgactgtcgcagcgccagcgcgcacggggccccacgcacccacccttcgcacctgccgcggggtccaaaagggatcctgcaaaaatgagccattctcaccccgctgggttacttgctgcatataatagccttatggataaacacctggctgggtattttaacaatacaaggataaggcgtcatctcttaagatcaggactgatcacaagaagtggaagaatactttctgaaaaagaatataaactaaatatgatgaagcgggatcatcaaaaatatatccgggaatgcttagcccaggcaatttttcataaagttcttgatatggagcgttaccatcagcttgaaataaaaaagaaattggagaccttagctaggaaggagcgaatccagaggtttaagggagagcacacaagaaggtctgttgaaaataacatgccaatcctgtctccccacccaccagttggcccaaagagtaatcgtggccatagtgttctggttgatgaaggacattccagtccgttagcactgacagcccctcgaccatatactgctccaggaaatatgcagcctccaattcgattacagcctcttcccagtaatcctgcagtagaaactgttccaaaggattcaagaaggattcataaaacatccttacatagtaatgcagctattacaatgatctatttggggaaaaatgtgcacctatcttctgataatcctgacttccgggatgaaattaaagtttatcagcagcactgtggtggggaaaacctttgtgtctacaaaggcaaactacttgaaaaagagtatgaagaagactttgaagtagatgaggagaaacaaggtgaaaaatctaatgaagaaggacaggctgatgttcaaatgaatggaataccgcagtcacctttggatgataaaaaagataatttagaccctgaaaaagagagtgaaacctcatcacagaaggcaccagatgcccatgacaatgtgaaagatgagaatgatggatgctctgagagtgaactggaagaggataaacaaggcgagttgttcagcttatcatgtaacataggctgtttactgaatatgaaaactgcttcatcaacctcatccagaagtcacccttattctagtgacagtgaggatgaatctgcagtgggggacagggaagcccacactgacagcagcacagatgaaagtgccagaaggtcatcttctcaggaactgagtgaaaatgataagccaagaaagtctcaccttccaattgaggaatccttagaaattgaaattgaagaccaagaaataacaaaagcagatgtggagaccaagccgatgccaatagacgaaagctttgagaatgttcttaaagaaggaacggagaaaggaacccaagagattgcagagggtttatctgagaagtccgggaaacatgtttctgcagaagaaaaggaaaaggataagagtaagctttgggaagaaagcactgctcaggtgaaggacaaaaaggcaggtctccctgggttggaggaaggtgctggacagataataacagaacccttggcattgggctaccactgccactgtgatgctgagtctggtgtcagcagtgaagatgagggtgggaagccaccgaggaagctggaggttgacacaagtggcagaaaggattcattgccattagcctatgtcctggctcttggtgcaccaacaatgaatttcatggtggatgaaacagcagcaatcaactcaaacaaggaatcccagcaattggtgcaaaaaacgtatacactggagaagaaagaagcaatggaggaagatgaagcgccccagcacagagatgctgacatagtacagggaaaaggggaggcagcactgtggggagaagcaggagctgttcatgaggctcccttgagggcgtggaagccaacagcagagcagccagaattggcagaagagtttacagaaaaaagggagatccctccaggcatagaaaggggggcagagggagcagcagaagcagaaggggtcagaaggctgggtgaaggggggtcagaccccataggacaagcagcagcaaaagatgctgtgggtctgagtaaagatgaggctcctgaaaagcaagccttgatgctcacagtgcttgagacagacaaagcagcttctgaaggggaacagggtttagagaaggcagtgcttgcaaatgaagcagcagccctgaacttggagcatcttcatgaagtagcagccctgagagaggcagcgacatcggaggagggagaggctgagggtggggtggctgtgagtgatgtcggagaaagtgaagaggaagcatccatagacctagaggacacaggacccatggaggacacagcatcaaagagagaggacggttctgaagaggcaattcttgggggagaggaaccagccaaagagagaaaagaggttatgagaacagaaacacgcttgagccccttcacaggagaggcagaggcaagccggatgcaggtttcggagggcagccctgaggaaggaagccttgcaaaggaagccttcctttgcaaggaagatgtggaaggggaagagatggtgactgaggcagaagctaatagggaagatgataggaaagaaattttacccaaggaattagatttagcaagagagcgaaggaaagctgagaggccaaaaacatctctgaggaaaactgactctgagagagaagaggtgacaagggcaaatgcactcaaggatgaagatgcttttaaagaagagcaaaaacttaaagcggaagaaggggaaacagagacagaagtaagagctgaggaagagacaaaagctcccccaaatgaaatgggatctgatgctgagaacgaagcacctgtggaggcttctgagttgtctgacaatccagggcttctaggagaagattcactaaaagagacagtggttcccatatttgaagcaacgcctggatttgaaaagtcgctggaaaacataacagctctgaggaaagaaggaggaggggaaagactgagtgaagccagagacacagagcacaaagacagagaagagctgtccagcagggagaatagggccctgaaggaagggcaccgccaagatggagagggggccttagcagctcctgaagctgagccagcaggaaaggtgcaggcccctgaggggctgatcccagccacaggccaggcagaggagctagcagccaaagatcacgactcctgcgcaggactggaggggagagctgaagggcaaggaggagtggatgtcgtgctaaggacccaggaagctgttgctgaggaagatcccataatggcagaaaagttcagggaggaagcggtggatgaggacccagaggaggaagaggacaaagagtgcactctggagacagaagcgatgcaggacaggaactcggaaggggacggggacatggaaggagaaggaaacacacaaaagaatgagggcatgggaggaggaagggttgtggctgtggaagttctacacggaggtggtgaaacggcagaaacagccgcagaggagagggaggtgttggcaggttcggagacagccgaggagaaaacaatagcaaataaagcctcctccttttcagatgttgctgaggaagaaacctggcaccaacaggatgagttagtaggaaaaacagcagctgcagggaaggtggtggtagaggaattagcacggagtggggaggaagtgccagcagcagaggagatgacagtgacatatacaacagaggctggggtgggcactccaggagccctggagcggaagacctcagggctaggacaggagcaagaggaagggtcagagggccaggaggcagccactgggagtggcgatgggaggcaggagacaggagcagctgaaaaattccgattaggattatcacgggagggagagagggaattgagtccggagagtctacaggcgatggcaacacttccagtgaagcctgatttcactgaaacccgagagaagcaacagcatatggtgcaaggagaaagcgagactgcagatgtttcccccaacaacgtgcagaaaaacattaatccaaaaaggcaagctctcagcaggagggaggaggaggggcagctggctgaagccgccacctgccacagcgtggaaaagctccagttgtcacttacccagcggggtgagaatggctcatttttgcaggatcccttttggaccccgcggcaggtgcggagggtggcttccctgttgctaagggaggagagaggcaagcgcccagggtctggagaagcggaggcgctactggaaccgagcctgcggaagctggaagtgaagccagcttctacccctttttctgggccctga

SEQ ID NO: 21947 - DNA, 2086 bp, Homo sapiens
  SIMILAR (273)..(413): 471254mologous to Nicotiana tabacum Pistil extensin like protein, partial CDS only,accession number Z14020,Smith-Waterman Score=105.
  misc_feature (1)...(2086): n = a,t,c or g
ccttctttaggagcaagtaaaaacgatggcgtaacacgaaccacatttacacaactgttgcaacggcggtaagtaaaagaatcattaacacaaaaatcaaaacgttttcaaaataaacttataaatcgccgaggctgggaaaggcctaggtctggggccagctggacccaacgcagggcacttgggggaagggggtgtgtggacaggtggctcgggatcatcggccccacagggtnccaggggcaagactccgcgggttcccggccctcaatccgaccccgcagaccgccccctccccaagcccggacccgaggcctcgtccgccggcccctctgacccagggccccggacagaagcgcaatgcagcctgcgccccacctccttccctcgccccgccacctcgatcccggcccggagccgccgacacctctcacgcagcaggggcagaaagggacgcgggcgccacggccccgctgcccgcggagccagaaataggcgacttcgggccctgcggtccggaggcgagaagcgcgcgggagcgcgtctctcaggacgcgggccccgagtcgcgactccactcacgcaggcatccaaggcaacgtggcgttgcaaccctgatggaggtttgacgtcagggaagacattagaatatgtttatgagtttcccccctttcgttttagttcaacacaagatgagacacatgtgaatactgggtcatcgtctgaagtggtgcatttggatgatgctttttctgaagaagaggaagaggatgaggataaggttgaggatgaggatgctaccgaagagagaccatccgaggtttcagaacctattgaagagttacattccagacctcataaatctcaggaaggcacgcaggaggtttcagttcgaccatcagttattcaaaaactggagaagggacagcagcagcccttggagtttgttcataaaattggggccagtgtgagaaaatgtaacctagtagatattggtcaggctacaaataatagaagcaacttggtacgccccccagtgatttgtaatgctcctgctagttgtttacctgaaagctctaacgatagaccagttacagctaatacaactagtttaccaccagcagctcatttggattcagttagcaaatgtgacccaaacaaagttgagaaatatcttgaacagccagatggggcctctagaaatcctgtgccatcatcccatgtagaaactacttcattttcgtatcagaaacataaagaatcaaataggaaatctttacgcatgaattcagataagttggttttgtggaaagatgtaaaatctcagggtaaaactttatcagctggcttgaaattccatgaacgcatgggtactaagggctccttaagagttaaatctccttccaaattagcagtaaacccgaataaaactgacatgccttctaataaaggaatctttgaagatactattgcaaagaaccatgaggaattcttttctaacatggattgtacccaagaagaaaagcatttggtttttaacaagacagccttttgggaacagaagtgctcagtgagttctgaaatgaagtttgattgtatctctcttcagtcagcatctgatcagccccaagagactgcacaagacttaagtctttggaaggaggagcaaattgaccaagaagataactatgagtctagaggttcagaaatgagttttgattgcagttcctcttttcattcactgactgaccaatctaaagtgagtgccaaagaagtaaacctttccaaggaatccactagtgactacccccaacaatctgtaacagaagtaaaccttcctaaggaagtgcacattggtttggttgataagaactatggttccagtagctctgaatcagtggttgacagacccccagtggctgtcacagaaacaaaacttcggaagaaggctcataccagcttggttgataactatggatcgagttgttctgaaacaagttttgattgtgatgtttctcttgagtcagtagttgatcatccccaactgactgtcaaaggaagaaacctgtatagaaacagaggctag

SEQ ID NO: 21948 - DNA, 421 bp, Homo sapiens
  SIMILAR (199)..(149): 941254mologous to Homo sapiens Human CDC25C phosphatase,accession number R98214,Smith-Waterman Score=84.
ggaacagtagtaatgggactgcccaaatatttcatttcactgtccaccaagtttccattgtcgttttctctatctgcagatgaactacacattgcatctctctttctatggccacggtccaaaccattcggagtgatacaaagaagctgtgcatcccagctaaatgcacttcctgaagtcctgaagaatccaggtgacccagacaaaatgcttaggtttgcagaatcaccaagaaatttgcccgctggagttctagggacatctggacagacggtaaaggaagtgtctctctccaggagcaggtttaccattttcctttgattagacctacacctgggtcctgagccagagcttccttcctctcttgtggatgagaagagttccgtagacatggtcttacgttttcgtcgacccgggaatt

SEQ ID NO: 21949 - DNA, 2055 bp, Homo sapiens
  SIMILAR (211)..(1629): 1001254mologous to Homo sapiens Human CDC25C phosphatase,accession number R98214,Smith-Waterman Score=2493.
caggaagactctgagtccgacgttggcctacccagtcggaaggcagagctgcaatctagttaactacctcctttcccctagatttcctttcattctgctcaagtcttcgcctgtgtccgatccctatctactttctctcctcttgtagcaagcctcagactccaggcttgagctaggttttgtttttctcctggtgagaattcgaagaccatgtctacggaactcttctcatccacaagagaggaaggaagctctggctcaggacccagttttaggtctaatcaaaggaaaatgttaaacctgctcctggagagagacacttcctttaccgtctgtccagatgtccctagaactccagtgggcaaatttcttggtgattctgcaaacctaagcattttgtctggaggaaccccaaaatgttgcctcgatctttcgaatcttagcagtggggagataactgccactcagcttaccacttctgcagaccttgatgaaactggtcacctggattcttcaggacttcaggaagtgcatttagctgggatgaatcatgaccagcacctaatgaaatgtagcccagcacagcttctttgtagcactccgaatggtttggaccgtggccatagaaagagagatgcaatgtgtagttcatctgcaaataaagaaaatgacaatggaaacttggtggacagtgaaatgaaatatttgggcagtcccattactactgttccaaaattggataaaaatccaaacctaggagaagaccaggcagaagagatttcagatgaattaatggagttttccctgaaagatcaagaagcaaaggtgagcagaagtggcctatatcgctccccgtcgatgccagagaacttgaacaggccaagactgaagcaggtggaaaaattcaaggacaacacaataccagataaagttaaaaaaaagtatttttctggccaaggaaagctcaggaagggcttatgtttaaagaagacagtctctctgtgtgacattactatcactcagatgctggaggaagattctaaccaggggcacctgattggtgatttttccaaggtatgtgcgctgccaaccgtgtcagggaaacaccaagatctgaagtatgtcaacccagaaacagtggctgccttactgtcggggaagttccagggtctgattgagaagttttatgtcattgattgtcgctatccatatgagtatctgggaggacacatccagggagccttaaacttatatagtcaggaagaactgtttaacttctttctgaagaagcccatcgtccctttggacacccagaagagaataatcatcgtgttccactgtgaattctcctcagagaggggcccccgaatgtgccgctgtctgcgtgaagaggacaggtctctgaaccagtatcctgcattgtactacccagagctatatatccttaaaggcggctacagagacttctttccagaatatatggaactgtgtgaaccacagagctactgccctatgcatcatcaggaccacaagactgagttgctgaggtgtcgaagccagagcaaagtgcaggaaggggagcggcagctgcgggagcagattgcccttctggtgaaggacatgagcccatgataacattccagccactggctgctaacaagtcaccaaaaagacactgcagaaaccctgagcagaaagaggccttctggatggccaaacccaagattattaaaagatgtctctgcaaaccaacaggctaccaacttgtatccaggcctgggaatggattaggtttcagcagagctgaaagctggtggcagagtcctggagctggctctataaggcagccttgagttgcatagagatttgtattggttcagggaactctggcattccttttcccaactcctcatgtcttctcacaagccagccaactctttctctctgggcttcgggctatgcaagagcgttgtctaccttctttctttgtattttccttctttgtttccccctctttcttttttaaaaatggaaaaataaacactacagaatgag

SEQ ID NO: 21950 - DNA, 2145 bp, Homo sapiens
  SIMILAR (421)..(1155): 271254mologous to Homo sapiens putative nuclear protein,accession number AF251040,Smith-Waterman Score=93.
atggtctatgaaaggcaagtcaatgcctggatgaactacacattgcatctctctttctatggccacggtccaaaccattcggagtgctacaaagaagctgtgcctaaaaaagagagtttgctgagaacgtccagcatcctcaagccacaggtgggaagtagagacaaagttattctctattggtggcaaaagcagatagattatggcaagtgcacacctggctaccagtgctttctgcaccaggtcctcaagttcaggccgatccggcagctgcaagaggggctcctgggactccgagcaggccctaatccgcgcttggaccacacttcccagcagccttcacgccgcggacgggtcctttgctgggggaagggggattccttcgaagaggtggtcgtggagggcggggcagcagagcagcctttgcctgatcatgcagacatcctccaactgtgggaactctttccagcttgtgtctgaaggtgcttcctggaggggcctgccccactgttcctgtgctgagttacaggacagcctcaacttcagctaccatccctcaggcctgagcctgtccgtcagaccatccagtccgggaaactcccccaaggagcagcccttctcccaagtcctaagacctgagcccccagatccagagaagcttcctgtgccccctgcccctccatccaagaggcactgccgctcactctcagtgcccgtggacctgtctcgctggcagccggtgtggcggcccgccccctccaagctgtggactcccataaagcaccgtggcagtggtggagggggtgggccgcaggtgcctcaccagagccccccaaagcgggtctccagcctcaggttcctcacaagctcccagtgcctcttctcaatgtgccccagctcacagaccctacagccctcctttcttcagcctggccctggcccaagattcctctcgaccctgcgccgcctcccctcaaagtggctcctgggagagtgatgctgagtccttgtcaccttgcccacctcagcgccgcttctccctgtcacccagtctgggcccgcaggcaagccgcttcttgccctctgcccggagctctcccgcatcctccccagagctgcccctggcgacctgagggtctccgcaaccttccccgaaagccgctcacagccttgtgatctggatgcccgcaaaactggggtcaagcggcgccacgaggaagacccccggcgtctgcggccttcgttggactttgacaagatgaatcagaaaccatactcaggaggtctttgtctccaagaaacagcccgggaaggcagcagcatctctccaccatggttcatggcctgtagccccccacccctctctgcttcctgcagccccactgggggttcctcccaggtgctgagtgaaagcgaaaaggaggaggagggggctgtgcggtggggtcggcaggcgctgagcaagcggaccctgtgccagcgggactttggggacctggacttgaatttgattgaggaaaactaaaactgaaaggctacttcctggggccacacagactgactctctcatggctactaacaagtgttcgagttccccaaggctgggggccgagcctgggaatgggggtgagtggagggctccgactcagggcagctggaaatcttctcgctccagcaagctcgaccatgccaagagactggccgggacaagataaacggagctggtggcgggagggacagccccagagcagacccttcctatggcggccctgagtgtgagtatccctgccaccaagagagcaatgggcagggaaggaaggggtctgccgaccccagctcggggaatttcactagcccctttgcttcaaagggcacttgtgtcttagaatttggccagggtggggggttgagtcagcctcctcagagaaactgcgtgagagtgtgtgcgtgcatgggagtgtacttgtggaaaggtgtggttgcgtagccttagggaaggaaggcaattgctccttaacaacagagtatcatgatacccccaggatcttgagttttttacaggatgttgggtttgctcaaggagtcaagaggagggcaccaagttttccttttttataaatagctctggaaccaggcttgtgtatt

SEQ ID NO: 21951 - DNA, 315 bp, Homo sapiens
  SIMILAR (25)..(117): 931254mologous to Mus musculus igf2 mRNA-binding protein 3,accession number AB046173,Smith-Waterman Score=141.
gtgattatcactggaccaccagaggctcagttcaaggctcaggaaattctgactcaggtaaagcagcaccaacaacagaaggctctgcaaagtggaccacctcagtcaagacggaagtaaaggctcaggaaacagcccaccacagaggcagatgccaaaccaaagacagattgcttaaccaacagatgggcgctgacccctatccagatcacatgcacagtttttacctagccagttgtttctgaggccaggcaacttttgactcctgtctctgtgagaatgtatactttatgctctctgaaatgtatgacaccc

SEQ ID NO: 21952 - DNA, 1998 bp, Homo sapiens
  SIMILAR (3)..(179): 941254mologous to Homo sapiens IGF-II mRNA-binding protein 3,accession number AF117108,Smith-Waterman Score=293.
aggacgccaagatccccgtgtcgggacccttcctggtgaagattggctacgcgttcgtggactgcccagacgagatctgggccctcaaggccattgaggcgctttcaggtaaaatagaactgcacgggaaacccatagaagttgagcactcggtcccaaaaaggcaaaggattcgagaaaatgcaggggctgctgagaagtcgattactatcctctctactcctgaaggcacctctgcggcttgtaagtctattctggagattatgcgtaaggaaactcaagatgtaaaattcacagaagagatccccttgtttatcccggctctatcagtcagagccctcatcagcaagcagggccagcacatcaagcagctttctcgctttgctggagcttcaagtaagattgctccagtggaagcaccagatgctaaggtgaggatggtgatgatcgctggatcaccagattgtgaccagacacctgatgagaatgaccaagtggttgtcaaaataactggtcacttctatgcttgccaggttgcccagagaaaaattcaggaaattctgactcaggtaaagcagcagcaacaacagaaggctctgcaaagtggaccacctcagtcaagacggaagtaaggctaagacaatgtttccgtggaagaggggggagtgcagggagggaaaatgtttggggatgaagctgttccacctcagatcatcagccattggattctcataaggagtgtgcaacctggattcccgcatgcgcagttcacagtagggttccagctcctatgagaatctagtgctcctgtgagaatctagtgctcctatgagaatttagccgtgaatggagagatgggtgaacagaaagagactacagagtcttctaaacaatatgggatgttcccagcaagttcacctaaaggaggagaagtgccagccaggccgtccaactcccgctcctctgtggcccaggtgagtgcttcaacaggaaataaagcagccggttcctgtgttggtcaagtgatctgccaagtgaaatggacgcctggagttccgacgcgtgtcttcgagctcatagagggagttcttctccctttgaagaatcccgagaactgtgtaaagctgtttggcaccttgagacataattctagccacgcaggtggctcagactgtctgatcttgtgatagacacttgatgggaatcctgttgcctttctgtgctgacatgtggacatgaaggtgtggaaagagggctcccaggctgcccccatgcggggtttctgttgtttggctaaccttaggcacggcagtgatgtagataccatggagatagaggcacagacccagcttagccggggagcaaggcagcaaggaggtggtaggagatgtggtgggagaaagggcaccaagtacctggctgtgtgaacccagcttgaacctcagtccaccagcaagatttactacaaagagcaaaaaaacaaaccttccacaacgtggaaggggaccagagcaggtaggtctcctggctggggcggcctgcttttattcccttatctggccccacccacatcctgctgattactgccgagggactttgcggcacctagtccaggtactcctgcagcccagagggagctcgtcccccatcaagcccagcaggcgctggccaaccgcgctgagtgcggggcttgccgagccgcgctcacctggaacccgcgccagccagtgagcaccactcgcaaccccagctcccgcccgcgccgctccctccacacctccccaccagcagagagagccggctccggcctcggccagccccagagatgggcccccacagcacagcagcgggctgaagggctcctcgagcgcggccagatcgaggagcgccgccaggttgaggaggtgccgagagcgagccagggctgctagcacgttgttacctctcactttcacgttcaagctctttttggctatgtcctacacattatccttcatc

SEQ ID NO: 21953 - DNA, 456 bp, Homo sapiens
  SIMILAR (4)..(333): 981254mologous to Mus musculus igf2 mRNA-binding protein 3,accession number AB046173,Smith-Waterman Score=541.
atgcaatcagaaacggagactgttcatctgtttatcccagctctatcagtcggtgccatcatcggcaagcagggccagcacatcaagcagctttctcgctttgctggagcttcaattaagattgctccagcggaagcaccagatgctaaagtgaggatggtgattatcactggaccaccagaggctcagttcaaggctcagggaagaatttatggaaaaattaaagaagaaaactttgttagtcctaaagaagaggtgaaacttgaagctcatatcagagtgccatcctttgctgctggcagagttattggaaaaggaggcaaaacggcaagtacttcagcaaaacctgtgcagtggtatgaaagggaaagcgttgaaagcaaagcccagtacgtacaattgtgttgggtgtgggtggtctccaaggccacgctgctctctgaattgattttttga

SEQ ID NO: 21954 - DNA, 4264 bp, Homo sapiens
  SIMILAR (1774)..(2013): 551254mologous to Homo sapiens IGF-II mRNA-binding protein 3,accession number AF117108,Smith-Waterman Score=204.
ggcacgaggaaataaaaagagctttttttttccctcctcctccttcttttttttggggaggccgcctcctcctaagacttaggaagactggtggatgcgtttgggttgtagctaggctttttcttttctttctcttttaaaacatatctaggacaaggaaaaaacaagcctcggatctgatttttcactcctcgttcttgtgcttggttcttactgtgtttgtgtattttaaaggcgagaagacgaggggaacaaaaccagctggatccatccatcaccgtgggtggttttaatttttcgttttttctcgttatttttttttaaacaaccactcttcacaatgaacaaactgtatatcggaaacctcagcgagaacgccgccccctcgggacctataaaagtatcttcaaggacgccaagatcccggtgtcgggacccttcctggtgaagactggctacgcgttcgtggactgcccgggacgagagctgggccttcaagggccatcaaggcgttttcaggtaaaatagaactgcacgggaaacccatagaagttgagcactcggtcccaaaaaggcaaaggattcggaaacttcagatacgaaatatcccgcctcatttacagtgggaggtgctggatagtttactagtccagtatggagtggtggagagctgtgagcaagtgaacactgactcggaaactgcagttgtaaatgtaacctattccagtaaggaccaagctagacaagcgctagacaagcactagacaaactgaatggatttcagttagagaatttcaccttgaaagtagcctatatccctgatgaaatggccacccagcaaaacccctttctgcagccccgaggtcgccgggggcttgggcagaggggctcgctcaaggcaggggtctccaggatccgtatccaagcagaaaccatgtgattcgcctctgcgcctgctggttcccacccaatttgttggagccatcataggaaaagaaggtgccaccattcggaacatcaccaaacagacccagtctaaaatcgatgtccaccgtaaagaaaatgcgggggctgctgagaagtcgattactatcccctctactcctgaaggcacctctgcggcttgtaagtctattctggagattatgcataaggaagctcaagatataaaattcacagaagagatccccttgaagattttagctcataataactttgttggacgtcttattggcaaagaaggaagaaatcttaaaaaaattgagcaagacacagacactaaaatcacgatatctccattgcaggaattgacgctgtataatccagaacgcactattacagttaaaggcaatgttgagacatgtgccaaagctgaggaggagatcatgaagaaaatcagggagtcttatgaaaatgatattgcttctatgaatcttcaagcacatttaattcctggattaaatctgaacgccttgggtctgttcccacccacttcagggatgccacctcccacctcagggcccccttcagccatgactcctccctccccgcagtctgagcaatcagaatccgagactgttcatctgtttatcccggctctatcagtcagagccctcatcagcaagcagggccagcacatcaagcagctttctcgctttgctggagcttcaagtaagattgctccagtggaagcaccagatgctaaggtgaggatggtgatgatcgctggatcaccagaggctcggttcaaggctcagggaagaatttatggaaaaattaaagaagaaaactttgttagtcctaaagaagaggtgaaacttgaagctcatatcagagtgccatcctttgctgctggcagagttattggaaaaggaggcaaaacggtggaatgaacttcagaatttgtcaagtgcagaagttgttgtccctcgtgaccagacacctgatgagaatgaccaagtggttgtcaaaataactggtcacttctatgcttgccagggttgcccagagaaaaatttaggaatttttgactcaggtaaggcagcaccaacaacagaaggctctgcaaagtggaccacctcagtcaagacggaagtaaaggctcaggaaacagcccaccacagaggcagatgccaaaccaaagacagattgcttaaccaacagatgggcgctgaccccctatccagaatcacatgcacaagtttttacctagccagttgtttctgaggaccaggcaacttttgaactccctgtctctgtgagaaatgtatactttatgctctctgaaatgtatgacacccagctttaaaacaaacaaacaaacaaacaaaaaaagggtgggggagggagggaaagagaagagctctgcacttccctttgttgtagtctcacagtataacagatattctaattcttcttaatattcccccataatgccagaaattggcttaatgatgctttcactaaattcatcaaatagattgctcctaaatccaattgttaaaattggatcagaataattatcacaggaacttaaatgttaagccattagcatagaaaaactgttctcagttttatttttacctaacactaacatgagtaacctaagggaagtgctgaatggtgttggcaggggtattaaacgtgcatttttactcaactacctcaggtattcagtaatacaatgaaaagcaaaattgttccttttttttgaaaattttatatactttataatgatagaagtccaaccgttttttaaaaaataaatttaaaatttaacagcaatcagctaacaggcaaattaagatttttacttctggctggtgacagtaaagctggaaaattaatttcagggttttttgaggcttttgacacagttattagttaaatcaaatgttcaaaaatacggagcagtgcctagtatctggagagcagcactaccatttattctttcatttatagttgggaaagtttttgacggtactaacaaagtggtcgcaggagattttggaacggctggtttaaatggcttcaggagacttcagttttttgtttagctacatgattgaatgcataataaatgctttgtgcttctgactatcaatacctaaagaaagtgcatcagtgaagagatgcaagactttcaactgactggcacaaaagcaagctttagcttgtcttataggatgcttagtttgccactacacttcagaccaatgggacagtcatagatgggtgtgacagtgtttaaacgcaacaaaaggctacatttccatggggccagcactgtcatgagcctcactaagctattttgaagatttttaagcactgataaattaaaaaaaaaaaaaaaaaattagactccaccttaagtagtaaagtataacaggatttctgtatactgtgcaatcagttctttgaaaaaaaagtcaaaagatagagaatacaagaaaagtttttgggatataatttgaatgactgtgaaaacatatgacctttgataacgaactcatttgctcactccttgacagcaaagcccagtacgtacaattgtgttgggtgtgggtggtctccaaggccacgctgctctctgaattgattttttgagttttgtttgtaagatgatcacagtcatgttacactgatctaaaggacatatatataaccctttaaaaaaaaaatcccctgcctcattcttatttcgagatgaatttcgatacagactagatgtctttctgaagatcaattagacattttgaaaatgatttaaagtgttttccttaatgttctctgaaaacaagtttcttttgtagttttaaccaaaaaagtgccctttttgtcactgggattctcctagcattcatgatttttttttcacacaatgaattaaaattgctaaaatcatggactggctttctgggttggatttcaggtaagatgtgtttaaggccagagcttttctcagtatttgatttttttccccaatatttgattttttaaaaatatacacataggtgctgcatttaaaacctgctggtttaaattctgtcatatttcacttctagccttttagtatggcaaatcatattttacttttacttaagcatttgtaatttggagtatctggtactagctaagaaataattctataattgagttttgtactcaccatatatggatcattcctcatgtataatgtgccccaaatgcagcttcattttccagataccttgacgcagaataaattttttcatcatttaggtgc

SEQ ID NO: 21955 - DNA, 1794 bp, Homo sapiens
  SIMILAR (29)..(1654): 991254mologous to Homo sapiens Renal cancer associated antigen precursor sequence,accession number Y07062,Smith-Waterman Score=2738.
cgcgtgaactgcttcctgcaggctggccatggcgcttcacgttcccaaggctccgggctttgcccagatgctcaaggagggagcgaaacacttttcaggattagaagaggctgtgtatagaaacatacaagcttgcaaggagcttgcccaaaccactcgtacagcatatggaccaaaaggaatgaacaaaatggttatcaaccacttggagaagttgtttgtgacaaacgatgcagcaactattttaagagaactagaagtacagcatcctgctgcaaaaatgattgtaatggcttctcatatgcaagagcaagaagttggagatggcacaaactttgttctggtatttgctggagctctcctggaattagctgaagaacttctgaggattggcctgtcagtttcagaggtcatagaaggttatgaaatagcctgcagaaaagctcatgagattcttcctaatttggtatgttgttctgcaaaaaaccttcgagatattgatgaagtctcatctctacttcgtacctccataatgagtaaacaatatggtaatgaagtatttctggccaagcttattgctcaggcatgcgtatctatttttcctgattccggccatttcaatgttgataacatcagagtttgtaaaattctgggctctggtatcagttcctcttcagtattgcatggcatggtttttaagaaggaaaccgaaggtgatgtaacatctgtcaaagatgcaaaaatagcagtgtactcttgtccttttgatggcatgataacagaaactaagggaacagtgttgataaagactgctgaagaattgatgaattttagtaagggagaagaaaacctcatggatgcacaagtcaaagctattgctgatactggtgcaaatgtcgtagtaacaggtggcaaagtggcagacatggctcttcattatgcaaataaatataatatcatgttagtgaggctaaactcaaaatgggatctccgaagactttgtaaaactgttggtgctacagctcttcctagattgacacctcctgtccttgaagaaatgggacactgtgacagtgtttacctctcagaagttggagatactcaggtggtggtttttaagcatgaaaaggaagatggcgccatttctaccatagtacttcgaggctctacagacaatctgatggatgacatagaaagggcagtagacgatggtgttaatactttcaaagttcttacaagggataaacgtcttgtacccggaggtggagcaacagaaattgaattagccaaacagatcacatcatatggagagacatgtcctggacttgaacagtatgctattaagaagtttgctgaggcatttgaagctattccccgcgcactggcagaaaactctggagttaaggccaatgaagtaatctctaaactttatgcagtacatcaagaaggaaataaaaacgttggattagatattgaggctgaagtccctgctgtaaaggacatgctggaagctggtattctagatacttacctgggaaaatattgggctatcaaactcgctactaatgctgcagtcactgtacttagagtggatcagatcatcatggcaaaaccagctggtgggcccaagcctccaagtgggaagtgaaattggcttaatttttactgtaggtgaaggctgtatttgtagtagtactcaagaatcacctgatgttttcttattctccttaaattaagagttattttgtgtttgtattcttggctggatgttataataaacatattgttactgtc

SEQ ID NO: 21956 - DNA, 791 bp, Homo sapiens
  SIMILAR (514)..(392): 371254mologous to Homo sapiens proline rich peptide P- B,accession number D29833,Smith-Waterman Score=57.
tcagcttggttctggccacagaggttgctcttctcgcgatgcttcagacctggcggcagggaaagggtgggctaattggagagccaggaagagcgtgaggcggccccacgctgctttcccagaaggctgtgcgtgctcctcgcttcctccgcggtcttccgagcggtcgcgtgaactgcttcctgcaggctggccatggcgcttcacgttcccaaggctccgggctttgcccagatgctcaaggagggagcgaaagtaagggctgaaggaaaggaatgaggtgggagcgtcagcatagggctgcggcggccgcggcgaagtaggagggcctactaacgggctgagcgtgctgccctggctcagcggccgggggaagagaagattccagaaagggaggtgattttggaagggctcggccaccggagcctgcgggcacttctcttcttccgcgaccgggagaaggccgagggatcggcggcacgatcgacattgtacaccttgaaggtggacggatgtgaagccgcgcgtgcgttttgcctccatccataaatggggctaaggcccgtcacccttataggaggatgtgagggagacatcgaccacccgccatgatattgccttgagaactgggacttcgaatatcccctcgcctcgcgagttgtagcatgggggagaacgagaactagccgatccagagaagagagtgggaaaaagggccgggtcttggttgcttgcttcccagtgagaaacataccgctgtcagcttagatgacagaagccatgcgttgacg

SEQ ID NO: 21957 - DNA, 2122 bp, Homo sapiens
  SIMILAR (266)..(868): 601254mologous to Mus musculus chaperonin containing TCP-1 theta subunit,accession number AB022161,Smith-Waterman Score=486.
  misc_feature (1)...(2122): n = a,t,c or g
ccttgcttcaccggccgggggaagagaaaattccaaaaagggaggtgattttggaagggctcggccaccggagcctgcgggcacttctcttcttccgcgaccgggagaaggccgagggatcggcggcacgatcgacattgtacaccttgaaggtggacggatgtgaagccgcgcgtgcgttttgcctccatccataaatggggctaaggcccgtcacccttaaaggagcacttttcaggattagaagagactgcgtatatgatacatactaacttgcatggagcttgcccaaaccactcgtacagcatatggaccaaatggaatgaacaaaatggttatcaaccacttggagaagttgcttgtgacaaacgatgcagccactattttaagagaactagaagtacagcatcctgctgcaaaaatgattgtaatggcttctcatatgcaagagcaagaagtttggagatggcaccaacttttgtcctggtatttgctggcagctttcccgtcaattacctgaaaaacctttcggaggattggcctgtcagtttcagaggtcatagaaggttatgaaatagcctgcagaaaagctcatgagattcttcctaatttggtatgtttgttctgcaaaaaaccttcgagatattgatgaagtctcatctctacttcgtacctcccataatgagtaaacaatatgggttaatgaaagtattttctggccaaaccttatttgcttcaggcatgccgtatctatttttcctggattccggccatttcaatgttgataacatcagagtttgtaaaattctgggctctggtatcaggtcctctttaagtattggctggcatggtttttaagaaggaaacccgaaggtgatgtaacatctgtcaaagatgccaaaaatagcagtgtactcttggtccttttgatgggcatggataacaggaaacttaaggggaacagtgtttggataaaaggactgccttgaaggatttggatggaatttttaggtaaggggagnaggaaaacctccatggggtgccaccagtccaaaggctattgctgatactggtgcaaatgtcgtagtaacaggtggcaaagtggcagacatggctcttcattatgcaaataaatataatatcatgttagtgaggctaaactcaaaaatggggatctccgaagactttgtaaaacttgttggtgctacagctcttcctaggattgacaccttccttgtccttgaaggaaatgggacactgtgacaagtgtttacctctcagaagttggagatactcagggtggtggtttttaagcatgaaaaggaagatggcgccatttctaccatagtacttccgaggctctacagacaatcctgattggatgacatagaaaggggcagtagacgatggttgttaatactttccaaggttccttacaaagggataaacgtcttgtaccccggaggtgggagcaacaggaatttgaattagcccaaacagatcacatcaatatggagagacattgtcctggacttgaacagtatgcctattaaagaagtttgcctgaggccatttgaaagctattccccccgcgcactggcagaaatactctggagaaaactctggagttaaggcccaatggaagtaatctcctaaactttatgcagtacatcaagaaggataacaaaaacgttaggattagatattgaggctgaagtcccctgcttgtaaaggacatgctggaagctggtattcctagataccttaccctgggaaaatattgggctatcccactcgctactaatgctgcagtcactgtacttagagtggatcagcatactcttgtgtgattcttttttatgcagatcatcatggcaaaaccagctggtggggcccaaagcctcccaagtggggaagaaagacctggggtgatgaccaaaatggtttgaaaattggctttaatttttactgtaggtgaaggctgtatttgtaagtagtactccagaatcccctgatgtttttttattctccctaaattaagagttattttgtgtttgtattcttggctggatgttataataaacatatgtgttactgtcaaaaaaaaaaaaaaaaagtcgac

SEQ ID NO: 21958 - DNA, 346 bp, Homo sapiens
  SIMILAR (3)..(296): 981254mologous to Homo sapiens unnamed protein product,accession number AK000763,Smith-Waterman Score=503.
ccattctgatgtacaccaagttgtttgtgggctttctgaaccgcgcgctccgcacagacctggtcagccccaagcacgcgctcatggtgttccgagtggccaaagtctttgcccagcccaacctggctgagatgattcagaaaggtgagcagctattcctggagccagagctggtcatcccccaccgccagcaccgactcttcacggcccccacattcactgggagcttcctgtcaccctggccaccagcggtcactgatgcctccttcaaggtgaagagccacgtctacagcctacgcctcgctcagctcatcacacaggccaaacacacagccaagtccatctc

SEQ ID NO: 21959 - DNA, 484 bp, Homo sapiens
  SIMILAR (408)..(76): 961254mologous to Homo sapiens unnamed protein product,accession number AK000763,Smith-Waterman Score=556.
ccaggtcctctcagccaagggtggggctgtgtggcaaatccctccagcctgctctgaaggcagctgccaccttcagggctggtgcagcttcccccgctcggtcagcagtatcatggcagaggcgtagaggacgtagcccagggtgagcagcagcatgcatgggaggggcccgacgcagaacagagaggccacgaagaaggccagcagcagcgagaccagcgtccggtaactgcccaggaagcgcaggctgagcctggggccgcgggtgtggccggccacctgcctccgccccacaggactcagcaggtgcctgctggccagcccaggttctgtgaggtggtagcgacagaagctgccgaggaagtcatcccgggaacacagagccgccatctgtcctgcgaactggtaccgccccaggggcgtaaggatgagtccgttctcacccacgacgcagtcggggagctgctgttttccattctcatcc

SEQ ID NO: 21960 - DNA, 412 bp, Homo sapiens
  SIMILAR (180)..(362): 911254mologous to Homo sapiens unnamed protein product,accession number AK001227,Smith-Waterman Score=303.
  misc_feature (1)...(412): n = a,t,c or g
ccatccgccctccccatgtcagccacctactgtgtgggagatgttgccaggcagggcctcaggaggacacccctgggtcagggctccccagacacctcagagacaccccagaatcctaagggcagcagtcgggtactctgccccggggaagtgggtgccagttcgtctcctgccttctaggtgagcagctattcctggagccagagctggtcatcccccaccgccagcaccgactcttcacggcccccacattcactgggagcttcctgtcaccctggccaccagcggtcactgatgcctccttcaaggtcaagagccacgtctacagcctggaggaaaaggaaagcaagtacaccccagtatgtattgcggccgctctggaggttgcnccntaacctcgatgtcaatcctt

SEQ ID NO: 21961 - DNA, 3011 bp, Homo sapiens
  SIMILAR (15)..(83): 391254mologous to Homo sapiens KIAA1418 protein,accession number AB037839,Smith-Waterman Score=44.
  misc_feature (1)...(3011): n = a,t,c or g
ctgggccaagcacttccataccacaagctggtcacagttcagaccaagcagtgcaaggcacatctgggtgccaggcacagtggtgccccatggggtggccccactcctggcctggctcatgcctcccgtgggggcagcagagcaactggctcagggcgggatgtggtcagacctggaggcggagtgctatgggtgccacgctccttcccaggccctcacccctccttctccacccaggagtcgttcacgcctactgaggagcatgtgttggtggtgcgcctgctgatgaagcacctgcacgcctttgccaacagcctcaagccagagcaggcctcaccctccgcccactcccacgccaccagccccctggaggagttcaaacgggcaggttcctacccttacctgaccagggagtactctgccccctgggctgggaaaagcccaccctggcttctggagggccagcaagagccaaacctcacagggctgtgcatgtctctcctgcgccctctggaggaagtcctggagatgtggctgagctacctgcagccgtggcggtacgcgcctgacaagcaggctccgggcagcgactcccagccccggtgtgtgtcggagaaatgggcaccctttgtccaggagaacctgctgatgtacaccaagttgtttgtgggctttctgaaccgcgcgctccgcacagacctggtcagccccaagcacgcgctcatggtgttccgagtggccaaagtctttgcccagcccaacctggctgagatgattcagaaaggtgagcagctattcctggagccagagctggtcatcccccaccgccagcaccgactcttcacggcccccacattcactgggagcttcctgtcaccctggccaccagcggtcactgatgcctccttcaaggtgaagagccacgtctacagcctggagggccaggactgcaagtacaccccgatgtttgggcccgaggcccgcaccctggtcctgcgcctcgctcagctcatcacacaggccaaacacacagccaagtccatctccgaccagtgtgcggagagcccggctggccactccttcctctcatggctgggctttagctccatggacaccaatggctcctacacagccaacgacctggacgagatggggcaagacagtgtccggaagacagatgaatacctggagaaggccctggagtacctgcgccagatattccggctcagcgaagcgcagctcaggcagttcacactcgccttgggcaccacccaggatgagaatggaaaaaagcaactccccgactgcatcgtgggtgaggacggactcatccttacgcccctggggcggtaccagatcatcaatgggctgcgaaggtttgaaattgagtaccagggggacccggagctgcagcccatccggagctatgagatcgccagcttggtccgcacactctttaggctgtcgtctgccatcaaccacagatttgcaggacagatggcggctctgtgttcccgggatgacttcctcggcagcttctgtcgctaccacctcacagaacctgggctggccagcaggcacctgctgagccctgtggggcggaggcaggtggccggccacacccgcggccccaggctcagcctgcgcttcctgggcagttaccgacacgctggtctcgctgctgctggccttcttcgtggcctctctgttctgcgtcgggcccctcccatgcacgctgctgctcaccctgggctatgtcctctacgcctctgccatgacactgctgaccgagcgggggaagctgcaccagccctgaaggtgtcagctgccttcagagcaggctggagggatttgccacacagccccacccttgggctgagaggacctgggaagcccctccaggagggaacacggtcatcctcgggcttctggagcggggttcctgcagccgcagaggcatctggaggaaacgcaaccaagaaaggaaggcaggacgggccccagcaaaggagtagctgccagggcttcaacagctacggttctgtgacagcgcagagcttcagcgcccggcctttccctccctctgccaaggactcatggccaagccagctcttcggggccttttttccagtgcccatttggctactctgctgcaccaagcttgggagccagcctgccaacagccacctggggcctgggcttccccacttggctggcctttgaggttggcagagtgggttgtggcgcttcctctctctgtgtgggaccaggacagtggcttaagtctccactccaggaaagaatcaaagtttctagagttgtgagaaaaccagagagtggctgtcctgattcttcactgtgaggggcgttcttcatgttctcccagctgttccaagactgggccgtaggaatttccatgttttcagggagcctaaggaccctcccaggaggcccaggggctttcaccgcaggaccccaaggccattgaggcacatcacccaaaggcagtgggccaacatcgcggacccctgtgccttgtcacagaatgggtgctggtcctcaggcattggggacactgctgggtcgatggggtcggaattctgccagtttctgctctgcaacccaaagatggtcagaagcattgtcacttcagtaacatcaagttgctcaaagacatgggcaacccgttcagtaggttacttaacgtattcaaaaatatacaaactacaagattctcttgacaagaaaaccaagcacggggtctttcaccttcattcaccccacaggcggacatgcgagggagaacagcatncttcagtggtgatttccaaaccaagcctttgttttcggtgttggggttttgggggttttgctttaatgtttttgaaattgtaaatgttgggctttgtattttgatgtaaactgagaataatggcattttagggcctctcaccaacaatgcaagcttgtacatcaccacggatctgaataaacatgtccttgattctgag

SEQ ID NO: 21962 - DNA, 563 bp, Homo sapiens
  SIMILAR (6)..(128): 391254mologous to Hepatitis C virus core protein,accession number U31258,Smith-Waterman Score=78.
taagccccacccagccccccagtgcccgtcttcctgtcccatctgctcagagagaggtggggccgagacttgctggagagcttccctcctttcccatctggggagtccgcgggccacagtgggcaggtggcaccgggggtcagcatgcaggggcgccagaggcccaggctgctggccggacagtcaccctctgttctcgctacatcccttgccccctgtccatttatttaagcccccataggtgcccttcacccccaaaaccagctgtacagaatctttgatacagacctatttgctaggggtgctgccggggatttggggtcagcatctggccccctatctcctgaccagctgagtcatgaggccggtttctctctctctcccacttttgtcccccagccccgacctctcaggttagaccctgggccctggagcttagggattctccccaccccagccccacacctgctccttccctaatgctttgaggttttcttggttggaagctgcagctggcccaagaaagaaaataaaaaacaacacttttgcatgagaaaaaaaaa

SEQ ID NO: 21963 - DNA, 466 bp, Homo sapiens
  SIMILAR (185)..(397): 331254mologous to Bos taurus NADH dehydrogenase,accession number X63217,Smith-Waterman Score=72.
ccgggggtcagcatgcaggggcgccagaggcccaggctgctggccggaaaagtcacccctctgttctcgctaaatcccttgccccctgtccatttatttaagcccccataggtgcccttcacccccaaaaccagctgtacagaatctttgatacagacctatttgctaggggtgctgcccggggatttggggtcagcatctggccccctatctcctgaccagctgagtcatgaggccggtttctctctctctcccacttttgtcccccagccaagctctaaagcacatgtagcccgctgagaccagcttcctgcagccccgacctctcaggttagaccctgggccctggagcttaggggattctccccaccccagccccacacctgctccttccctaatgctttgaggttttcttggttggaagctgcagctggcccaagaaagaaaataaaaaacaacacttttg

SEQ ID NO: 21964 - DNA, 1134 bp, Homo sapiens
  SIMILAR (495)..(4): 941254mologous to Escherichia coli Phosphoglucomutase (EC 5.4.2.2) (glucose phosphomutase) (pgm),accession number D90708,Smith-Waterman Score=777.
ctaatatgcgtcttccgtgcctgacaggacggcgcaggcgaaccacccgttgtcagtcatcactttcagaccgccaatagaagcaccgttgcccggagcagcagtcaggcgcgcggtgatcgggtcacctgccagggtgctggcgctcaccatttccggagacagcttagacagcgccgctttttgtgcggaagtcgcagctgcctgcaaacggttgtagctcggcgcaccaaagcgttttgccagttcgttgtagtgttcctgcgggttcttaccggtgacagcggtgatttccgccgccagcagacacatgatgatgccgtctttgtcggtggaccacggcgtgccgtcgaaacgcaggaaggaagcccctgcactctcttcgccgccaaagccgaagctgccgtcgaacagaccatcgacaaaccatttgaaacctaccgggacttctacacagcggcccaagtcgttgaccacactggcaattttcacagaaacagctcgaagataagaatagaatatcatcagtggatcttttgtcacattgtggctggtccggccctcacgagtgggtgcggggaccgggtctgccttcccctttcctcctggattgcggaacacgggaggcccccttgtggttcggaaggctccagacgtggatcggtgcgcccctcgtctttggacgacgcaccttgtggtgtcacctgcccggaggcacatcccctcgttgcaggtgcgtgagggacccctcgcggcgatatgcggggacgactgtactgtagcctcccagggcagtgtctctgtggcttcataaagtgtggagccccactgaggccaggactgcccttctcttctgttccagctgctggaaacgcgttctgccaggctgcacagctgcacctgcagctccagagcaagcacgacgcagccacctgctttgtggacgctggcaacgcattcaagaaagccgacccccaaggtgagggcctctgaatttgttatgtaggggcctggataggaggcactctccatattaccctcctcaaaggtctgcagtggctggctgtactccagtggactggtgaacttgtcctgccagtccttatatgagtttcccctacacatccttttcat

SEQ ID NO: 21965 - DNA, 894 bp, Homo sapiens
  SIMILAR (1)..(156): 631254mologous to Rattus norvegicus alpha-soluble NSF attachment protein,accession number X89968,Smith-Waterman Score= 140.
ctgttcccagctttctctgattcccgggaatgcaagttgatgaaaaaattgctagaggccccacgaggagcaaaatgtggaccagctacaccgaagccggtgaaggaatacgactccatcttcccgggctggacccagtggctcaccacattggttgctgcgcatcaagaagaccatccagggccgatgagaaggacctgcgctaagccccaccagccccccccagtgcccgtcttcctgtcccatctgctcagagagaggtggggccgagactttgctggagagcttccctcctttcccatctggggagtcccgcgggccacagtgggcagggtggcaccggggggtcagcatgcaggggcgccagaggcccaggctggctggccggacagtcaccctctggtctcgctacattcccttgccccctgtcccatttattttaagccccccataggtgccccttcacccccaaaaaccagctgtaacagaatcttttgataacagaccttatttgcctaggggtgctgcccggggaatttggggtcaagcatctggcccccctatctccctgaccagctgaagtcatgaggccggtttctctctctctccccacttttgtcccccagccaagcttataaagcacatgtagccgctgagacctgctgtttctgtctgggggcaggctcctcttcccccagcccccgggagcctcccccagcttcctgcagccccgacctctcaggttagaccctgggccctggagcttaggggattctccccaccccagccccacacctgctccttccctaatgctttgaggttttcttggttggaagctgcagctgtgcccaagaaagaaaataaaaaacaacacttttgcatgaaaaaaaaaaa

SEQ ID NO: 21966 - DNA, 1405 bp, Homo sapiens
  SIMILAR (309)..(1058): 361254mologous to Homo sapiens N-ethylmaleimide-sensitive factor attachment protein, alpha,accession number BC001165,Smith- Waterman Score=237.
ctgggcgtggacttcgcgacgcgcgccggtgcgacgtcaacgcagccgggcgagttttaccgatctgtgttccgcggcccggccgcggctgagtcttcccaggggtcagggtcaggcgctgtgctagaaaccctttgaggccgccatgtacaattccgggaaggaagcggaggcgatggcgctgttggccgaggcggagcgcacaagtgaatgaactcgcagtccttcttctctggcctctttggaggctcatccaaaatagaggaagcatgcgagaatctacgccagagcagcaaacatgttcaaaatggccaaaaactggagtgctgctggaaacgcgttctgccaggctgcacagctgcacctgcagctccagagcaagcacgacgcagccacctgctttgtgggacgctggcaacgcatttcaagaaagccgacccccaaggagggccatttaactgttttgattgcgtagcattcgagatctacaacagacatgggccgaattcacgattgcggccaagcaccacatctccatttgctgagatctattgagacagaagttggtggacatcgagaaggccattgccccattaccgagcattggcagattactaccaaggcgaggagtccaacagcctcagccaacaagtgtctgctgaaggtggctggttacgcctgcgctgctggagcagtatcagaagggccattgacatctacgaacaaggttggggaccaaatgcccattggacaagcccccctccgtcaaagtacaagcgccaaagactacttctttcaaggccgccctttgccacttttgcatggacatgcttcaagcccaagctggcttttccaaaagtatgaggagctgttcccagttttctctgattcccgggaatgcaaattgatgaaaaaaattgctaaaggccccacggggagcagaatgtggaccagctacaccgagttcggtgaaagggattacggattccatttcccggctggaaccagtggctcaaccacccattgcttgcgcattcaagaagaccatccggggcgattgaggaaggaacctgcgctaagccccacccagccccccagtgcccgtcttcgctgtcccatctgctcagagagagccaagctctaaagcacatgtagtccgctgagacctgctgtttctgctgggggcaggctcctcttcccccagccccgggagcctcccccagcttcctgcagccccgacctctcaggttagaccctgggccctggagcttaggggattctccccaccccagccccacacctgctccttccctaatgctttgaggttttcttggttggaagctgcagctggcccaagaaagaaaataaaaaacaacacttttgcaaaaaaaaaaaaaaaaaaccc

SEQ ID NO: 21967 - DNA, 1041 bp, Homo sapiens
  SIMILAR (16)..(954): 551254mologous to Homo sapiens dJ393D12.1 (KIAA0776),accession number AL132776,Smith-Waterman Score=736.
atgcaagtggggaagcctctgctacccacttctttatcagttgaagatgctgccatattgcttcagcaggtgatgagggcattcagcaaacaggcctcaactgtagtctttagcgacactgttgtagtcagtgaaaaatttataaatgactgtacagaactgttccgtgagctgatgcaccagaaagctgaaaaggaaatgaaaaataatcctgtgcatttaatcactgaagaagatctgaaacaaatctccactttagaaagcgttagtacaagtaaaaaggataaaaaagatgagcgaagaaggaaagcaacagagggcagtggaagcatgagaggaggaggtgggggcaatgccagagagtacaaaattaaaaaagtcaagaagaaaggaagaaaagatgatgatagtgatgatgaatctcaatcatcccacactggtagacctcttaataaaacttatctcgaggtggtacgttcagtattcatgtcttcaacaacttctgcttctgggacgggcagaaaacgcacaatcaaggacttgcaagaagaagtttcaaacctgtacaataacattaggttatttgaaaaagggatgaagttttttgcagatgacacacaggctgctcttaccaaacacttgctgaagtcagtgtgtactgatatcactaacctcattttcaacttcttagcttcggatttaatgatggcagtagacgatcctgcagccattacaagtgaaataagaaagaaaattttaagtaaattatcagaagaaaccaaagtagctcttacaaaactccataactctctgaatgaaaaggatcagcatgctcttttggtaaagtatcaaggtttggttgtaaagcagctagtcagtcaaagtaagaagactgggcagggagattatcccttgaataatgaattagacaaagaacaagaagatgttgccagtactactcgtaaagagcttcaagaactttcttcatccattaaagaccttgttctcaaatctaggaaatcatctgtgacggaagagtaa

SEQ ID NO: 21968 - DNA, 4404 bp, Homo sapiens
  SIMILAR (985)..(1167): 1001254mologous to Homo sapiens dJ393D12.1 (KIAA0776),accession number AL132776,Smith-Waterman Score=288.
  misc_feature (1)...(4404): n = a,t,c or g
tttcgtgcctgtcggctgacgtgtctgcagttcctccgcgtctactgcgagtcaggccgtgatggcggacgcctgggaagagattaggcggttggcggccgacttccagcgggcgcagttcgccgaggccacgcagaggttgtccgagcggaactgcattgagattgttaatagattgattgctcagaaacagctagaagtagttcatacactcgatggaaaggaatatattactccagcccaaattagtaaagaaatgagagatgagctacatgtccgaggtggtcgagtaaacattgttgatctacaacaggtaattaatgtggacctgattcatattgaaaatagaattggtgacattattaaatcagaaaagcatgttcagttagtgttgggacaacttgatagatgagaattatttgggatcgcgtgggccaagaggtcaatgataaattgcaagaaagtggtcaggtcaccatatcagaactgtgtaaaacttatgatcttcctgggaactttctgacacaggcactaactcagcgacttgctataattatcattggacatattgatcttgataatagaggagtaatttttacggaagcttttgtagctcgacatagagcacgtatccgtggactattcagtgctattacccggcctacagctgtgaattctttgatttcaaaatatggatttcaggagcagcttctttactctgtgcttgacgaacttgttaatagcggacgcttacgaggcactgtggttggtgggagacaggataaagctgtgtttgtccctgacatctactccaggacacagagtacttgggtggattcctttttcaggcagaatggctatctagaatttgatgctttgtccagacttggaatcccagatgctgtaagctacataaagaaaagatataagactacacaactcttgtttttgaaagcagcttgtgttggtcaaggacttgtggatcaagtggaagcatcagtagaagaagccatcagctctggaacatgggttgatattgcacctctgctacccacttctttatcagttgaagatgctgccatattgcttcagcaggtgatgagggcattcagcaaacaggcctcaactgtagtctttagcgacactgttgtagtcagtgaaaaattttataaatgactgtacagaactgttccgtgagctgatgcaccagaaagctgaaaaggaaatgaaaaataatcctgtgcatttaatcactgaagaagatctgaaacaaatctccactttagaaagcgttagtacaagtaaaaaggataaaaaagatgagcgaagaaggaaagcaacagagggcagtggaagcatgagaggaggaggtgggggcaatgccagagagtacaaaattaaaaaagtcaagaagaaaggaagaaaagatgatgatagtgatgatgaatctcaatcatcccacactggaaagaagaagccagagatcagttttatgttccaggatgagattgaagattttttaagaaaacacatacaagatgcccctgaggagtttatttcggaacttgctgagtacttaataaaacctcttaataaaacttatctcgaggtggtacgttcagtattcatgtcttcaacaacttctgcttctgggacgggcagaaaacgcacaatcaaggacttgcaagaaggaagtttcaaacctgtacaataacattaggttatttggaaaaaggggatggaagttttttggcagatgacacacagggctggctcttacccaaacacttgctggaagttcagtgtgtactgatatcacttaacctcattttgcaacttctttaggcttcgggattttaatggatgggcagtaggacgatcctggcaggccatttacaagtggaattaaggaaagaaatttttaagtaaattatcagaagaaaccaaagtagctcttacaaaactccataactctctgaatgaaaagagcatagaagactttattttctgttctggattctgcagcagaagcttgtgatattatggtgaaaaggggagacaaaaaaagggaaagacagatactgttccaacatcgacaagcactggctgaacagctaaaggtcacagaagaccctgctcttattctgcacctcacatcagtcctgttgtttcagttttcaacccacagcatgctccatgcaccgtggaagatgtgtcccacagatcattgcttttcttaatagtaaaattcccagaggatcagcatgctcttttggtaaagtatcaaggtttggttgtaaagcagctagtcagtccaagtaagaagactgggcagggagattatcccgttgaataatgaattagacaaagaacaagaagatgttgccagtactacttcgtaaagagcttcaaggaactttcttcatccattaaaagaccttgttcctcaaatctagggaaatcatctgtgacggaagagtaatgatcttaatttacatttgtcatatagtaagcattttcccccaagggttgaaggtgagtggtcacaaaaaagtagtcactatacaactcccctctccctgcaaaaaccacctcatacacacacaattcagttaaaacagtagtattgtattaaatgtaaatcttaaaaagatgtgaatttttgtaaattgggttcttcatggaagttttttttccacctgatgttcacacaaatactatatgaaatttttcacattattttcacataattttaaaaattaccatatttccaggtttgttctctttcccaaatgttgaatgaaaaacaaattttcccaatccatttatccctggggganggattcatttgttgcgagtgcccagtatacttaaatgtatactttatatacatttaagcagaaatttaaaatgtggtctttttttttttaaaagaaacacttctgtgtcagaaatgaaaataaatcatgttttttatttttaaatagaaagcacttcaaaactaaaatacagaaatttacaaaaaagaaaaattattactaagcccttgctcttatttttggcagaataaacattgattttggttggggctgcaaggatgcctttacaggtgcacaagaacgctagagtggcccatgcattgctgtgttctcttctaaaacaagctactaacaagagagagaacacatgcaatttattaccagtaagcataagtcatatttaacattggaataactaagcattttatacaaagatttttctttgacccagtttgcatttgtacattttatttttttagttcaacagctgctctgtcacataatactttgtaaatactagtgtgaaaaacaggatagggatgcccttttcccagtggtagggagcatctgtaagtgcatttaaatcattagaagcttttttcccaaaacctagaaacccttattaaaaaatagacatttttttctaaagattattagttaaaaataactaaaagagttccttagagtaatcatttcaaccaaattaatttcaagcaacaacttacttactatttatcaaaaagggatttaattattttgaatataattataaattaaatttcaaatatttaaaaatactattttatataattccttatgacattttaaactttatattttaaaatatttgaatacgaaaagatcagtctacctctactccattctagacaaagtattaatccttagtggaaagtaattaattaaattgccaacttggcattattattaaacttgataggaacgcaacattaaatttaaaaatgttttcccgtgggtaattttctattatatatattttcatatgggcaaagggaaaaaatgataaatcctctgtaatcacaaaccccaatttcgttttgtttattcagcttctaaaatattgaacacccagacttttaattcaaccctttaaggacccttatcatttatgtttcagtaggatatcaaagtaatccatgtttgtgtcaaatgatccatagaaaataaataggaggaggacagtgaagcaagttaaaaggtaaagccttgttttaatttgtttgcattaatttyyyytcatttgtcaaaatgcttctyttgttgccacgagtaaagaacagtttttattgttttgtaagtaaaattacgtagctgattttgtatgtaaagattaatttccataataaaaattattgtatgtttactgtgatcttaatgggcagggttaagaaagttatttaaaataaagttacctattctactaaattttatagtactttgaagcttctattaattaacacaaagattaattggtgcatatattttatatatatacattttgaattctcattttgaacattattaaaggattttatttttcttacac

SEQ ID NO: 21969 - DNA, 711 bp, Homo sapiens
  SIMILAR (1)..(573): 1001254mologous to Homo sapiens dJ1085F17.1.1 (ortholog of mouse DNMT3B (DNA Cytosine-5 Methyltransferase 3B1) (isoform 1)),accession number AL035071,Smith-Waterman Score=1016.
gtcctgtcattgtttgatggcatcgcgacaggctacctagtcctcaaagagttgggcataaaggtaggaaagtacgtcgcttctgaagtgtgtgaggagtccattgctgttggaaccgtgaagcacgaggggaatatcaaatacgtgaacgacgtgaggaacatcacaaagaaaaatattgaagaatggggcccatttgacttggtgattggcggaagcccatgcaacgatctctcaaatgtgaatccagccaggaaaggcctgtatgagggtacaggccggctcttcttcgaattttaccacctgctgaattactcacgccccaaggagggtgatgaccggccgttcttctggatgtttgagaatgttgtagccatgaaggttggcgacaagagggacatctcacggttcctggagtgtaatccagtgatgattgatgccatcaaagtttctgctgctcacagggcccgatacttctggggcaacctacccgggatgaacaggcccgtgatagcatcaaagaatgataaactcgagctgcaggactgcttggaatacaataggatagccaaggatctttggctttcctgtgcactacacagacgtgtccaacatgggccgtggtgcccgccagaagctgctgggaaggtcctggagcgtgcctgtcatccgacacctcttcgcccctctgaaggactactttgcatgtga

SEQ ID NO: 21970 - DNA, 2951 bp, Homo sapiens
  SIMILAR (415)..(2883): 511254mologous to Homo sapiens dJ1085F17.1.2 (ortholog of mouse DNMT3B (DNA Cytosine-5 Methyltransferase 3B2) (isoform 2)),accession number AL035071,Smith-Waterman Score=1592.
atggacaggggagacttcaggtggagtcatcgggaaaagcctctccataaagtgaccttctgggagaaaaccgagggcagctgctcccggctccgcggccgcagcccgcgtggacgctccgagcgccccccgacggacgggaccggctccctggcggtcgggcgagcgggcggcaacgctgcccggccggcagcgctggggttaagtggcccaagtaaacctagctcggcgatcggcgccggagattcgcgagcccagcgccctgcacggccgccagccggcctcccgccagccagccccgacccgcggctccgccgcccagccgcgccccagccagccctgcggcaggtgagcgccccggggccccggggaggctcggccgccagctgcttcgagggctgctaggggagggggatcctcgtcaacggggcctgcagcgaccagtcctccgactcgcccccaatcctggaggctatccgcaccccggagatcagaggtggctgggcagtggggactggggtggtgtcaggcgctgacatagtgagcggtcactgcagacaatggtctctgctctccctttttcagggctcagggactttgtctttggctttcatcacgtgggccttccgggaaaccaggactcgttcagaaagcccagctgtaagtagccacacctcgagccaaagcacttgtggccaacactctacatagcatacatagcatgcccgaggccggcagggccgcaaccatgtggacgagtcccccgtggagttcccggctaccagggttggttccccagatgcccagacccctgcccgcagtctctaactgggagatatgcctcactcacttaccatcgacctcacagacgacacagaggacacacatgggacgccccagagcagcagtaccccctacgcccgcctagcccaggacagccagcaggggggcatggagtccccgcaggtggaggcagacagtggagatggagacagttcagagtatcaggtatggccgagaggggctcctgcccagggtgactgaggaccctgaacacggggaaaaaccagttacgccatggtggtgtcttggaaggccacctccaagcgacaggctatgtctggcatgcggtgggtccagtggtttggcgatggcaagttctccgaggtgagtccggggaagggcaaggggttctgcaggcctgaggctgtgcctgcctgcctccctttgaataagctcgtctcctatcgaaaagccatgtaccatgctctggaggtaacatgggatgagggaatgagggctaagccctgagagcagggatgaagcaagagacccacagaattggaggaccagctgaagcccatgttggagtgggcccacgggggcttcaagcccactgggatcgagggcctcaaacccaacaacacgcaaccaggtgggaatgagtccccatggcagcacccgctgcctctgctggtgggaccacttcttgggagagtccgcctcaagacaaattgctataacaacggcaaagaccgaggggatgaagatcagagccgaggtgattgttgggtacctgggatcatgggacagatgggaggaggacgctgcagatcaggaattgatgtcatccccctcacaccctggctagggctctaggcctgccttgtctgtcagacatgccgggtaagtcctcctactactgccctggaccttcctccccttgcctcctctaactcccctctccttccctgcgagggccgagagctgctgctttgcagcaacacgagctgctgccggtgagcactgggccctgtggggtggatgtgggtgggcccccaaggctcctacgttcctgcagtctaggagccctggagctgttacatgtgtctcccgcagcgctgtcatggcgtcctgcggcgccggaaggactggaacgtgcgcctgcaggccttcttcaccagtgacacggggcttgaatatgtaagccacaggctcccgcctctaccaccacagatcccaggggcacagggtgttggaaagctctggtttgatggcatcgcgacaggtgagttcggggaacacctggagacactgctatcgtgtcacaacagggtagccagggagtcagaagagtccattgctgttggaaccgtgaagcacgaggggaatatcaaatacgtgaacgacgtgaggaacatcacaaagaaaaatgtgagggcagtctgtaccttgcgggcctcatctcttcctgtctttttccccagtcctccacacccgaatccagccaggaaaggcctgtatggtgagcatccttctctctggcagtccctggagagcctatgtcacctgaccactggcccaggtgcagggaataaggtgggttgggctggaggtttcaaatgaaccctgcgctgtcatcttttctgagcacagagggtacagagggacatctcacggttcctggaggtgagggaatctggggacctgattgtcacagacagccagggcagggaaagcgctgctggcagtgacaacctacccgggatgaacaggtaacaaagggctcttagtgggtcaggtaacagccaagttaaatatgtgataacaagctctgacaccaaggtaagacgagctgtggccctctggaaaaatgcacttggtgacctccaagtggggacttgggagatccctgttgtcatgaatggcaaagaagatgttttgtggtgcactgagctcgaaaggtgagcaaggctgcacttggagagggaaactgtgtagatcaaaacacaaatgggcagacatgggctgctgggaaggtcctggagcgtgcctgtcatccgacacctcttcgcccctctgaaggactactttgcatgtgaatagttccagccaggccccaagcccactggggtgtgtggcagagccaggacccaggaggtgtgattcct

SEQ ID NO: 21971 - DNA, 1233 bp, Homo sapiens
  SIMILAR (882)..(13): 901254mologous to Mus musculus tousled-like kinase,accession number U56909,Smith-Waterman Score=1379.
tcaaccacaaaactctggtgttaaattgcaataagtgccagcaccttgtgatgtcagctccatgccacccactgaattgtagctatcatcatccatgatcttcgaaagaccaagctctgtaatttttctctctccacacactgtaccatttactaaaagaatattccctggtttgaggtcatagtgtatgatgggaggttttattttatttaagtactttaaagcatttacagtctgcatgataatggaccaggcctctttctctgacattaatttgtgctgtttcagatagaagtttagatcatttccctcacagtattctaacactgtacaaaatgagtcagtatccagtgaaaagtaatcatacagcttaattattctgggatgatccagttctttatgaatccagtattccctacatgcatgcttgtggtaattctcctttttctcatctctccagtttttatttaactggtgaattttcacagctacgtatctttgctctattagttcaaatgccttgtaaactttactgaaacctcctctatccaaaagatgtaacaacaaatatctgtcatttagcattggatgatctttaaattgtgagttatcttcattatgtatcctttttagttccccgatacgtagatttctaaccctttctagcctttccagctctgcctggatctctgcttcctcctttttaagatgacctaaccggagtttgaagatttcttcttgttcatggtattctgctaatgttaacgttttattttcagctccattggtcctgcttttccactgtttctgctcactggttgcaggagggtcctgacccatggcaggaggtttccgctttgctaacattttccgttgtctatctcttccctctgtgaatttatccttttctgatgcttgataagattctgggctctccagcagatgtatctggttggtttctccaaagagagacaccagcaatttggcaccacagttctggtagtaatgatgtctcttacaaggtggcccctccttcatgacagcagttcttactgggctctggtaacactgtttccctccttgcccttcaaggctcagaatggcaatggcttcctgctgatacaagtctctgggtgtttcactgtcccttgtttcacctaagtcatctgggagaaggatgcacaaaaatataaaatttagctcagcaaggatgaagtagggaatggccatcat

SEQ ID NO: 21972 - DNA, 4829 bp, Homo sapiens
  SIMILAR (1363)..(1986): 541254mologous to Homo sapiens RB-associated KRAB repressor,accession number AF226869,Smith-Waterman Score=604.
  misc_feature (1)...(4829): n = a,t,c or g
atggcttataagcaagggtttttaaaggtgatggtacatttcaggaaagcagaagttacaggcaaaaatcatacatcagtacatgaaggttatacattgatttcgccagctgcccaagttctgaccatttcatgtaaaaagagtatactattacaggaacaagtgtcattcaaggatgtatgtgtggacttcactcaggaagagtggtatctgctggaccctgctcagaagattctatacagagatgtgatcctggaaaattatagcaatcttgtctcagtagggtattgcattactaaacccagaagtgatctttaagatcggagcaagggagaagagccctgggatattagaaaaagggattccccaagcccagtgcccancccagaaaaggaaatggaaagttggatgaacgtggttagagagcagcccaggaaaatgaagatgaccatttttggggagcctcctattcccacaaccaacaaaacagtaagtgtagaaaatggagatagaggaagcaaaactttcaatttgggcacagaccctgtttctttaattaaattatccctataaaatatgtgactcatgtgagatgaatttgaaaaatatttcgggcttaattattactaaaaagaactgttccagaaagaagcctgatgagtttaatgtatgtgagaaattgctccttgatattaggcatgagaaaatccctattggagagaagtcttataaatatgatcaaaaaaggaatgccattaattatcaccaggatctcagtcagccaagttttggccaatcctttgagtatagtaaaaatggacaaggcttccatgatgaggcagcattttttacaaataagagatctcagataggagagacagtctgtaaatataacgaatgtggaagaaccttcattgaaagtttaaagctgaatatatctcaaagacctcatttggaaatggagccgtatggatgcagtatttgcgggaagtccttctgcatgaatttaaggtttggacatcagagagctcttacaaaggacaatccttatgaatataatgaatatggggaaatcttctgtgacaattcagctttcattatccatcagggagcttacacaagaaagattctccgtgaatataaagtgagtgacaaaacctgggaaaagtcagctctcttaaaacatcaaatagtacacatggggggaaagtcttatgattacaatgaaaatgggagtaatttcagcaagaagtcacatcttacccagcttcggagagctcacacaggagaaaaaacctttgaatgtggtgaatgtgggaaaaccttctgggagaagtcaaacctcactcaacatcagagaacacacacaggagagaagcctattatagtgtactgaatgtgtggaaagccttttgccagaaaccacacctgaccaaccatcagcgaacacatacaggagaaaaaccctatgaatgtaagcaatgtggaaaaacattctgtgtgaagtcaaacctcactgaacatcagagaacacacacaggggagaagccctatgaatgtaatgcatgtgggaaatccttctgccacagatcagccctcactgtgcatcagagaacacacacaggggagaaaccgtttatatgtaatgaatgtggaaaatccttctgtgtgaagtcaaacctcattgtacatcaaagaactcacactggggagaaaccatataagtgtaatgaatgtgggaaaaccttctgtgaaaaatcagctctcactaaacatcagaggactcacacaggggagaagccgtatgagtgtaatgcatgtgggaagacctttagtcagaggtcagtgctcaccaaatatcagtttaattcacacaagggtgaaagctctttgaacatcctgaatgttagaagccttcatacacttgtgaaattggttatacagtttcaaaaaaggagatcagagaaagccaaagaatgtcagaaatttgtagaaaatgacttcttgtttgaatatgtaaaagctttcaagaaaaattaaaacttttcattagaaaatttgtactgaggggaattctattcatctaagtaatatggagaaaatatttatctggaatttatgttgtttagtgttatattccagacgtgataccaaaattttgttgcaaatataatggacaatatttatttatacccatattcacagtggaatctgaagcttataaaagttgaatgacagcagcattaaacatatatgtgaagagtccccgatgtttgtagaccttatgtgagtatgcaaatatataaatttgagtatgcttgatttgtatattggaactcaacatgatcataaggagaagatacgtacccttaattgagtaactactatggtatttgttaatattttctacactaaataccattggtgtctttataggttgacataattatatatgtgtatgtacatatgtttgtgtgtatatgtaaatatatttctacacacatacttaaatatagtgatgtgctagtataacctcatactgacttaaaagttctgattgttaaattttaaggaattttgtgagccagttattaaaagcagtcattatttaaaatatgtaaacttacagttaaaaacaaaggtaataaatactcagcactcatcacttcctaattattttgctacatttcactattacctttgctgttttacttatttaatctgtatgatgaaaatactgtataatagtgtgcactgcacatctgtctcttcccagctccacattcagtgctgtcttggtagcttggacttagtggggagtgtttacaccatggaaattgacaaactataaatcagggttttaattttctcagagaacctgctgtcaaatatttacagcacatcactgtgtatatatgaaaacgtatttggcaatacaaaccacataccccttctatttcctgacataaataaatggctatggccatttacagctgaaccacgtcttcaagaaagaagccaaaaatatttccgtgaggtttttaactacctctgaatctgtcctactctaaatactaccggagtctctttgtaggttggccagtatatgtttttagtgaaatattatttcacaaagaactatatcacgtacctttcctctgactgtttcctggcatatatgcatgaatatggccattattgaactatcacttcagtaaagaagttaaacagtacttttctgaggtttttcagctacctctgggtcattctgtaatgtaaatgttgttaataggaatgggtttttacataaattatggcaagggttaacaggcaggtaacactgccactcctcaaaaagtggcggtatgtaatgaaaggcccttttgatatccttgatttttcattgtgtatctgtttgggcacggtctatgtaacactagttctgcgtattagtattttagagtatctctgcctcccttgtcctgttgtttcttttgcccccttggaacacattggtcagcagttctaagagacactgcctacatgatggccattccctacgttcatccttgctgagctaaattttatattttttttgcatccttctcccagatgacttaggtggtaagtccagagttagtcaaagctaatcatggaagttccattttaatgattctgttggggtgaacttgggagcaatgagatgtttgggaagtattgtgtagtacttctgggaaagatctccttgatacaacattgtcatgacatgagaagagactctgtctgggctttttcatgtctgtaacataggtattggcttatcgtttttatctctgaagggcagtagcctgaagataacagtgcacaaggtgggaaaagccagctcagaggtgacgttgccgagctactctgctctctatacctgttctctactgggactttttataaccctcaataactgttttttatttggtcttagggctgtctgatacttagagctgaaggcattccagctgacacagaggaatatttttctaagtgttaatgttctatatggttaattacgggggaagaattatttctttttcacaagttaatataggggattgcctgtttgtatcagcccatggttcttttctgggtggaaaaaccggaaattctcccancttaaaaaatattttaatggccagactgattacaagtggtgtgggcccagaaaccaagggaccagtgaaaacacccccagagaccttgtaatccagccagggaaagcccattgccccactcctgaagcccttgaagggccaaggagggaaacagtgttacccagagccccagtaagaactgcctgtcatgaaggaggggcccaccttgtaaagagacatcattactacccagaactgtggtgcccaaattgctggtgtctctctttggagaaaccaaccagatacatctgctggagacgacaggtgggcacagagaagggtggagagagaatctgggaagagaaatggagaataagcagcacagtgttattcatttctgtaaattcctatgtagaaggctcagtgttagaaataaagttattctactagttgcaagttaagtgtttctgtttgttctgctttcctgttagcataagtaaactccctttggaactacacaggtatgtctctccttcaacatgtgtgaagcagacattatattaaattacattattcatacctccctgtggtgtttcttattgtatgtggtgtaaggtaagcagctctgtattcttccaaataaatagccagttgtccctgaaaaaaaaaaaaaaaaaaaaaaaa

SEQ ID NO: 21973 - DNA, 2820 bp, Homo sapiens
  SIMILAR (1369)..(1794): 981254mologous to Homo sapiens Growth Factor Receptor Bound protein GRB-1,accession number R26060,Smith-Waterman Score=734.
atgccatccaagactgtggttccttttagttttgctctgtgtatggattttcagccaaatgttactattcagacccggtccgactactcgtccagtgcagctgcatgcttcaggcagactctagaggacccagccaaccccaggcttttcgagcccctagcgccccagcagagtggctggggtggggaggactcggattccagagctcgcaaagcggagaaggccctgcaattcctggtctcgccagcactgcacttccgagtgggcggaaaacccgcggcacccgcctggcgctccgggggtgaaggaggggtgaaagggaatgtgagcccaaattttccgattttcctagagaagctgaaaatacagatttttatggactattttccattattgaatgctggcaatgaattcaacctttttgtagacaagtactacggcttacggcctaccacttcgctgctgacttctgcttctgacaactgctgcggcttaatggctctagctcgcttcgacgtcgctgtaggtcgacttgttccttgcccacccaagtggcaactaatagacaaagagattggtggcattttggcccaccctagagatttgtggaacttcaaatttgagggggaagatttagggtacctggcagaagaaatgtttaagcagcaaaccattcaagaggtgacttgggtgctgttaaaagcattcagttttaaaagggaaacacatcataaaagttcagaaattttgcaacctgatgtgatagaaaggaaaaacccattttcagaggagacattcaagctggctgcagaaatttgcataagtaacaaggcactaaatgttaatcaccaagataatggggaaaatgtctctagggcttgccagagaccttttccacagctgctccaaccgtggctaaatggggccaaggtacagcttgggctgtggcttcagagggtgcaagccctaagccatggcaacttccacatggttgggcctgtgggtgcagagaagtcaagaattgaggtttggaaacctctgcccggatttcagaggatgtatggaaaggcctggatgtcaaggcagaagtttgctgcaggggcagtacagaagggaaatgtggggttggagtcctcacacagagttcctactggggcaccacctagtggagctgtgagaagagggccactgtcctccagaccccagaatggtagatccaccgacagcttgcaccgtgcacctggaaaagccacagacactgaatgccagcccatgaaatcagccgagagtgagactgtaccctgcaaagccacaagggtggagctacccaagaccatgggagcccacctcttatatcggcatgacctgattatgcataattatgataagttgaagtctcgaatcagtgaaattattgacagtagaagaagattggaagaagacttgaagaagcaggcagctgagtatcgagaaattgacaaacgtatgaacagcattaaaccagaccttatccagctgagaaagacgagagaccaatacttgatgtggttgactcaaaaaggtgttcggcaaaagaagttgaacgagtggttgggcaatgaaaacactgaagaccaatattcactggtggaagatgatgaagatttgccccatcatgatgagaagacatggaatgttggaagcagcaaccgaaacaaagctgaaaacctgttgcgagggaagcgagatggcacttttcttgtccgggagagcagtaaacagggctgctatgcctgctctgtagtagagggaggaattacaatatccgcaaaaactatacaaacgatacttagacccaaatttgatgaaaacgggattccaacaacccatgaagaaacaaagaaacaggaacagaaaaaaaagctgtcggagacggcaagcacggatcgggcacggccggcgggtcgcagccgggctggaggccggtcggaaccgagcgggcaggaggccaccgctgcagcgcgggccccgcagaggaaggaagccggcgggcggggtagagccccgccggggggaagcgggctggccaccggccctccccgcctccggcatctcctggccgccgggcagcactacccccgcgcgcggccggcgtcctgtgagatcccggccatcctgactcccgtttcccccgtcctcctgcgagctggtcctgcacgccgccggtcgcatttgcccccggagttgccaacgagctcgggcttcctcccaccctccgtcaccgcacacttccgagggtccccgctgtcgccttgctgcagttttccggggcccctcaccggaggagagcgccctggccgctgccttcgtgttgcgggaaggagcgctcccttcccccgtggccctccagctgcagccagggtcgctgcccgggcccttcccggggcgggcgaggcggcggtggtccccggagctcgtcccctaacccccgccttccgaagtttgccgccctcctcttccggggtgggggaagtgcgcctcggggcggttggtcgctggggccctaactcagcgtttattgccagccaagcttgggcaggtcctcttcattgtgatgatgcagagaaccggaatgcagaggacaaaggaccactctccaaaggtttaagaggagaggtgactggccatacggctgtccatctgtcctccatcaatggtgtgaccgaagacagggctccacttcctctgcgtgccacagtcctctcactggcttccttttcagcaacttgtcaacactttgaatccaggctgactctcacagcgaggcccaatcctttctga

SEQ ID NO: 21974 - DNA, 5083 bp, Homo sapiens
  SIMILAR (507)..(2726): 721254mologous to Chimeric - Homo sapiens p85alpha-green flourescent protein fusion product,accession number W85011,Smith- Waterman Score=2499.
cggcaggctagctgtcggagacggcaagcacggatcgggcacggccggcgggtcgcagccgggctggaggccggtcggaaccgagcgggcaggaggccaccgctgcagcgcgggccccgcagaggaaggaagccggcgggcggggtgaagctcgtgtgtggagtgccacggtacaatcagacgacagatggacagtgtgacaaaagtgtcagaaaggattgggcctcgctgtgagagtcagcctggattcaaagtgttgacaagttgctgaaaaggaagccagtgagaggactgtggcacgcagaggaagtggagccctgtcttcggtcacaccattgatggaggacagatggacagccgtatggccagtcacctctcctcttaaacctttggagagtggtcctttgtcctctgctggacacataataggaattctaacacattctctgaattcacttttcataaaaacgtaaaatcagactgctctgtacaaccaggctcaactgttgcatggtagcagatttgcaaacatgagtgctgaggggtaccagtacagagcgctgtatgattataaaaaggaaagagaagaagatattgacttgcacttgggtgacatattgactgtgaataaagggtccttagtagctcttggattcagtgatggacaggaagccaggcctgaagaaattggctggttaaatggctataatgaaaccacaggggaaaggggggactttccgggaacttacgtagaatatattggaaggaaaaaaatctcgcctcccacaccaaagccccggccacctcggcctcttcctgttgcaccaggttcttcgaaaactgaagcagatgttgaacaacaagctttgactctcccggatcttgcagagcagtttgcccctcctgacattgccccgcctcttcttatcaagctcgtggaagccattgaaaagaaaggtctggaatgttcaactctatacagaacacagagctccagcaacctggcagaattacgacagcttcttgattgtgatacaccctccgtggacttggaaatgatcgatgtgcacgttttggctgacgctttcaaacgctatctcctggacttaccaaatcctgtcattccagcagccgtttacagtgaaatgatttctttagctccagaagtacaaagctccgaagaatatattcagctattgaagaagcttattaggtcgcctagcatacctcatcagtattggcttacgcttcagtatttgttaaaacatttcttcaagctctctcaaacctccagcaaaaatctgttgaatgcaagagtactctctgaaattttcagccctatgcttttcagattctcagcagccagctctgataatactgaaaacctcataaaagttatagaaattttaatctcaactgaatggaatgaacgacagcctgcaccagcactgcctcctaaaccaccaaaacctactactgtagccaacaacggtatgaataacaatatgtccttacaaaatgctgaatggtactggggagatatctcgagggaagaagtgaatgaaaaacttcgagattccagcagacgggaccctttttggtacgagatgcgtctactaaaatgcatggtgattatactcttacactaaggaaagggggaaataacaaattaatcgaaaatatttcatcgagatgggaaatatggcttctctgacccattaaccttcagttctgtggttgaattaataaaccactaccggaatgaatctctagctcagtataatcccaaattggatgtgaaattactttatccagtatccaaataccaacaggatcaagttgtcaaagaagataatattgaagctgtagggaaaaaattacatgaatataacactcagtttcaagaaaaaagttcgagaatatgatagattatattgaagaatatacccgcacatcccaggaaatccaaatgaaaaggccagctattgaagcatttaatgaaaccataaaaatatttgaaggaacagtgccagacccaagagcggtacagcaaaggaaattaccatttagaaaagtttaaaccgtgaagggcaatggagaaagaaatacaaaggattatgcataattatgataagttgaagtctcgaatcagtgaaattattgacagtagaagaagattggaaggaggacttgaagaagcaaggcagctgagtatcgagaaattgacaaacgtatgaacagcattaaaccagaccttatccagctgagaaagacgagagaccaatacttgatgtggttgactcaaaaaggtgttcggcaaaagaagttgaacgagtggttgtggcaatgaaaacactgaagaccattattcactggtgggaagatgatgaagatttgccccatcatgatgaggaagacatgggaatgtttgggaagcagccaacccgaaaccaaagcttgaaaaacctgtttgcgaggggaagccgagatggcacttttcttgtccgggagagcagtaaacagggctgctatgcctgctctgtagtggtggacggcgaagtaaagcattgtgtcattaaacaaaacagcaactggctatggctttgccgagccctataactttgttacagctctctggaaagaactgggtgctacattacctacacacctcccttgtgcagcacaacgactccctcaatgttcacacttaggcctacccagtatatggcacagcaggagggcgatggaagcgctttactctttgatccttctcctgaagttcagccaccctgaggcctctggaaagcaaagggctcctctccagtctgatctgtgaattgagctgcagaaacgaagccatctttctttggatgggactagagctttctttcacaaaaaaagaagtaggggaagacatgcaggctaaggctgtatgatgaccacacgttcctaagctggagtgcttatcccttctttttctttttttctttggtttaatttaaagccacaaccacatacaacacaaagagaaaaagaaatgcaaaaatctcggcggtgcagggacaaagaggcctttaaccatggttgcttgtttatgctttctgaagctgttatcagctgaaagttgggattctggagagccggaggagagagaggccgaataacctctggcctgagaaggtttgcgtccagcctgggtttagcctgggatgttgctgtgcacgggtgggacccagacacatcgcactgtgggattatttcattttgtaacaaatgaacgatatgtaggcaggaaagggcacgtcccactcacaaggggacgctttggggagaatgttcagttcatgttatgtttcaggaaggaaatttcttgttcataggaaagtgcccaggaaagtgtttttaactttgttccaaaaaaccaaaaaccccagccaccaggaaaattggatttttgggaaaacaggacttaaaatggacattccagtatataaaatatgtagcgtggtattggatgacctaacctatccaaatcggatggatttgtatcaatacccaaatagccttcctgttttgttttgcctgaaggcctaaattccaccagcccctatgcaatcccctaattttccattaagttgttatttcagttttaaatgtacccttcagaataagccttccccccaccccagtttttgttgccttgaaaatattgttgtccccggatttttgttaatattcatttttgttatccttttttaaaagtaaatgtacaggatgcccagtaaaaaaaaaaaaaatgggcttcagaattaaaactatgaaatattttacagtttttcttgtacagagtaacttggctgttagcccaaggttaaaaagttcataacagatttttttttggactgttttgttgggcagtgcctgataagcttcaaaagctgctttattcaataaaaaaaagaaatgaaaaagatatatgaatatgacaaagtattgctgagtccaacaatgttgttttaagactcttaaaatacgggtacctgggcaatggttaattttccataaaagaattgtgaacttcttgaaatctaggggagggggaatgtagtgaagggatgtatcggtggggtggtccgggagggggaggccaaggttatatgcactttctcatgatttaccagagaagtgaataactgcaaagtgaagttgcttcttctacttcagtcttctctcactttgatttgctagttgttatcaattaatgacaattacaaacctactgtatctctaatacagtgtgactggtcaggtatttcagttcttaggaaggaagtgccaagtttgtttttgggttcctggaacagcgctcacctttgtttagaacactggtttaaagggataatcatctctgtcacattagactatccatcatgaccagcaaatactcattttaggaaaaaaaaaagcatgatctgaaaaatacttttggtggtatgttggttaccctcctagctttccatttggtttaggaacataaagcaaataggacacagtccatactgtcactgctctggcactgtgtgggagcttcgcttaaagtcatgggtccattgcaggaatccaagtggcagtccttctcattcattctaatcattgtatgtgcttcactacgggggggagaaggaaacgttagcatcatgtttcccatttagggcaggagtgagaggtctctcttcctgatttaagatatgcaaaagctggtatgttcagtaggaactgtacatgtgttgggaggcataaagactaattagcaaccataatatggtcactacccctaataagactaaatgaaatccttgcaatttcaaaattactcctttccccaatattaagatttaccccacaagctaatatttcccgtttaaagtactaagggtgagggttttctgttactttgttttttaatgttgttccttttgaaagaatcagtcttgcagctgagtgaaaaatctgtggaatgtattatttgtcctctttacatgaaactactcatacttaagcaaaagtcagtcttatagcaaga

SEQ ID NO: 21975 - DNA, 408 bp, Homo sapiens
  SIMILAR (3)..(251): 901254mologous to Homo sapiens flavin-containing monooxygenase,accession number M64082,Smith-Waterman Score=423.
tggtttccaacagctgcaaggagatgtcttgttactcagactttccattcccagaagattatccaaactatgtgccaaattctcaattcctggaatatctcaaaatgtatgcaaaccactttgaccttctgaaacacattcaattcaagaccaaagtctgcagtgtaacaaaatgctcagattctgctgtctctggccaatgggaggtggtcactatgcatgaagagaaagctgttcttgacagcactctgagccatcatacctctttcccatataaactattttcacagatctcaactaaaaccccttacttcacaaatgattgtgttgtgctgaaatggtgctcttatagtactggcttattaaaagtaaaaaataaacctaaaaattgattgttttaaaaaaaaa

SEQ ID NO: 21976 - DNA, 404 bp, Homo sapiens
  SIMILAR (325)..(366): 501254mologous to Homo sapiens dJ798A17.1 (Flavin-containing Monooxygenase 1 (FMO-1),accession number AL031274,Smith-Waterman Score=36.
tgtctgcagcacgggtgggagggtgcagtgtgggtattgaaggctggcagggcctgggaatcactggggcagattgcacagtgaggcgaacactggaggtgaggggccaggtcccaccaataccattcagaaggggcagggactcatactccctgtatatatgctaatgttactcagactttccattcccagaagattatccaaactatgtgccaaattctcaattcctggaatatctcaaaatgtatgcaaaccactttgaccttctgaaacacattcaattcaaggtaagacacaaaacatcagttagtagtcagaaagtatttcctacctattttctcttatctctccagcctcttgagaatagaaaaatctttgaatattgttattctacaatgccccct

SEQ ID NO: 21977 - DNA, 2652 bp, Homo sapiens
  SIMILAR (109)..(1224): 961254mologous to Homo sapiens flavin-containing monooxygenase,accession number M64082,Smith-Waterman Score=1883.
  misc_feature (1)...(2652): n = a,t,c or g
ctcccaagccagcactggctcatactgattcattttgatctctgctaataccagagtcctgcgtggcagagccattggcaccagaaattacaagtacgtaaagagaacatggccaagcgagttgccattgtgggagctggggtcagcggcctggcctccatcaagtgctgtctggaagaaggactggagcccacctgctttgagaggagcgatgaccttggggggctgtggagattcaccgaacatgttgaagaaggcagagccagtctctacaagtctgtggtttccaacagctgcaaggagatgtcttgttactcagactttccattcccagaagattatccaaactatgtgccaaattctcaattcctggaatatctcaaaatgtatgcaaaccactttgaccttctgaaacacattcaattcaagaccaaagtctgcagtgtaacaaaatgctcagattctgctgtctctggccaatgggaggtggtcactatgcatgaagagaagcaagagtcagccatctttgatgctgtcatggtctgcactggctttcttactaatccttatttgccactggattcctttccaggtattaatgcctttaaaggccagtactttcatagccggcaatataagcatccagatatatttaaggacaagagagtccttgtgattggaatgggaaattctggcacagacattgctgtggaggccagccacctggcggaaaaggtgttcctcagcaccaccggagggggatgggtgatcagccgaatctttgactcgggctacccatgggacatggtgttcatgacacgctttcagaacatgttgagaaattccctcccaaccccaattgtgacttggttgatggagcgaaagataaacaactggctcaatcatgcaaattacggcttaataccagaagacaggactcagctgaaagagtttgtgctaaatgatgagctcccaggacgcatcatcactgggaaagtgttcatcaggccaagcataaaagaggtaaaggaaaactctgtcatatttaacaatacttcaaaggaagagcctattgacatcattgtctttgccactggatacacatttgctttccccttccttgatgagtctgtagtgaaagttgaagatggccaggccttcactgtacaagtatatcttccctggcacatctgcaaaagccaaccctgggccattattggccttcattcaaacccttggggcttccatgattacctacaggagaaacacaagttcggtgggctgtttcgggttcctgaaaggtgttaantaggttaccaccaccaagtgtcatgatagaggaaattaatgcaaggaaagaaaacaagcccagttggtttggcttgtgctactgcaaggctttacaatcagattatatcacatacatagatgaactcctgacctatatcaatacaaaacccaacctgtttctctatggctcctaacggatcccacatctgggctctggaccgtcttctttgggcccatgcttcaccataccagttccgcttgactgggcccagggaaaatggggaagggagcccaggaaattgcccttcatggaccccagtggggacccgaacatttcaagggttcattcaaaggttcggagttgttacaaggagttttccattttcccttttggaaagtttttcttaaaagtctttagctttccgggctttggcttgtggctatttttcctgattttcccctataagtaaaaagatctccctaaatgggaagatgccacagagtagaatttacaaaggctcccaattccctctcttacagcaaatattgcccttcacagttataaaactgtattcaaatagtaaaggcccacccctcctcgcctttccccggctgggcccccgggcctacccactgggtattcctggagccctctccccagctcccacttctaatgcctagagaatgataacttaaggatttctgtggcattttgaaggttgttggaaagttacaggttcattttagaaagaaagctgttcttgacagcactcctgagccgatcatacctctttcccatataaactattttcacagatctcaactaaaaccccttnactttcacaaaatggattgtggttggtgctggaaatggtgctcttatagtactggcttattaaaagtaaaaaataaacctaaaaattgattgttttaagtgatcttttgttctcttattaaagattgggaaaagggagaaaaagatgaggattctatgaataaagctcataaaaggatagggggttcaatgagttactttgagagtttcccaaaggactgtacctgcctgggactgttcattcctccagaacactctttataacaaagctgttactccagctggcctcccaaagacccaaatcagattccacagaaaaccaccacctccacgggctcttagaaccagcctccagcagccaaaggaaaaagcctacctgcttagatcctccttcacaaccctgctgtaagaggcaaatggagctgcctccttttaaagagtcaatgagaaccaaccaaattcaattggaattcattagataaagagcacagccaagaagcttttaatggagagaaagcagggagagg

SEQ ID NO: 21978 - DNA, 1101 bp, Homo sapiens
  SIMILAR (356)..(949): 361254mologous to Homo sapiens ribosomal protein L9,accession number U21138,Smith-Waterman Score=143.
cggcaagcgccatatgagcctggcggcgccagatgcgaatcctgttgtgggctttttggcctattcccgcccctcagtcttgccgggatggcaccgcccgcataggacttccagggttgggctgagtgggagttcgactgctgggcctcgtaattctcgctttggggctgctccttccaggctgggacacactggggcccgctgtcggtctcccgtcctccgacatcttgtctggaacttccgcctggcagtctccagtaggagtggagctctgtgcggcgtagtttggtggaaaaacgggccttgcgtcggcctcacccccagtgtttgtgtttcagaatgaagactattctcaagcaatcagactgtcgacattccagaaaaatgtcgacattactctgaagggacgcacaggtattcgtgaagggcccccagaaggaaccctgcggaagggacttcaatccacatcaatggtagaactcagccttctttggaaagaaaaaaaaagaggctcccgggttgacaaaatggtggggtaaccagaaaaggaactggcctacccgttcggactaatttgtaagtcatgtacagaaccatgatcaaagggtggttacactggggcttccggttacaaggatgaggtcctgtgtatgctcacttcccccatcaaccgttgttatccaggaagaatggggtctcttggttgaaaatccggaaatttctttggggtgaaaaatacatcccgcagggtttccggatgaagaccaggttgtttgcttgtttcagtatctcaaggccccagaaaagatgaaattaatcccttgaagggaaaatgacattgagcttgtttccaaatttcagccggcttttgattccagcaagccacaacaagttaaaaaacaaggaatatcaggaaatttttgggatggtatcttttgtctcttggaaaagggactgttccgccaggcttgattgaataagatctaagagtttacctggctacagaaagaagatgccagatgacacttaggagctaccttgtgatatattaaaagatgcaaaaaaaaacacatattagatttggaaaaaaaaaaaaaaaaa

SEQ ID NO: 21979 - DNA, 482 bp, Homo sapiens
  SIMILAR (236)..(430): 961254mologous to Homo sapiens transcription factor IID,accession number X97999,Smith-Waterman Score=315.
gatttaatgaacttaagtgtgtgaataagcctttgtgttacgactggtattcggtcacagcatatttagagaaaagacttggagcttaaataaaaactaaggcaaaatagacgcttagctgctgatctacagagaacttcttgtaattaaaagatttcaattcatagcaaactggtgttttaaactattgcagtagctggaactttttagtgtaaccagcatttattggagaagtgaatcacaaggaaccaatcagctggttatgggaattcagaagcagattgacaacatgaaaggcaagctccaagagacccaggacagggcaaaacgacaagaggatctcatcatgaaagtggaaaatctggctctcaagaacagatttcaggctgtactggatgagctcaaacaaaaggaagaccgagaaaaggagcactcagctctttgcaagaggagctagaatcactcctagagaagtaaaaaga

SEQ ID NO: 21980 - DNA, 441 bp, Homo sapiens
  SIMILAR (1)..(159): 961254mologous to Homo sapiens transcription factor IID,accession number X97999,Smith-Waterman Score=265.
aaggaggcagaaaatcagtgcctggatatctcttctccaggaatgtctggtcacaggcagggccatgactcattagaacatgatgagcttcgggagatattcaatgacctcagcagcagcagtgaggatgaagatgagacccagcatcaagatgaaaaatgattgtaggaaagttgcaggattagcggaatgtatggttcaaccttaattatagcttcattgcaggactttactgtttctccattttctagaagctgctgttgctgctttgtgatgacgtgagatcaataagaagaacctagtctagagacaatgatgctagtttgcatatgttttcctatgcaatagttgttttcccagttattcaaagcagctttctatatgtagagatgcaaattattaagttgtttccaatacaataaataaaagcatctgtttttc

SEQ ID NO: 21981 - DNA, 447 bp, Homo sapiens
  SIMILAR (109)..(387): 461254mologous to Homo sapiens TFIID subunit TAFII55,accession number U18062,Smith-Waterman Score=150.
  misc_feature (1)...(447): n = a,t,c or g
cggggtctggtgattgngagctgcgcctctcggcaagatttcgcgctgcccatcccgggccctttcatcagtaatcggtagtggatcactctgccaagcggcagganagatataaacatcattgacacggaggaagatctggagagacagctacaggacaagctaaatgaatcagatgaacagcaccagggaaaatgaaggaaccaatcagctggttatgggaattcagaagcagattgacaacatgaaaggcaagctccaagagacccagggacagggcaaaacgacaagaggatcttcatcatggaaagtgggaaaatcttgggctcttcaaggaacagattttccaggctgttacttggattgagcttccaaaccaaaagggaaggacccgaggaaaaagggaggcaanttcagntcttttttnccaggagggagcttnggatt

SEQ ID NO: 21982 - DNA, 2445 bp, Homo sapiens
  SIMILAR (757)..(885): 761254mologous to Homo sapiens transcription factor IID,accession number X97999,Smith-Waterman Score=151.
tttcgtgggtaggcgacccggacggagggccggcgaggtgcggggtctggtgatgcgagctgcgcctctcggcaagatttcgcgctgcccatcccgggcgcctttcatcagtaagcggtagtggatcactctgccaagcggcaggaagaattaaggaaacgacaaggagacgctcggctctctcccgcttggctccttgcggcctcctcttcccttcgctccggcccggtgaaactgaacttataatcgtcactggattgtaagtacccgaggcgaagagagctcgcttgagccctgatttttttgagtgtctttgttccggggagagttttgtgagttgaaaagtatctcttgctggggcttttcttggggccgaaaaccgtttccggggggagccgccattttgttttcctgtttccctagctagctagctagctctctccgcgttgacccgcaacggcacctagaggttgggacttggcattgcatcggatttagtgaacttaagcctgggaataagcctttgtgttaacgactggtatccggtcacagcatatttacagaaaggacttggagcttaaataagcactaaggcaaaatagacgcttatctgctgatctacagagaacttcttgtaattaacagatttcaactcattagcaaactggtgttttaaactattgcagtagctggaacatttttagtgtaaccagcattttattggagaagtgaatcacaaggaaataaagatgagtaaaaggaaaagatgatgctcctcacgaactgggagagcccagtttatcttacgtctgcctcccagaatatgcctctactgtgagaagggcagtacagtctggtcatgtcaacctcaaggacagactgaccaattgagttacatcctgatgggcgtcatggaatccgtcagagtggaccgtgttccattggcctcaaaattagtagaccctgcctctgtgttatggaagagcctgaaaacccattattaaagaaacctttttccaagacagctattatcggtcagatgctggtatccacagttgatggtgatctctttcctcctgtggaggagcccagttgcttagcacttgatcctaaagcaagcaatgaaaaaggataaggacaaagagaaaaaagtttatctgggaaccacggaattactctgcctctaaagaatgtcaggaagagaaggttccggaagacagcaaagaaggaaatatatttgaatctcccagatgtttgaaaaaaggagttgaaacggtttgcttgaggtaccagatgctggaagctgttagtactcggtggggaattatttgcccgaaggtggaaacaaaggggggcagaaaatcaaggtcctggatatctcttctccaggaatgtctggttcacaggtcagggccatgtactcattagaacatgatgagcttcgggagatattcaatgacctcagcagcagcagtgaggatgaagatgagacccagcatcaagatgaagaagatataaacatcattgacacggaggaagatctggagagacagctacaggacaagctaaatgaatcagatgaacagcaccaggaaaatgaaggaaccaatcagctggttatgggaattcagaagcagattgacaacatgaaaggcaagctcccaagagacccaggacagggcaaaaccgacaagaggatctcatcatggaaagttggaaatcttggctctccaagaacagatttccaggctgtacttgggatgagcttcaaccaaagggaagaccgagaaaaggagcaacttcagctctttgcaagaggagctagaatcactccttagagaagttaaaaagaacttgatgtttaattttcagtctttcagactggttcagcatttaggaaaattctttgggcttttattgttactggggtatttaagaccttgctcttcctagtcccttttaatgcctgtgtgttcctgttaagttcctttccatttggtttggtaattttggtttttccagccaaatttatattggttttggccagggtgttccacccctataagaaggcaggattgtatagggcaggaaaaatgattgtagggaaagttgcagggattaggcgggaatgtatgggttcaacctttaattatagccttcattgccaggactttacctgtttcctcccattttcctagaagctgctgttgcctgcctttgtgatgaccgtgagatcaataaaaaaaacctatgtttaaagacaatgatgctagtttgcaaatgttttcctatgcaaaagttgttttcccagttattcaaaacagctttttttaaagtgaaaaacagatgcttttatttattgtattggaaacaacttaataatttgcatctctacatatagaaagctgctttgaataactgggaaaacaactattgcataggtcg

SEQ ID NO: 21983 - DNA, 413 bp, Homo sapiens
  SIMILAR (157)..(228): 1001254mologous to Homo sapiens A protein (AA 1- 282),accession number X06347,Smith-Waterman Score=128.
  misc_feature (1)...(413): n = a,t,c or g
cgctttgcctccgtccttccccctactcccgccttacctgacttccttttcggaggaagatccttgagcagccgacgttgggacaaaggatttggagaaacccagggctaaagtcacgtttttcctcctttaagacttacctcaacacttcactccatggcagttcccgagacccgccctaaccacactatttatatcaacaacctcaatgagaagatcaagaaggatgcgtatccagtatgccaagaccgactcagatatcattgccaagatgaaaggcaccttcgtggagcgggaccgcaagcgggagaagaggaagcccaagagccaggagaccccggccaccaagaaggctgtgcaaggcggnggagccacccccgtggtggnggctgtccaggggcctgtcccgggcn

SEQ ID NO: 21984 - DNA, 519 bp, Homo sapiens
  SIMILAR (220)..(378): 811254mologous to Homo sapiens A protein (AA 1-282),accession number X06347,Smith-Waterman Score=214.
  misc_feature (1)...(519): n = a,t,c or g
cttgatntaggttgcagttgcatgggtgtttgtgtttaaatttttcattaaatgctatgtttacattagagtttttcaacttagtactatctgcattttgggctggataattctgagtaatggggccctgccctgtgcattggaggctatttggcatcatttctggcctctgtccacttgatgccgttacgttagggggaaatgctgagtccctgaggtctgtcgttctctttcaggttccctggcttcaaggaggtccgtctggtacccgggcggcatgacatcgccttcgtggaatttgacaatgaggtacaggcaggggcagctcgcgatgccctgcagggctttaagatcacgctcagccccctgaaggtaagtccccccttgggggccttcttggagccgtgtgtgagtgagtggtcgccacacagcattgtacccagagtctgtccccagacattgcacctggcgctgttaggccggaattaaagtggctttttgaggtttggtttttcacaa

SEQ ID NO: 21985 - DNA, 427 bp, Homo sapiens
  SIMILAR (398)..(168): 981254mologous to Homo sapiens A protein (AA 1-282),accession number X06347,Smith-Waterman Score=387.
tttttttttttttttttgtgaaaaaccaaacctcaaaaagccactttaattccggcctaacagcgccaggtgcaatgtctggggacagactctgggtacaatgctgggtggcgaccactcactcacacacggctccaagaaggcccccaaggggggacttaccttcagggggtggctcccccgccttgcacagccttcttggtggccggggtctcctggctcttgggcttcctcttctcccgcttgcggtcccgctccacgaaggtgcctttcatcttggcaatgatatctgagtcggtcttggcatactggatacgcataggtttgtcatataaagggaaaccctgcatggagcgcagggcgttggtggcgctgctgacctccttgaagatgacaaagggcctggcccctcatcttcaaggctccg

SEQ ID NO: 21986 - DNA, 392 bp, Homo sapiens
  SIMILAR (1)..(213): 841254mologous to Homo sapiens A protein (AA 1-282),accession number X06347,Smith-Waterman Score=291.
  misc_feature (1)...(392): n = a,t,c or g
ctaaaaaagtccctgtacgccatcttctcccagtttggccagatcctggatatcctggtatcacggagcctgaagatgaggggccaggcctttgtcatcttcaaggaggtcagcagcgccaccaacgccctgcgctccatgcagggtttccctttctatgacaaacctatggtgagcattgcgggtacggaggctgtgtgggtgtgtaaaatgttataggagactgggcgggcctggattagaggaggggatattacggttcatttgnnnnnnnnnnnnnnnnnnnnnnnnnnnnnnnnnnnnnnnnncactaagaatctttaacataccttcccctactgaataagcaccatgaaagaaggggttttggctattttggtcattgctttatt

SEQ ID NO: 21987 - DNA, 1772 bp, Homo sapiens
  SIMILAR (648)..(1298): 331254mologous to Mus musculus small nuclear RNA,accession number L15447,Smith-Waterman Score=197.
  misc_feature (1)...(1772): n = a,t,c or g
tttcgtggcggggccaggagagaaagctttgtggtttggtctcagggaagtagcaggcgccggttgagagaactacggccctgtcggaaggtagacctccggtgcaaacgaccatcggcggcaggcgagcggtacgcttggcgtccgggccttcctgggcccgtctgaggaaacttgctgctcgaggccaggctgcctaggacctgtccctttttttctatactggctcccacatccgggttttttctccgggacgtcccttcggatgcttgggccaatgggaatcgccatttagggtgctccgcccaccgggttcgcgtagagcatcctgggaagtcgtagtaaatctctcgagagttctctccgcacgcgggcctggagaagcggggtcctacggcacgctttgtttgtcgcgctttgccttccgtncctttccccctacttcccgccttaacctgaattcctttttggaaggaagatccttgagcagccgacgttgggacaaaggatttggagaaacccagggctaaagtcacgtgttttcctcctttaagacggagcctgaacacttcactccatggcagttcccgagacccgccctaaccacactatttatatcaaccaacctcaatgagaagatcaagaaggatgagctaaaaaagtccctgttacggccatctttcttcccagtttgggccagatcctgggatattcctggggtattcacgggaggccttgaaggatggagggggccaggcctttttcaatcttcaaggaggtcagcagcggcaccaacgccctgcgcttccatgcagggtttccctttctattgacaaacctatgcgtattccagtattgccaaggacccgacttcaggatattcatttgccaaggattgaaagggcacctttcgtnggaagccgggaccccaaagcgggagaaagagggaggcccaagagccagggagaccccgggccacccaaggaagggctgtgcaagggcggggggagccacccccgtgggggggggctgtccaggggacctggtcccgggcattgcccgccgatgacttaaggcgccccgcatttatgcaccacatgccgggcccagccgcccctaactgccgcccccctggatatgatccccccgccagggccttgcacctggccagatcccaccagggggccatgccccccgcagcagcttatgccaggacagatgcccccctgcccaagcctctttggagaaatccaccgaaatcacatcttgtttcctcaccaaccttcccagaggagacccaacgagctcatgctgtcccatgctttttcaaatcaagttccccctggcttcaaagaaggtcccgtctgggtaccccgggcgggcaatgaacatcgcccttccgtggaagtttgaacaaatgaggtaacaggcagggggcaagcttcgcggattccctgcaagggcttttaaagatcaccgcaagaacaacgcccatgaaagatctccctttgccaagaagtagcacccttttcccacccaagcccggcccctatcccctgttcgtggggccaccccttttccccctgtggctcagtccccctgaaggttaaagtccccccttgggggccttcttggagccgtgtgtgagtgagtggtcgccacacagcaattgtacccagagtctgtccccagacattgcacctggcgctgttaggccggaattaaagtggctttttgaggtttggtttttcacaaaaaaaaaaaaaaaaaaa

SEQ ID NO: 21988 - DNA, 1632 bp, Homo sapiens
  SIMILAR (192)..(1019): 521254mologous to Homo sapiens epithelial glycoprotein (EGP) precursor,accession number M32306,Smith-Waterman Score=578.
tttcggcgagctgagcaccttcgacgcggtccggggaccccctcgtcgctgtcctcccgacgcggacccgcgtgccccaggcctcgcgctgcccggccggctcctcgtgtccaactcccggcgcacgcattcccgcgagtcccgggcccctcccgcgccccatcttctcggcgcgcgcgcaggcatggcgcccccgcaggtcctcgcagttcgggcttctgcttgccgcggcgacggcgacttttgccgcagctcaggaagaatgtgtctgtgaaaactacaaagctggccgtaaactgcttttgtgaataaataaatcgtcaatgccaagtgtacttcagttggtgcacaaaatactgtcatttgctcaaagctgggttgccaaatgttttggtgaatgaaggcagaaatgaatggctcaaaactcgggagaagagcaaaacctgaagggggcctccaagaacaatgatgggctttatgatcctgactgcgatgagagcgggctctttaaggccaagcagtgcaacggtcacctccacgtgctaggtgtgtgaacacatgctggggtcagaagaacacacaaggacactgaagtaacctgctctgagcgagtgagaacctactggatcatcattgaactaaaacacaaagcaagagaaaaaccttattgatagtaaaagttttgcggacttgacttcagaaggagatcacaacgcgttatacactgggatccaaatttttatcacgagtattttggtatgagaataatgttatcactattgaatctgtttcaaaatttcttctcaaaaaaactcagaaatgatgtggacatagctgatgtggcttattatttttgaaaaagatgttaaaaggtgaatccctgtttcatttctaagaaaatggacctgacagtaaatggggaacaactggatctggatctgctgatccctggtcaaactttaagtttataatgttgatgaaaaagcaccctgaatttctcaatgcagggtctaaaaagctggtgttattgctgttattgtggttgtggtaataaccagttgttgctggaaattgttggtgctggttatttcccagaaaggaagagaatggcaaaagtatgagaaggctgagattaaaggagatgggtgcagatgccatagggaactccaaaatgcataacctaatataatttgaagcattatagaaggaagggaaatagccaaatgggcaccaaattccaatggtggtgtgcgtgggaccgaagacatctttgaaggttcatgagtttgttagtttaaccatcatatatttgtaatagtgaaaccctgtactcaaaatataagccagcttgaaactgggctttaccaattcttgaaatttgaccaccaagtgttcttatatatgcagatctaaatgtaaaatccagaacttggactccatccgttaaaattatttaatgtggtaacattcaaatggtgtgccttaaaaatggcttccacagtaaaatctgaaaaactgatttgtgattgaaagctgcctttctatttacttgagttcttgtacatacatactttttttatgagctatgaaataaaaccattttaaactgaatttcttaaaaaaaaaaaaaaa

SEQ ID NO: 21989 - DNA, 339 bp, Homo sapiens
  SIMILAR (1)..(204): 891254mologous to Homo sapiens ANG2,accession number AF024631,Smith-Waterman Score=315.
atgctaaagctttacagtggcctctcggaaggggaggcggtgggactccccgcgggtccagaccccctggaccccactgatctgaacggggcgcagttcaacccagaagtttacctagacaagctgcctagagagtgccctctggcccagctgatggacagtgagacggacatggtgcagcagatccgggctctagacagcgatgcaaaccctggagtgaagctgcagaccttcacagtgagtgttacagctcttaaggctgcacgtctggagttgttcatttctcctgatgggttcatggtctcactggcttcaggagtgaagctgcagaccttctca

SEQ ID NO: 21990 - DNA, 1830 bp, Homo sapiens
  SIMILAR (1764)..(1471): 841254mologous to Homo sapiens Human G-protein coupled receptor GRIR-1,accession number Y28279,Smith-Waterman Score=426.
ttaatccttccaagagagcttccctgtctcatttagcctttgcatatcctctctttcatgtgggtccaaatgggggtctgttcctggcaactgggtccttccatgctcttgggggttttgataatcagctggtgcatgttcctctagccacttagttgctgcttggaggactctccgcctttcttcgctgttaaagaggaacacgagcaactggtgccaatcagccaaggtggggctgtgggtctggataacagcttggagaaaatcaattagggcttgtggcttttcggtatagggcggtgtattgtttttccagttgagaaggtcgacacaggtgaagggctggtagccaaaagcacgcctctccaccacgtgaccatcctcatctatcccagtataccgctgctctctcaggggcatttgtgtccccgttttgcgtctcaaacgagctgtgatattgctcctaatgtccagggagagagagagcatgatattacgttcaatatcgcagtacgtgtacacccaccggtgatattgatccaaatataatctgtgatatttttcccagtatgcaaggggagaggatgatactactctcaatatcgcagggctgttcacatccccagggacattttttcctaatatctggagaaagtccttttcttctttagaagaagtaggtccaagatcaggtgcttgagggagcactgatgccccgaagggggcagatgctgcttttcgagcctctgagtcagcgcgggaattccccaagcccaccaaggtggaagcttgctggtgtccccgagaatcagtgtaaatgttgacagtctcaccctcactgagttctaaggcccgaatgaaagcaatgagttcagctttctgggctgacgtggcctggggcaatgatctgtcttcatcaacagtgtccagggttatcactgcataccctgcacctctctctccttgggggttgaagaagctactcccatccacgtatagttcccagtctactgattcctgggtccttccatactcttgggggttttgataatcagctggtgcatgttcttctagccacttagttactgcttggaggactctccgcctttcttcgctgttaaagaggaacatgagcaactggtgccaatcagccaaggtggggttgtgggtctggataacagcttggagaaaatcaattagggcttgtggcttttcggtatagttctgtgtattgtttttccagttgagaaggttgacgcaggtgatgggctggtagccaaaagcacgcctctccaccaagtgaccatccttatctatcccagtataccgctgctctctcaggggcatttgtgtccccgttttgggtcgtaaacgagctgtgttattgcttctaatgtccagggagggagagagcatgatattacgttcaatatcgcagtaggtgtacacccagccggtgatattgatcagaatataattgctgtgagattggatgtccacaaccatcttggggaccgtgggggaggggaaaccgatgtcaggcaaggacaggttggagaggaagaagtacatggaagtgtggaggtgggagtcagggctgacggccaggatgatgagcaggttccccagcaccgtgaccaggcacatggacaggaacagcccagcaaggaccggctgcagttctggatcctctgagagtttgaggaggaggaatcgagagacatccgttacattctgtgggtctgtagagtttggacaccttttgcctggtgtgacatagggtccaccttcattcttctgcatgtggaaatcaagtttctccaacaccat

SEQ ID NO: 21991 - DNA, 1461 bp, Homo sapiens; identical to SEQ ID NO: 6478
  SIMILAR (13)..(456): 431254mologous to Feline leukemia virus gag-pol precursor polyprotein gPr80,accession number AF052723,Smith-Waterman Score= 283.

SEQ ID NO: 21992 - DNA, 1928 bp, Homo sapiens
  SIMILAR (1928)..(1467): 571254mologous to Oryctolagus cuniculus cyclophilin 18,accession number AF139893,Smith-Waterman Score=427.
cctgctgtgctccctatttcaaccctaacagctctcacagtgggcagcacatagtaggtgctcaggaaacactggtgggagagcactcgggtctgctcagcaccttcctctctcctccagctctcccctgtcacgaaataatttcctttgccgtcgccacctgtctgggtgccggtctccaccctgcccggccgcggcgcgtcctccccgtcctcgccgtcctggggctgtgcgcttcccccctccagcaacagccgcagcctcttctcctcgggagggacgtcgtcctcctccctcctgggccggccatccctgcctcggggcttgccagtggcttcggagctgccggaagggctggccatggctccgggggttctgcctgcactgtttgggtccacactgcctttatgagctgtaacactcaccaggaaggtctgcagcttcactcctgaagccagcaagaccacgaacccacggatttgaaattgctgagatgtttcttgggctggtcggtctgaggacgtgaggtcgtaggtggatctttccgagccagcagtggcaaactgcttgggtccccttccacactgtggaagctttgttctttcactcttcacgatacaatcttgctgctgctcactctttgcatctgcactacctttaaaagctgtaacactcactgcgaaggtctgtagcttcagtctgtgaaggtctgcggcttcactcctgaagtcagcaagaccaagaacccactggaaggaaccaattccagacacagtatgatagctttgggagacaaaagtaacacgagtgagaacatgtggtgtttggttttttatccttgcgatagtttgctgagaatgatggtttccagcttcatccatgtccctttctacaatgatgattttgagggcttcaatatttaaaggggaaagggttaataggcaatattctttcagaagtttcatggactcttctttgacttttttcataaaatcttgaatcaaacctgtctccatgcaatgattctccccagcatgagtaactttaggtcctttcccttggggctgcccgactccatacaaataatgggccttatgatgattaaggaattcttccaagtgacagttaaagaggctgcctgcctcctccccacacttcaaagcagtggctgtcttcaatattggcagcagaacaatgctcaaacgtttgttgcacttggtacactcacttctctgctttctgagacttgagtccatagatgaaaagaagcattggttttccttgggcttgaatggtatccatcctgagagtagatgtttagaattaggagtcgtatggtgcctgcactgactgccagacctccaaccaaatacactgaggacttcagattgtcggcatccctgtgagcgagcacaggagtagctcttgtaagaccatccaatatccacatgagtgaactcagattgatttctcccagtcaagccttgagatgactgcacctggtctacaccttgattgcagctttgtgggagatccctcatgccctctttcacattgtccaggcccacatggttgccatccaaccattcagccttggcatggcagattaaaaattggaaaccatttttattgggtccagcatttgccatggacaagatgccaggacctctatgcttctggatgaaattttcataaccaaatttctcctcgcatatggatttgccatcagtgccattatggcatgaagttaccacccttggaataattttgtgaaagcagaatctcgtataaccaaattctttctctacagttcccaaagcacaaaagttttctgctgtctttggaactttgcctacaaacagtttgaagaagacgtggcccaagggctcaccctctgcagctatgccaaacagagtggggttggccat

SEQ ID NO: 21993 - DNA, 2287 bp, Homo sapiens
  SIMILAR (1231)..(1365): 261254mologous to Homo sapiens ANG2,accession number AF024631,Smith-Waterman Score=44.
  misc_feature (1)...(2287): n = a,t,c or g
tctgttgttgtttgtttgtttttgagcccaggaataacttcccacacatatgtcccaatgatttttaaaataggtgccaagaaagttcattggtggaaaagcatacttttcaacaaatcgtgttggagaaacttgatttccacatgcataagaatgaaggtggaccctatgtcacaccaggttgcagtaaaaacagggataccataagcaaccacctctttcctcaacgatgtgatgaaagcaaaagccaagtagctccatatatccaacttaaaaatataaaaagttacgcccgtgggctgcagttggagctatggcggcagcagctgtcactgggcctagcctggggtgtggacctggggactccccagaaggccccgatgtggaggctcacggagcgtcggcggaaggcgcacaggatgctaaagctttacaacggcctctcagaaggggaagcggtgggactccctgcagggcccgaccccctggaccccactgatctgaacggggcacactttgacccggaagtttacctagacaagctgcctagagagtcccctctggcccagctgatggacagtgagacggacatggtgcagcagatccgggctctagacagcgacatgcaaaccctggtctatgagaactacgataagttcatcccagccacagaaattgacaaacagtgtaaaactacctcccagtgccaagtgtataagtgtgtccagaattggtgggttcttggtctcactgacttcaagaatgaagctgcggaccctcctgatatgttcgaagcttcttccttctggtggggttcgtggtctcgctggctcaggagtgaagctgcagaccttcacggtgagtgttacagctcttaaggctgcatgtctggagttgttcacttctcccggtgggtttatggtcttgctggcttcagaagtgaagctgcagaccttctcggcaggggacagcgactgcttgggccagggcaggcgagctcagcgcaggccagggcccggcgtgtccgcggtgggcgcgagcggccagcagagggcgccagagagcaacgagcggcccgcggaggagcccacgcccgccccgatgcctagctccgcgccgcgcggacccaccgagcccgcgctcagacgccccagctccgccgacaggccgctcgcgccgggtgcaggcagagcccccggagccatggccagcccttccggcagctccaaagccactggcaagccccgaggcagggatggccggcccaggagagaggaggacgacgtcactcccgaagagaagaggctgcggctgttgctggaggagggaagcgcacagcccgatgacggggaggacgcaccgcggccaggcaggaaggagaccggcacccagacaggtggcgacggcagaggagcagcacgggcagccctcctcgccgtgggcggcatcagagcccccctgcccagtcttggggttgctcctggatgccgtctgggaggcttgctcatggtgacatcctcatctccccatgcactttacctgcattcagagcttgggtcacctggacactgaactcaggtgaattttctctgagatcccgggagaaggaggacagttctctggaaggttttccacggccgatcacggaaagggtgagaaaggagaggtcctggtcggcgacacaattacggtggcagtgtaacgccaggaaactttattgcgtgaagtccctctcactccctctacctccctcttttacggtggactctgccaaagaccaggattcccagaatgccagtggagtgaccaagtgtagtgggaccttgggaacacgagtctggagccaggcggctggggtttgcatccctggttcttgcccctccttagctggctgaacatggcacaagcccacttaccctctctgagcccttacctgtccttcggtggcaaaatggatctgtccaaanaggcccccattccccggggttgttactgctgagattaagggaagctcatcccatagaagcacttagcccttgtgcctggcacatagtgtatggtggataaatgggacttaggactaaaactcatgccttggtgtgtttttgcagtgatgttttgttctggggtgcatcaaaagagacaaggttcttggttgggcatggtggctcaagccaataatcccagcactttgagaggccgaaaggggaggatcgcttgagcccaggagtttaagaccagcctgggcacggtggtgaagcctcatatctacctaaaaaaaaaaaaa

SEQ ID NO: 21994 - DNA, 3266 bp, Homo sapiens
  SIMILAR (1034)..(1774): 751254mologous to Homo sapiens Carbonic anhydrase-related protein 10,accession number AB036836,Smith-Waterman Score=854.
  misc_feature (1)...(3266): n = a,t,c or g
acgcgtccgggggaaatctccttcagtggaagctgctgagtgtcgttggcggaaagtatcctggagcccagcaaaagcctccaaagcactagagcttccctaaagaaaagcagaataaaagaaagacaagaagggaagcccgttcctctaaagcccgggtttccaatagtcccggatcctcctggagttgggcgaaggcgcagttggcagcagccgctgctggcacccggacttggaaaggcggtgttcccccttttcgggaggagggaggcagggacttgcaggcaagagttgcacctggtctaggaacctgcagagaaaagaactctggggagaagaactgccccggagcgcagcagccaccctccgaccatgccccggtgaggggggcggacttcgagggcaacttgccgcggactgcctgggcttagccagcgagctacgcgctcccgggagcccggaattgcacggcgcagcccggcggggggctatcgtctatgtcttcttggggcgccagacgaatcggggtctcgtttttgctggaagagcccagtgttggtggcttcaggtggctgctgccgccgccgccgccgccgccgctgctagtgcggtttccgccgctggtgcgaagagaagagacacgcgagcggggagacctccaaggcagcgaggcatcggacatgtgtcagcacatctggggcgcacatccgtcgagcccgaggggagatttgccggaacaattcaaactgcgatattgatcttgggggtgactgtccctggccggctgtcgggtgggagtgcgagtgtgcactcgctcggaagtgtgtgcgagtgtgtatgtgtgtgtgccgtgtcgggctccccccttccccccgttttcccgtcgagtgatgcacttggaatgagaatcagaggatggaaatagtctgggaggtgctttttcttcttcaagccaatttcatcgtctgcatatcagctcaacagaattcaccaaaaatccatgaaggctggtgggcatacaaggaggtggtccaggggaagctttgttccagttccttctttctggggattggtgaactcagcttggaatctttgctctgtggggaaacggcagtcgccagtcaacatagagaccagtcacatgatcttcgacccctttctgacacctcttcgcatcaacacggggggcaggaaggtcagtgggaccatgtacaacactggaagacacgtatcccttcgcctggacaaggagcacttggtcaacatatctggagggcccatgacatacagccaccggctggaggagatccgactacactttgggagtgaggacagccaagggtcggagcacctcctcaatggacaggccttctctggggaggtgcagctcatccactataaccatgagctatatacgaatgtcacagaagctgcaaagagtccaaatggattggtggtagtttctatatttataaaagtttctgattcatcaaacccatttcttaatcgaatgcttcaacagagatacttttcacaaggaattaacattttaaaaatgatggcatattttactacagggggctttaatataggggggaacttttattccaggggacctctagtttcatcacttacgatggggtcgatggactattccccacccctggctattgaggacagcaagttggatcataatgaacaaacctgtctaatataacccaggatgcaagatgcattccttgcgcctgctcaagccaggaaccagccatctcaagatcctttctgagcatgagtgacaatttcaggcctgtccagccactcaacaaccgctgcatccgcaccaatatcaacttcagtttacaggggaaggactgtccaaacaaccgagcccagaagcttcagtatagagtaaatgaatggctcctcaagtagggaacaaagccaagaagaatcccacctcagtgaaatgcttacaactgtgaattggacgtaacctagaatggcccccttcttgcttctctctccttctttcccccaagcctcattcattcttggggattgggcccttttctttcatggaaaagtgttctggcaaaaccatgggcaggagggaattacattttttcacacatacttcaccaaacacacacacaaggcatttggcacatacataccaaacacatggcaaaacatccccctacacacacacactcctccttacaacctcccatccatggggaagtccaagtttccagaaaacaaaagtcctcattccataagaggtccttagaagaaaataacccagttaaccctgatttccaattttgatacccgttttccctgaacctaataaatctaccccaatgagacttttcagccctttgtacatacaaaattccttcccaaaagagagaggagaaaatacagctctgatggcatcaaacggactttgcatcaagtaatttcagatagtgtccctaggatcctttgagggtgctggtagcaggtgagcaggacaaagttgaccaaggacacttatttctagattatgattcttctgttttactcaacaatttacaaagaaaaaaaggacagacattgaagagctacacattgtatatatatcaccacagactataaggaaatggaattatttccctctttgtcacatatctgtagtaggattttccaagatcagaaatgatccatttgctgtttcttgttttccaaaggtcatacattgtgtttggttattgttaccagctcaataaatgtgtttaacgagttaatttcatttttctggctttggtctgttctccttccttacaggctaagccctggctccatgcaactgccattctttgatttccacttgttcccttccacctacatgttttgttccatttgcagcccagtttttactgaagtttgtggcaatcaggaatgcatttgctaagcaagtatgactttaattcccactccatggctcaatcattcacatgaggtgagcttcagcctgagatagccangcgacagacttcttgccgtttcaaaactgccatgcccccctgtgatgctcccgtgaaggaatgcactttgccttgtaagttcctgggaaaggggtatgttttctctccaggtgcagccagatctcacaaagtacaaaacgaatgcctttcttttcttgtttataatggtcactcactgtgtttggttactgtcaagaaatcaataaatgtgtttaacaagttaaaaaaaaaaaaaaa

SEQ ID NO: 21995 - DNA, 417 bp, Homo sapiens
  SIMILAR (128)..(259): 401254mologous to Hordeum vulgare BLT14 protein,accession number X57554,Smith-Waterman Score=57.
tttcgtttctaactgaagaggagagaaccctatccaggggggccttgagagacatgctggatcaagtctatcagcccttagcagtccgggaactgcttatcctccagggaggaccaccccagatcatactggggcaggaaagaaatacaaaagaaatccggccgggcgcggtggcgcactttgggaggctgagtcctgcacagatgtgaagacacagatgaggtgtcgggccccagcttggcttcggcgtctatgtggacagctgctctctgaaaggttaatgagacctaatggtgttcaggcagtagtccggggcattttggaaggagcaggtgcgggagcagctggtggaagtgatgctgaggtgacggctgctgactggaagaagtgtgacctgatcgcaaagattttggcctt

SEQ ID NO: 21996 - DNA, 897 bp, Homo sapiens
  SIMILAR (885)..(670): 981254mologous to Homo sapiens Human secreted protein, SEQ ID NO: 7170,accession number G03089,Smith-Waterman Score=380.
ctacggcaggaccatgatcttcttctccagcttctgtggagggaacaggaagtttttcatgatgtcatccagctcttctagggccaactgggcatggagcttggccacgtcatcgggctccagacacactacgtgcttcagcaggtggtagagatccttgaggacggcgctcagcacctgcatgagagagacagccatgaccgcctgtctactgtgccggcatttctcagtacgactgaactgccctctcctcctgcctgaggagatctgtgaggacatccacagacttccgtagcctgctagataaatccaattattcagttttcctttgttttctccaactggctggaagaaggtattttgcaatgtggactcgccctgaattctttcttgcgcgagatccaagatccctttcttggggtctggaatggagacccctttccttgtaacagttgtatttagaaattcaatatttgccagcaagttgcaaagctgggatttcagcttggacatccagctccagagtccatacttgaagccaaagccactggactgtttcttcatacctcccacataggccagtttttccacctttggaacagaagttttctgccgatcaaaatttctttcaaactggattttgtctggggtaatttgaaatagtttcacagatccatcttcacaaccaaccaaaagttgagagccactggggctggcagccatgctccaaataggtcctccaaaggcatccatagcatacttgatgtttaacgcctgtaaatcatactccataatctcgccattgagcccagcactaaagagtcgctgtccttctgcccagcacaaagcttctgtagcccgagactcatgacctgggaaaaactgcagaaacaccat

SEQ ID NO: 21997 - DNA, 1131 bp, Homo sapiens
  SIMILAR (532)..(1002): 711254mologous to Homo sapiens put. LLRep3 protein (AA 1- 221),accession number X17206,Smith-Waterman Score=596.
atggtaacagcttgcctgattgctgtggccaaaacagatggtgaagttcaagtacgcagagctgccatacatgtggttgtgctgctgcttcggggactcagccagaaagctactgagaaggcgctgctgtggataggagagaggatcagcaagtcctacgaaggggggactcagggggttgccctgctgtcagacgtctatcctgagaaaatcttgccggacttgttggctcaatatgacagcagcaaagacaagcacacaccagagaccagaatgaaagtcggggaagtccttatgcgaatcgtcagggcattaggggtccatgtcagatctgtcgtagattatgactctgtacatgtacctattgatgacagcaataccacattacagaagcaagcttttgtgatgatggacactcatatagccattccttttggatgttatggaaggctggatcaatgttcgggtattggcaaagatgtcctggaggaagaaatccttggaactgaatccagagaacaagtagaaattaagcagacccacactggccaccgcaccagattcaaggcatttgttactgttagggactatgatggccacatcagtttaagtgttaagtgctccaaggaggttactactgccatccaagggaccatcaccctggccaagctttccattgtccctatgcggagaggttactgggggaacaagatcggcaagtcctacaccaccccctgtatggttacaggctgctgtagctctgggctagtacaccttatccctgcccccaggaacaatggcatcatctcgactcctgtgcccaagatgctgctgctgatggccggtattgacaactgctacacctcagccaggggctgcactgccaccctggacaacttcaccaaggccaccttcaatgccatctccaggacctatagctgcctgacccccagcctctggaaagagactattcaccaagcctccctgtggaatgcactgaccatcacatcaagacccacaccagagcctccatgcagaggacccaggctccagctgtggttacagcataagctttcatacaagaataatagtgaattacacctgttaaaaataataagcagaagaaaatga

SEQ ID NO: 21998 - DNA, 751 bp, Homo sapiens
  SIMILAR (751)..(26): 931254mologous to Homo sapiens unnamed protein product,accession number AK022750,Smith-Waterman Score=1093.
  misc_feature (1)...(751): n = a,t,c or g
ctggggggctgtctcatggctctgcctgttgntcaaggtggctatgagctacatcaagtgggtctttccatgaactggtttgttgcctgctcttctattttcccttcccagatcttttctgttccagtgtactttgggcagccatgctgacggcctcagtggcaaaggctccatgggtagagatggtgatgcggagatcaacagcgagttcttggatgaccggatcagggtatgtgttggataccttctccaacagaggcaacaactgcttcagaacagcaaaatcacttgacttcaactgaacagctcctcctagcatgacagccaccagccccatggacatgctcagcgtctgtgattccacggtgctctctgcctgatgggcaaggcttgcacaggctctctgcaatgttgctgctacaaagtccaccacctgagtgacgtttgtgaatatctgctcagacattctctcgcacagaacagccatcagctgcaggacaagcagcttccgctcttggccttccacaagaagagtctgatgttgctctaattccaagaggctcttgctggagaagggctcagtttttaactctgtttcattttccgaggccacatgagtcaactctttcaaacagaagatgaagaagtctcctgccaaaccgcattcctggcagtgggacagcaagtccccgagatgctccacccggccctgctcagaggataccttctggtacagggcttcatcttcatc

SEQ ID NO: 21999 - DNA, 2943 bp, Homo sapiens
  SIMILAR (834)..(1001): 371254mologous to Homo sapiens GTP binding protein,accession number X69943,Smith-Waterman Score=77.
aaaagaaataaagtggagcccccagtgctatatctgaaattgtttcaacagccctggcattaggccaccagcatgcattctttccagcctgcattcagtgtgaacccattgtctaggcattcatctttctgaaggagcagaggacagaaggcaggatgtaaactctctggatgctcgtggttcttttctcctgataatcagggcaactctttgcaaacagcagcaggagtgaagaagaatggcctgggaggataaatacagggcttacccttcttctctggaagagtcaaccagcttgattgtcctttctgggcatcagagccttttcaactccacagttttccatctcgacaccagaggaccagatttagccctgttctttccatccaaggataactttattccattttgcattatttgataactatttccttcccctccccaccatccaactgcatctcctactctaaaatgcctcttgagcagccaagggtggccagttctgctcctcaattttccagaagaagaatctcagcctgaaagaatatagagctaggtgacatatgggtggccaaccgcttctcctcaagttccaaagagagtgggcaattagtgaaatttccatcaagtcatgttaaaatatactttcaccagggtaggacatccttctttcaatgctagagggacagtgaaaaatgtaggattaatgagatctgtaactgtcttctcttaactgtacacccctcagggctgaacgcggggagtgctggaacacatggccctcgggaagggtaccctgaaggacccaagtggacccgcaccataaaaccaccccgagggtcagccatgctgccagcactcaagaggcagcagggccacctgctggaagacctgggcacggctctgggtgcctggccctgcctgcctcctccacgtccttggagccaggtctacggcaggaccatgatcttcttctccagcttctgtggagggaacaggaagtttttcatgatgtcatccagctcttatagggccaattggggcatggagcttggccacgtcatcgggctccagacacactacgtgcttcagcaggtggtagagatccttgaggacggcgctcagcacctcagtagctttctggctgagtccccgaagcagcagcacaaccacatgtatggcagctctgcgtacttgaacttcaccatctgttttggccacagcaatcaggcaagctgttacctcatggaccacggagcccagcagaaagtccagcctctggcacagctccccaaggttggccaagctgctggccctgtgagcaccatcaggatctctcactcccctcaggaaggtatggatcaaaggttctcggtactttgagaccatgtctctttgggcagccatgctgacggcctcagtggcaaaggctccatgggtagagatggtgatgcggagatcaacagcgagttcttggatgaccggatcagggtatgtgttggataccttctccaacagaggcaacaactgcttcagaacagcaaaatcacttgacttcaacttaaattttaagacaaatttgttacatgggaccttctgtggggaattgctgtgagctgctaacatctctctccattgtgccagcgggagcagctggtggaagtgatgctgaggtgacggctgctgactggaagaagtgtgacctgatcgcaaagattttggcctcttgtccccagcagtctctttcaccagagaattaccttcaatgtccagtgtatcctcatttatcttgggtgcggtataagagcttgggaactgctgaatgtggtacaagctctgaggactgggatcaggaagtggagtggtccagccatagtactctctagtgtgcacacctcttttataagtcgtgtaagatggtagtatgatatagttcgtatgtgtttccgctccacctgctccttccaaaatgccccggactactgcctgaacaccattaggtctcattaacctttcagagagcagctgtccacatagacgccgaagccaagctggggcccgacacctcatctgtgtcttcacatctgtgcaggactggggtggtcctccctggaggataagcagttcccggactgctaagggctgatagacttgatccagcatgtctctcaaggcccccctggatagggttctctcctcttcagttagaaccagctgaatgagtcttggacaaattgctgaaaatgtttgagctacagtttcttcatctaatgccctgacgattcgcataaggacttccccgactttcattctggtctctggtgtgtgcttgtctttgctgctgtcatattgagccaacaagtccggcaagattttctcaggatagacgtctgacagcagggcaacccctgaagccttggcttttaagtgcatattacaaacaccaaaaacatcaattagtccaaacttgtccatcatcttggggagcaagaggacgatcagctgcctttcccaactaatggcctctttgatggtaatcataatgccaccttgagtggcaactctaaactgacacagagaatggagagagggcacagctttgtccaaccctgcaaatcctttcaggctggcaattgccttcttcctttccagcttccccagaatccataataagatttcttggcaaagtgaccttatgtgagacacactctgcttagtaaaacagtagagaagaaaaagcactcccaggactggaagcagggaatccatcaaaactgttaaaggttcattcccaaccacgtacacctgaacagctcctcctagcatgacagccaccagccccatggacatgctcagcgtctgtgattccacggtgctctctgcctgatgggccaggcttgcacaggctctctgcaatgttgctgctacaaagtccaccaccat

SEQ ID NO: 22000 - DNA, 277 bp, Homo sapiens
  SIMILAR (1)..(276): 791254mologous to Homo sapiens GK004,accession number AF284752,Smith-Waterman Score=365.
atgtcggctgccttagtccgggcaaatgtctgggctgtgagcaagaggaaacttcagcccacctgggccgccctcaccctgacaccttcagcagtaaacaagataaaacaacttcttaaagataagcctgagcatgtaggtgtaaaagttgaatatacaaagacaaaaggagattctggtgaagttattcaagatggagtcagagtattcattgaaaagaaagcaaagctaacacttttaggaacagagatggactatgttgaagaaaaattatcca

SEQ ID NO: 22001 - DNA, 936 bp, Homo sapiens
  SIMILAR (573)..(644): 951254mologous to Homo sapiens Human secreted protein, SEQ ID NO: 5275,accession number G01194,Smith-Waterman Score=133.
atgcaggtgtggaccacagccgctctgctggtgggagggcacacgggtacagctacgttggaaaataattggcgtatcaatgtggaccagtcacataccctaaggcccagcagcaccacccctagatatatatctgagagaaactctggcacatgtgtaccagcatgcgtggacaacaatgttcatggcagcattcacagaacaaaactgtggagacaccccaggtaccacacagaagagaatgcggctcattcacaaggcggaattccacacttcagtcagcacaactgcaccaaagggacagacgatgtcatccggtctccggcagccaggtccccaggcctggagacgcccacttgcctcctgtttgtcatcgctgctattgccgctgtttttgtagacagtgctatccccagattgactcagcacagaccacaggacgggagtttcccgtacaccatccttgaccctcccctgtacctgccaggccagtgtgcccctcctcagcctctgcttggcgtgaagattccatcttctcctgtgtcccgatgtctgcacagcccctatctccaatgcgcccgccgtgtccatggagagaggctgaggcggccgacctccggcccgaggcaccggggcatcgggacggcgaagatgtcggcttccttagtccgggcaactgtccaggctgtgagcaagaggaagctgcagcccacccgggcagccctcaccctgacaccttcagcagtaaacaagataaaacaacttcttaaagataagcctgagcatgtaggtgtaaaagttggtgtccgaaccaggggctgtaatggcctttcttatactctagaatatacaaagacaaaaggagattctgaagaagaagttattcaagatggagtcagagtgctcatcgaaaagaaagcacagctaacactttga

SEQ ID NO: 22002 - DNA, 2466 bp, Homo sapiens
  SIMILAR (731)..(793): 851254mologous to Homo sapiens GK004,accession number AF284752,Smith-Waterman Score=84.
gagtccctgggtctctctgactggtaccctggcaacgcagagcaggacggtcctgtctcctgtgcacaagggcagcctcactctggcttggccatttgtgttgtccacatgtgcctggtcttgggggtgtctggttctggtgtcccctccacgctcttcggacccattgccattggcagcgtcatccggtctccggcagccaggtccccaggcctggagacgcccacttgcctcctgtttgtcatcgctgctattgccgctgtttttgtagacagtgctatccccagattgactcagcacagaccacaggacgggagtttcccgtacacaatccttgaccctcccctgtacctgccaggccagtgtgcccctcctcagcccctatctcaatgcgcccgccgtgtccatggagagaggctgaggcggccgacctccggcccgaggcaccggggcatcgggacggcgaagatgtcggcttccttagttccgggcaactgtccgggctgtgtagcaagaggaagctgcagcccacccgggcagccctcaccctgacaccttcagcagtaaacaagataaaacaacttcttaaagaataaccctgagcatgtaggtgtaaaagttggtgtccgaaccaggggctgtaatggcctttcttatactctagaatatacaaagacaaaaggagattctgatgaagaagttattcaagatggagtcagagtattcatcgaaaagtaaagcacagctaacacttttatgaacagaaatggactatgttgaagacaaattatccaagggggttggggtccattaccccaaacatcaaagggacttgtggctgtggagaaagctttaatatttgaaatctcaggactcttctggccgtaggttccaggaaagctcgtggaagcttttggggctcactgcagaaatcatgtgactgtcacgtgctggaaaataaagtgatacatcttgaaaatgaatccagtgtgttggattccagaagaaatgatatttatattctcctataggggacagaaaatgagaagccatcactcttttttggatcatttaggtctcttgtatcctttgttttagaaccaagtttcattaaagttgccttcctggggcacctgttttatccatttcctggaactgtgtgcactccttaggatccgctattggatggcttggatcatcccttcaggcatttctcccaacccagatcggtggactccttaaaatctggaggacagggacatcgtggactgctggtagtaatatggtggtgcattgttttttccacccaaacttaacatagcctttttatacatttttatgaaaaatttcattgtcagctgcctcactggcatactgtttaatagtaccaggcaaagattttcttcaactataggtacagattaggttctgaggtgatgggtattcaaaaggtgaggaaaggacgtcatccggcttttttttaatccatctctttttgcagccctatatgtctgttcagagatgggctctcaagctgactttgattcttttagttgagaagtctcttaaagccatctagcccacctccatcaattccctatgtgaggaaggcaaaaccccggggaaggccaaagggcttcctgttccaccctggacaccacagggccgggggagagtaggggactcttaccccccttttccccttgtagggtgacacatgctctgccctctggagggcagttcaggcggaagggcaaatgggtcttgacttctttattgtgggtcaacatttttggataggaattttctttataaattttggataggaggatttatattaatttttatttttattttgagtggggaggaattttaaaacctttttatgtcaattaccatccttgtttcctttcacctttgaaacaatgatttgtagcagagatgacattgtagcaacccagaattatgcctttggaaatgtggtccctccactgtacaggagaatgtgtaatccttttggttaaaattcccagtgtgcataccatttcctggttcctcggtccagttggctaaagttcttaggtattttaggcctaacgatatttatcacccaacttttcctttaaaaagtggcccttttggtcaccttagttacctgatttcccctgggtttgaccataagtattctatggagatgatatatatgcttttttttgaaaagcttgattcttcattgaattcaaagtagctggagttcctttatgtttcgtttattcactaaagtaggctgacacaaaacacacccaaaacctagagcggtagttttatggtaaatgctcatgagtttgtatcaataatataattgttgatccacttataattcgtgcaacactgtatgtatgtagagattgagttgtcaattaaaaaaaatgtggcctctttgtgatcataaaaaaaaaaaaaaaa

SEQ ID NO: 22003 - DNA, 419 bp, Homo sapiens
  SIMILAR (51)..(419): 851254mologous to Homo sapiens presenilin-associated protein,accession number AF189289,Smith-Waterman Score=526.
ctacctggcggatgacagattcagcacaggccctggccattcggagctataccaatgtgctggggaggaaggtggtatatctgccgagcttcttcacctacgccaagtacatcgtgcaagtggatggtaagatagggctgttccgaggcctgagtcccctgatgatgtccaacgccctctatactgcgactcggtgtttcatgaagaaggatctccctccagatgagattgagcaggtttccaacaaggatgatatgacgacttccctgaacaaagttgcgaacgatacctcctacgagatgatgatgcattgtgtgtcccgcatgttgccccaccccctgcatgtaatctcaatgcgctgcatggaccagattgtgggacgggaggccaagtacagtggtgtgctgagctccattggg

SEQ ID NO: 22004 - DNA, 441 bp, Homo sapiens
  SIMILAR (3)..(173): 1001254mologous to Homo sapiens presenilin-associated protein,accession number AF189289,Smith-Waterman Score=311.
tccggagctataccaagttcgtgatggggattgcagtgagcatgctgacctaccccttcctgctagttggcgacctcatggctgtgaacaactgcgggctgcaagctgggctccccccttactccccagtgttcaaatcctggattcactgctggaagtacctgagtgtgcaggtgagcaagcactggacggcggaggcctttcctgttctttgctacatccttcagctgaaatggttttgtggatgcttcattgcatgcaaagggccagctcttccgaggctccagcctgcttttccgccgggtgtcatcaggatcatgctttgccctggagtaacctgaatcatctaaaaaacacggtctcaacctggccaccgtgggtgaggcctgaccaccttgggacacctgcaagacgactccaacccaacaacaaccagatgtg

SEQ ID NO: 22005 - DNA, 1232 bp, Homo sapiens
  SIMILAR (585)..(854): 921254mologous to Homo sapiens mitochondrial carrier homolog 1 isoform b,accession number AF192559,Smith-Waterman Score=442.
atggcgggagccggagctggagccggagctcgcggcggagcggcggcgggggtcgaggctcgagctcgcgatccaccgcccgcgcaccgcgcacatcctcgccaccctcggcctgcggctcagccctcggcccgcaggatggatggcgggtcagggggcctggggtctggggacaacgccccgaccactgaggctcttttcgtggcactgggcgcgggcgtgacggcgctcagccatcccctgctctacgtgaagctgctcatccaggtgggtcatgagccgatgccccccacccttgggaccaatgtgctggggaggaaggtcctctatctgccgagcttcttcacctacgccaagtacatcgggcaaagggatggtgagagagggcttggtcccaaggctgagtccccggttgatgtccaacgccctctctactgtgactcggggtagcatgaagaaggttttccctccagatgagattgagcaggtttccaacaaggatgattatgaagactttccctgaagaaagttgttgaaggagacctcctacgagatgatgatgcagtgtgtgtcccgcatgttgggcccaccccctgcatgtcatctcaatgcgctgcatggtccagtttgtgggacgggaggccaagtacagtggtgtgctgagctccattgggaagattttcaaagaggaagggctgctgggattcttcgttggattaatccctcacctcctgggcgatgtggttttcttgtggggctgtaacctgctggcccacttcatcaatgcctacctggtggatgacagcgtgagtgacaccccagggggcatcgggaaacgaccagaatccaggttcccagttcagccaggccctggcactccggagctataccaagttcgtgatggggattgcagtgagcatgctgacctaccccttcctgctagttggcgacctcatggctgtgaacaactgcgggctgcaagctggggttccccccttactccccagtgttcaaatcctggattcactgctggaagtacctgagtgtgcagggccaagctcttccgaggctccagcctgcttttccgccgggtgtcatcaggatcatgctttgccctgggagtaacctgaatcatctaaaaaacacggtcttcaacctggccaccgtgggtgaaggcctgaccaccttgggacaactgcaagacgatttcaacccaacaacaaccagatgtg

SEQ ID NO: 22006 - DNA, 1818 bp, Homo sapiens
  SIMILAR (623)..(1153): 491254mologous to Homo sapiens CGI-64 protein,accession number AF151822,Smith-Waterman Score=326.
atcctcgccaccctcggcctgcggctcagccctcggcccgcaggatggatggcgggtcagggggcctggggtctggggacaacgccccgaccactgaggctcttttcgtggcactgggcgcgggcgtgacggcgctcagccatcccctgctctacgtgaagctgctcatccaggtgggtcatgagccgatgccccccacccttgggaccaatgtgctggggaggaaggtcctctatctgccgagcttcttcacctacgccaagtacatcgtgcaagtggatggtaagatagggctgttccgaggcctgagtccccggctgatgtccaacgccctctctactgtgactcggggtagcatgaagaaggttttccctccagatgagattgagcaggtttccaacaaggatgatatgaagacttccctgaagaaagttgtgaaggagacctcctacgagatgatgatgcagtgtgtgtcccgcatgttggcccaccccctgcatgtcatctcaatgcgctgcatggtccagtttgtgggacgggaggccaagtacagtggtgtgctgagctccattgggaagattttcaaagagggaagggctgctgggattcttcgttggattaaatccctcacctcctggggcgatgtggttttcttgtgggggctgtaaacctgctggcccactttcatcaatgcctacctggtggatgacagtttcagcccaggccctgggccatccggagctataccaagttcgtgatggggattgcagtgagcatgctgacctaccccttcctgctagttggcgacctcatggctgtgaacaactgcggggctgcaagctggggctcccccccttactccccagtgttcaaatcctgggattcactgctggaagtacctgagtgtgcagggccagctcttccgaggctccagcctgcttttccgccgggtgttcatcaggatcatggttttgccctgggagtaaactgaaatcatctaaaaaacacaggtctcaacctggccaccgtgggtgaggcctgaccaccttgggacacctgcaagacgactccaacccaacaacaaccagatgtgctccagcccagccgggctttcagttccatatttgccatgtgtctgttccagatgtggggttgagcgggggtggggctgcacccagtgggattgggtcacccgggcagacctaggggaaggttgagggcgaggtggggagttggcagaatccccataccttgcagattttgttgagtctgtttttgttgcagagggccagagaatggctttatgggggccccaggttggatggggaaaggctaaatggggtcagaccccacccccgtctaccccttccaagtcaagcccagcgcccatcctgccagctccagctgggagcatcattctcctgcctttgtaacatagggtgtggtcccctgggcacgtggccacccatcatgtctaggcctatgcttaggaggcaaaatggccaaggctctcgcctgtggtttttctcaacactacttttctgatatgagggcagccccctgccttctgaatggggaaattcatggcaactacttcaggaatgtgttcttctcatctaatgctcatctggtttaaatgggtgatgccctcgcgtacaaggaatctgggttaacctgtggcagttgttgaatacccagaggttggggcagatcaagtgtctctaagtcctaacccagttttaaaagttcaatggtaagatttgacctcaatctcccgcaaataaatgtaattggtgatttggaaaaaaaaaaaaaaaa

SEQ ID NO: 22007 - DNA, 425 bp, Homo sapiens
  SIMILAR (2)..(367): 981254mologous to Homo sapiens phosphatidylinositol 4- kinase,accession number L36151,Smith-Waterman Score=639.
  misc_feature (1)...(425): n = a,t,c or g
tggagttagtgaacttgaaaaagaaggtctgcggtgccgctcagactctgaggatgagtgcagcacgcaggaggccgacggccagaagatctcctggcaggcagccatcttcaaactgggagacgactgccggcaggacatgctggccctgcagatcatcgacctcttcaagaacatcttccagctggtcggcctggacctctttgtttttccctaccgcgtggtggccactgcccctgggtgcggggtgatcgagtgcatccccgactgcaccttccgggaccagctgggccgccagacagactttggcatgtacgactacttcacacgccagtacggagatgagtccactctggccttccagcagaacaaggacagacacatcggcaacattatgctggacaagaagggccatatcatccacn

SEQ ID NO: 22008 - DNA, 430 bp, Homo sapiens
  SIMILAR (215)..(430): 1001254mologous to Homo sapiens phosphatidylinositol 4-kinase 230,accession number AF012872,Smith-Waterman Score=364.
tccggaattcccggatcgacgatttcgtattcagaaagacaaatctgggatgatgcagtgtgtgattgcagtcgcggacaaagtattcgatgccttcctgaacatgatggcggataaagccaagaccaaggagaacgaggaggagctggagcggcacgctcagttcctgttggtgaacttcaaccacatccacaagaggataaggagggtggcagataatcaggacacccggagcaacctggacataactgtcggctctcggcaacaagccacccaaggctggatcaacacataccccctgtccagcggcatgtccaccatctccaagaaatcaggcatgtctaagaaaaccaaccggggctcccagctgcacaaatactacatgaagcgcaggacgctgctgctgtccctgctggccactgagatcgag

SEQ ID NO: 22009 - DNA, 406 bp, Homo sapiens
  SIMILAR (98)..(256): 1001254mologous to Homo sapiens phosphatidylinositol 4-kinase 230,accession number AF012872,Smith-Waterman Score=291.
ctcagcatcccacagaggggtcttcccgctcacagccacagagggttatcagggttatagagaagagtcacctacccagtgcctgtcagggcatcagttcatgcgggagatggcaggggcctggcacatgacggtggagcagaaatttggcctgttttctgctgagataaaggaagcagaccccctggctgcctcggaagcaagtcaacccaaaccctgtccccccgaagtgaccccccactacatctggatcgacgtacgtgcctgttcccccacgaaggctgtggggtgctccacctggggggccaggactgttcctggggtgggggtagccgagcccaaggccttcggcaagctcggccagtcagcccagaacccctcctcagctgtctctgccggccccagg

SEQ ID NO: 22010 - DNA, 297 bp, Homo sapiens
  SIMILAR (1)..(297): 891254mologous to Homo sapiens phosphatidylinositol 4-kinase 230,accession number AF012872,Smith-Waterman Score=457.
attttagaggtgcttttgcaggttttgcatgtcctcttggggatgtgccaggccttggagattcaagacaaaggaatctcgcgagcatttgggcgttacagcaacatggaagagtctctcctctcaaagctctttcccaaaatccctcctcattccctccgtgtcctggaagagcttgaaggtgttcgaaggcgttcctttaatgacttccgctccatcctccccagcaatctgctgactgtctgtcaggagggtaccctgaagaggaaaaccagcagtgtgtccagcatctctcag

SEQ ID NO: 22011 - DNA, 528 bp, Homo sapiens
  SIMILAR (1)..(111): 1001254mologous to Rattus norvegicus phosphatidylinositol 4- kinase,accession number U39572,Smith-Waterman Score=199.
cccgacatcaagctgacggatgagatggtgatgatcatggggggcaagatggaggccacacccttcaagtggttcatggagatgtgtgtccgaggctacctggctgtgcggtgagcctgggtgagggccagggtggaggcggagggggtgtgtggaacgttctgagatcccctttaggatgaagggaatccggttccagagagtgaggtaggtgctagcagccacctgctgacctacacctgtcctttggtcacctctgtctgcccacctgtgccagtaaattcttgctctggacatctaattccaaccaccttccccacgatcctgcccacgccttcagccatgggctctccctttctgggcatcccatccaccctgtcaccaaagcctgagcacctgccaccccacaggctacgtgccaaagatgggctttgtcccagtttcatatacaggtcacttggccaaggcacagtccaacctgggttcatcccactgccccgagagaaaggcaggtcagcgtgtctgcat

SEQ ID NO: 22012 - DNA, 398 bp, Homo sapiens
  SIMILAR (1)..(132): 951254mologous to Homo sapiens phosphatidylinositol 4- kinase,accession number L36151,Smith-Waterman Score=227.
atgggctatgtgcgggagtatattctgtgggcagcgtctaaatcccagcttctggcacaccagttcatctggaacatgaagactaacatttatctagatgaagagggccaccagaaagacccacacaggggagcaggacccctccttcatgacacctttgctaacttgctgtccgatgccaccctgcactcccaagtgcgagtgagacccttctgctccagtggctgcttctgcagagtctccatggtcaacacaactgtgactgcatctgacatcggcgacctcctggatcagttggtagaggagatcacaggctccttgtccggcccagcgaaggacttttaccagcgggagtttgatttctttaacaagatcaccaacgtgtcggctatcatcaa

SEQ ID NO: 22013 - DNA, 490 bp, Homo sapiens
  SIMILAR (1)..(348): 921254mologous to Homo sapiens phosphatidylinositol 4- kinase,accession number L36151,Smith-Waterman Score=524.
ctgcagcgctccatgtccctgaacatcggcagggccaaggggagcatgaaccggcacgtggcggccatcgggtttcgcttctttctgctgaccctggggctgtccctcctgcatgccgatgtggttccaaatgcaaccatccgcaatgtgcttcgcgagaagatctactccactgcctttgactacttcagctgtcccccaaagtttcctactcaaggagagaagcggctgcgtgaagacataagcatcatgattaaattttggaccgccatgttctcagataagaagtacctgaccgccagccagcttgttcccccagctgacatcggcgacctccgggagcagttagtagaggagaacacaggctccttgtcgggcccagcgaaggactttttaccagcgggagtttgatttctttaacaagatcaccaacgtgtcggctgtcatcaagccctaccctaaaggcgacgagagaaagaaggcttgtctg

SEQ ID NO: 22014 - DNA, 1255 bp, Homo sapiens
  SIMILAR (246)..(368): 971254mologous to Homo sapiens phosphatidylinositol 4- kinase,accession number L36151,Smith-Waterman Score=202.
tagagctgggctggactccttagaagaaagttaagttctgagtgtgggaggaagtgcctgcacccccacatccagacagcccgtcactcctgctgccgaagactgacttgctgattcgggctctgcctccatagtgggggcacagagccagggagagtgcccacaggcccagggatcctgggtgtgggaccagggagaatgcccacaggccccagggcctttttgagcccagggcgctctctgcacaggcctgctacaacttcatccgaagcatggccgcctacagcctcctgctgttcctgctgcagatcaaggacagacacaacggcaacattatgctggacaagaagggccatatcatccacatcggtcagccagccacagcgccacccctcctcttccttcaccccggcaccccaggggtggatagggatccccaccccacagagaggagaatgcccaggaccaccctgccaggagtgtcagggtccagctctgaggtccgaactgtcggccaccaagctgttctgctgtagagggtgcctggccccggccccagggagctggggcgagagccgccattgctctgagtcagaagctggagctgggcggagtggggctggtccaggttcagtgccccagcttggctccttcctccacttcctccattctctttctatgcctgctgccccaccccccaccccatcgctgtctccaagaaaacacaacctgcctgttgggggtggagggggtgctcctgttgcagagtccttttccactcctcaaaacagaccactcgtccttgcccgccctggctcctacccagtcacaggcagctctttggggttttgcagactttggcttcatgtttgaaagctcgccgggcggcaatctcggctgggaacccgacatcaagctgacggatgagatggtgatgatcatggggggcaagatggaggccacacccttcaagtggttcatggagatgtgtgtccgaggctacctggctgtgcggccctacatggatgtggtcgtctccctggtcactatcatgttggacacgggcctgccctgttttcgcggccaatcaagttcttgaagcacaggtttagccccaacatgactgagcgcgaggcttgaaatttcatcatgaaggtcatccagagctgcttcctcagcaacaggagccggacctacaacatgatccagtactatcagaatgacatcccctactgaggaggggaccttcgagggc

SEQ ID NO: 22015 - DNA, 6627 bp, Homo sapiens
  SIMILAR (3585)..(5708): 751254mologous to Homo sapiens phosphatidylinositol 4-kinase 230,accession number AF012872,Smith-Waterman Score=2560.
  misc_feature (1)...(6627): n = a,t,c or g
gtcggcggggcctgcagggccgctgcaggtccaaaagcttctttgcatgtgtccagtggatttccatgggatcttccagttagatgaaagacggagagatgcagtgattgcattgggcatttttctgattgaatccgatcttcagcacaaagattgtgtgggtccttaccttcttcgacttctcaaaggtcttccaaaagtgtattgggtagaagaaagcacagctcggaaaggcagaggtgccctcccggttgcagagagcttcagcttctgcttggtaactctgctgtctgatgtggcctatagggatccttcacttagggatgagattttagaggtgcttttgcaggttttgcatgtcctcttggggatgtgccaggccttggagattcaagacaaagaatacctttgcaagtatgctatcccatgcctgataggaatctcgcgagcatttgggcgttacagcaacatggaagagtctctcctctcaaagctctttcccaaaatccctcctcattccctccgtgtcctggaagagcttgaaggtgttcgaaggcgttcctttaatgacttccgctccatcctccccagcaatctgctgactgtctgtcaggagggtaccctgaagaggaaaaccagcagtgtgtccagcatctctcaggtcagccctgaacgcggcatgccccctcccagttcccctggaggatctgcctttcactactttgaagcctcctgtttgcccgatgggactgccctagagcctgagtactacttttcaaccatcagctccagcttctcagtctctccccttttcaacggtgtcacatataaggagtttaacattccattggaaatgcttcgggaactcttaaacctggtgaagaagatcgttgaggaggctgttctcaaatctttggatgccattgtagccagtgtgatggaggccaaccccagtgctgatctttactacacttccttcagtgaccctctctacctgaccatgttcaagatgctgcgtgacactctgtactacatgaaggacctcccgacctcttttgtgaaggagatccatgattttgtgctggagcagttcaacacgagccagggggagctccagaagattctacatgacgcagaccggatccacaatgagctgagccccctcaaactgcgctgtcaggcgagtgctgcctgtgtggacctcatggtgtgggctgtgaaggacgagcagggtgcagaaaacctttgcatcaagctatctgagaagctgcagtccaagacgtccagcaaagtcattattgctcacttgcccctgctgatctgctgtctgcagggtttgggccgcctgtgcgagaggttcccggtggtggtgcactctgtgacaccgtccttgcgagacttcctggtcatcccgtccccagttctggtgaagctctacaagtaccacagtcagtaccacacagttgctggcaatgatataaaaatcagtgtgaccaatgagcattccgagtcaaccctgaacgtcatgtcgggtaagaagagccagccctccatgtacgagcagctccgagacatcgctattgacaacatctgcaggtgcctgaaggctggattgacggtggacccagtgattgtggaggcgttcttggccagcctgtccaaccggctctacatctctcaggagagcgacaaggacgctcacttgattcccgaccacacaatccgagccttgggacacattgcggtggccttgagggacaccccgaaggtcatggagcccattctgcagatcctacagcagaaattttgccagccaccctcccccctcgatgtgctgattattgaccagctgggctgcctggttatcaccggaaatcaatacatctatcaggaagtgtggaacctcttccagcagatcagtgtgaaggccagctccgttgtatactcagccaccaaagattacaaggaccacggctataggcattgctccctggcagtgattaatgccctggccaacatcgcggccaacatccaagacgagcacctggtggatgagctgctcatgaacctgttggagttgtttgtgcagctggggctggaggggaagcgagccagcgagagggcaagcgagaagggccctgccctaaaggcttctagcagtgcagggaacttgggagtactcattcctgtaatagctgtgctcacccgacgactgccacccatcaaagaagctaagcctcggttacagaagctcttccgagacttctggctgtattccgttctgatgggattcgctgtggagggctcaggactctggccagaagaatggtacgagggggtctgtgaaatagccactaagtcccccttgctcacctttcccagcaaggagccactgcggtccgtcctccagtataactcagccatgaaggaatgtcacggtcacccccgctgagctgagtgagctccgcagcactatcatcaacctgctggacccccctcccgaggtgtccgcactcatcaacaagctggacttcgccatgtccacctacctcctctctgtgtaccggctggagtacatgagggtactgcgttcaacagatcctgatcgcttccaggtaatgttctgctactttgaggataaagctattcagaaagacaaatctgggatgatgcagtgtgtgattgcagtcgcggacaaagtattcgatgccttcctgaacatgatggcggataaagccaagaccaaggagaacgaggaggagctggagcggcacgctcagttcctgttggtgaacttcaaccacatccacaagaagaataaggaggggggcaaacaagtatctatctggtctgggggaataagttccccacttgctctggagcgggactgtgctgaagaccatgctggacatcctgcagaccctgtcactgtcactgagcgctgatattcacaaggatcagccttactatgacatcccccgacgccccctaccggatcacgggtcctgacacgtacgaagcccgtgagagcattgtgaaggacttcgctgcacgctgtgggatgatcctccaggaggccatgaagtgggcacctaccgtcaccaagtcccacctgcaggaatatctgaacaaacatcagaactgggtatcgggactgtcccagcacacggggctggccatggccactgagagcatccttcactttgctggctacaacaagcagaacacaactcttggggcaactcagctgagcgagcgcccggcctgtgtgaagaaagactactccaacttcatggcatccctgaatctgcgcaaccgctacgcgggcgaggtgtatggaatgattcggttctcaggcaccacaggccagatgtctgacctgaacaaaatgatggtccaggatctacattcagctttagaccgcagtcatcctcagcactacacgcaggccatgttcaagctgaccgcaatgctcattagcagtaaagattgtgacccgcagctccttcatcatctgtgctggggtcccctccggatgttcaatgagcatggcatggagacggccctggcctgctgggagtggcttgttggctggcaaggatggagtggaagtgccgttcatgcgggagatggcaggggcctggcacatgacggtggagcagaaatttggcctgttttctgctgagataaaggaagcagaccccctggctgcctcggaagcaagtcaacccaaaccctgtccccccgaagtgaccccccactacatctggatcgacttcctggtgcagcggtttgagatcgccaagtactgcagctctgaccaagtggagatcttctccagcctgctgcagcgctccatgtccctgaacatcggcggggccaaggggagcatgaaccggcacgtggcggctttcggtccccgcttcaagctgctgaccctggggctgtccctcctgcatgccgatgtggctccaaatgcaaccatccgcaatgtgcttcgcgagaagatctactccactgcctttgactacttcagctgtcccccaaagttccctactcaaggagagaagcggctgcgtgaagacataagcatcatgattaaattttggaccgccatgttctcagataagaagtacctgaccgccagccagcttgttcccccagataatcaggacacccggagcaacctggacataactgttggctctcggcaacaagccacccaaggctggatcaacacataccccctgtccagcggcatgtccaccatctccaagaaatcatggcactgtctaagaaaaccaacctggggctcccagctgcacaaatactacatgaagcgcaggacgctgctgctgtccctgctggccactgagatcgagcgtctcatcacatggtacaacccgctgtcagccccggaactggaactagaccaggccggagagaacagcgtggcccaactggagatttaagtacatcagcctgagtgagaagcagtggaaggacaacgtggaaccttcgcctgggagcatctctccctacctaggccgtgcagctgcctgccaggttttaagaacacagaagccattgggaacgaagtgacccgtctcgttcggttggacccgggagccgttagtgatgtgcctgaagcaatcaagttcctggtcacctggcacaccatcgacgccgatgctccagagctcagccatgtgctgtgctgggcgcccacggacccacccacaggcctctcctacttcttccagcatgtacccgccgcaccctctcacggcgcaataccggggtgaaagtcctgcggtccttccctccggacgccatcctcttctacatcccccagattgtgcaggccctcaggtacgacaagatgggctatgtgcgggagtatattctcgtgggcagcgtctaaatcccagcttctggcacaccagttcatctggaacatgaagactaacatttatctagatgaagagggccaccagaaagaccctgacatcggcgacctcctggatcagttggtagaggagatcacaggctccttgtccggcccagcgaaggacttttaccagcgggagtttgatttctttaacaagatcaccaacgtgtcggctatcatcaagccctaccctaaaggcgacgacgagaaagaaggcttgtctgtcggccctgtctgaagtgaaggtgcagccggcgctgtaacctgcccagcaaccctgaggccattgtgctggacaatcgactacaagtctgggaccccgatgcagagtgctgcaaaagcccccatatctgggccaagtttcaaggtgaagcgatgtggagttagtgaacttgaaaaagaaggtctgcggtgccgctcagactccgaggatgagtgcagcacgcaggaggccgacggccagaagatctcctggcaggcagccatcttcaaggtgggagacgactgccggcaggacatgcttggccttcagatcattcgacctctttcaagaacatcttccagcttgtcggcctggacctctttgtttttccctaccgcgtggtggccactgcccctggggtgtgggggtgatcgagtgcatccccgactgcacctcccgggaccagctggggccnccagacagactttcggcatgtacgactactttcacacggccagtaacggggatgagttccactctgggcctttccagcagggcccgctacaacttcatccgaagcatggccgcctacagcctcctgctgttcctgctgcagatcaaggacagacacaacggcaacattatgctggacaagaagggccatatcatccacatcgactttggcttcatgtttgaaagctcgccgggcggcaatctcggctgggaaccccgacatcaagctgacggatgagatggtgatgatcatggggggcaagatggaggccacacccttcaaaggtggttcatggagatgtgtgtccgaggctacctggctgtgcggcccctacatggacgcggttcgtctccctggtcactctcatggttggaccacgggcctggccctgttttcgcgtccagacaatcaaagtctttaagacacaggtttgaccccaaacagtactgagcccgagccttcaaatttcaatcatgaaaggtcaatccagaagctgctttcctcagcaacaggagccggaccctacggacaatgatcaagtactatcagaatgacatccccttacttgaaggaaggggaacctttcggagggcctcttgcccccaatgtgcccttcaaaagctgttccccacaattcaatggagccctgcgacctcccgtgccctgccgccacatgcagtggaggagaggcctgtggcccaaagaacctggtagcgcctcctggggcagcacgtgggggggcccaaccttggtaaccccatggactgcgagcgacaatcaatggatggtgctgtctatgcacgaggtgtgaagtcttttgtttgcactgaacatattccctacctgtcttatttcataggtacatgaagtattgtgtataaaaaaagagataagatttaaccaacatcgaacaaaataaaaacccaaaataagtgctgtgttggaaaaaaaaaaaaaaaa

SEQ ID NO: 22016 - DNA, 567 bp, Homo sapiens
  SIMILAR (97)..(351): 551254mologous to Homo sapiens mitochondrial citrate transport protein,accession number X96924,Smith-Waterman Score=233.
tcatccacaaggcggcgtcaggcgttcctcagcaaccagatgcgggatgcccagggactggtgaacagcaaggcgggcagcggtgcggccagtgagcggggccccacaggccccgtgctgaagcagggctggaaccaggcaacttgtttctttgtcctgacatccctgcgcagctggtaccgagtggacagccccaacaaactcatgaacccgctggtcgctgggttcttcggagccattgtgggagcggccagtgtcttcggaaatgctcctctgcacgagatcgagccccagatgcgagacctgggttagacctcgcacagggacgctgctgccactgtaataaagcgtgcctacacgcttctgaaactggtgtaggaacaacctcagttctgtgaaaggcggacgcagcaggacagaatctccgtggacatctgtctgaatagtacttccaaaggcaggagccatctggtcatccttagtcatggcaaggcgagagccatctggttgactgattgctcgctgatgacaaggttcctttttcaccttcgttttcagggtgtccat

SEQ ID NO: 22017 - DNA, 498 bp, Homo sapiens
  SIMILAR (477)..(325): 761254mologous to Homo sapiens Human secreted protein, SEQ ID NO: 6015,accession number G01934,Smith-Waterman Score=184.
aagcttccagctgaagtgggtctgcaacagtgcccctgtaaaattaacacctttagtttctttatgggagatgtaacctgtgccagaaaatgtgtgtgttggcccttgttttttccccacactcagctgtggtgagtttttccccccatgtcccactggatcaggtttggatgctctttctctgcagattggtccttgtgttctatatgacaggtgggagagctctgtctccagagctgtagcagtagatgggatagtggtctctccttatcagcactgtggggaaaacattctcgggattctaccctttcttctctaacaggccttgtagtgttcctgctagcgagaagatagcttggccgggcggctgatctcaccttgtaattctgacactgtgtctcccgggcttgtcggcttcatgacttgtgcccaaagtttgatttctcgcagaccaggtaaagaccaagaggctctcataggcgccttggcagagttgcc

SEQ ID NO: 22018 - DNA, 1147 bp, Homo sapiens
  SIMILAR (359)..(270): 901254mologous to Homo sapiens Human secreted protein, SEQ ID NO: 6015,accession number G01934,Smith-Waterman Score=138.
tttcgtgcatggccggcaggagcgcaccgcgctgtctcccttcagggatccgcaccgccctacaatcctgctttgtgctgagattgtagtcctgcaggcgtacaactaacaagctgggtgcagataagagactacagctccccgcatcccaagcaaaggtccctcctctacggagcccctccacgcgtccactgcggttccgccgtgccaaggggagcttggctgttcacgggcctcacctgctagcgagaagatagcttggccgggcggctgatctcaccttgtaattctgacactgtgtctcccgggcttggcggcttcatgacttgtgcccaaagtttgatttctcgcagaccaggaggacccattggacccccgggctggctgcagggcccacacctgggttagacctcgcacagggacgctgctgccactgtaataaagcgtgcctacacgcttctgaaactggttgtaggaacaacctcagttctgtgaaaggcggacgcagcaggacagaatctccgtggacatctgtctggaggagcaattttactgcgacattttaaagaaacaaatttaattgatttccaagggtgtccatcgcgcttccttcactgccttgatcatgtcggggtcaccacctgcgggggtttgtcctgcagaccctgactcaacgacggatgaataatgtacactgacacagatcttatgcttgtcagtcctgctgagcatccaggccacttacagactccaagaagagtcctgtcagccacggctctgacttgttggccctcccggcatttatttagcacacatttaatgacagaagtctcaggtaaacaccactagaaggctggaaacactctttttgtagaacatacaaatggacatttctaagcacattgaggcctataatgaaaaattgaatatcccacaatgagaactagagggaagctatctgtgataatgctttgtggtgtatggattcatctcactgactgaaacctgagttttgattcaccaggttaaaaacgctctttttgtagaacctacaaaaagacatttctgagcccattgaggcctacagtgaaaaaccaagaatcccataatacaatctagaaaacaagctatctaggaaaatgttttg

SEQ ID NO: 22019 - DNA, 2362 bp, Homo sapiens
  SIMILAR (135)..(1154): 901254mologous to Homo sapiens MG81 protein,accession number AF196969,Smith-Waterman Score=1555.
  misc_feature (1)...(2362): n = a,t,c or g
acttgtctggctccggagcgcccccgcccggtgtgggagctcaggcggcggcggccgctgaggaggaggagcgagaggtggtgcgggtccgagtcaaggtgaggctggcggtgagtcggcccagccgccgaggcaagttccgctcttttgctgtagatccccagatcacctcgctcgacgtgttgcagcacatcctcatccgagcctttgatttgagtgggtgagtgggaagatgctggggactgctgggccgggaccggctaggacaggaagtttacctctcacttctatctgactgggacctcagcacagcctttgccactgcctccaaaccttacctgcaattgcgtgtagatattcggccctcggaggacagtgagtactcagtgcccccaggagcaatcagccccaaagatgtcattggctccgacgtgttgctggctgagaaacggtcatcactgacgactgccgccctgccctttacacagtccatcctcactcaggtgttttcagggaccctagggacccaacaagtgctgagctggtcgtatggggaagatgtcaagcccttcaagccacccctgagcgatgctgagtttcacacgtacctgaaccacgagggccagctctcccgacccgaggagttgcgcctgcggatctatcatggcggtgtggagccctcgctgcgaaaggtgagcatcctcagtcatctgttggtgtatccagatggactgacaggccgagagcggatggactacatgaaacgcaagagccgcgagtatgagcagctcaagagcgagtgggcccagcgagcgaaccctgaggacctggaattcatccgcagcacggtcctcaaggatgtactgcgcactgaccgggcccacccctactatgcggggcctgaggatggcccacatctacgggcgctgcacgacctgctcaccacctatgccgttacccacccacaggtgtcctactgccagggcatgagtgaccttgcctcacccatcctcgctgtcatggaccatgagggccatgcctttgtttgcttttgtggcatcatgaaacgcctggccgccaacttccaccctgacggccgcgccatggccaccaagtttgcacacttgaagctgttgctgcgacacgcctgaccctgacttttatcaatacctgcaagaggcaggcgctgatgacctcttcttctgttaccgctggctgctgctggaactcaagcgtgagttcgccttcgacgatgccctccgcatgcttgaggtcacttggagttcgctgccccctgatcctcctgaacatgaggtagagctggttggaccccccagccaagtggcagacactggttttggagaccacagaggggtggcccgtgcgacagaggcacatgctgaggcctgctggtggaggaggtagtacctttgaagatgctgttgaccacctggccacagccagtcaggggcctggtggtggggggcgtctcctgagacaggccagcttggatggcctccagcaactcagggataacatgggctccaggagggaccctctggtccagctgccccacccagctgcccttatcagctccaagtggcctctctgagcctttattgaactacccagacccactgctctcctccttttcccaccctgattccccatcttcctcatctccaccatccacccaggaggcctctcccactggtgatatggctgtaggatcccccttgatgcaagaggtaggctccccgaaagaccctggaaagtccctgccacctgtaccaccaatgggcctgcccccaccccaagagtttggccgggggaacccattcatgctgttcctctgcctggccatcctgctggagcaccgcgaccacatcatgcgcaatgggctggattataatgagctggccatgcactttgaccgccttgtgcgaaaacaccacctggggcgcgtcctgcgccgggctagggctctctttgctgattacctgcagtcagaggtgtgggactcagaggagggggctgaggccacagccgcatcttgatcaggctttctcaagccctccatcggccccaccagatctccattctttgccatgagggccaacacatgagaccccacctccctccctgcctgccagccctagacttgttggagcatagagcccttcctccccaggcctaagtatgtggagctctgctttggcactgccccgcagaggccacgcctatttattctgtttctgttgttttgtttttaacaactatactttgcacacctgannnnnnnnnnnnnnnnnnnnnnnnnnnnnngcggccccctaaataaaaagggccccgttaaaccccc

SEQ ID NO: 22020 - DNA, 387 bp, Homo sapiens
  SIMILAR (133)..(336): 851254mologous to Homo sapiens dJ14O9.2 (Melanoma-Associated Antigen MAGE LIKE),accession number Z98046,Smith-Waterman Score= 274.
gtgcggctgcagagaattgagacttacaagttttgaattcctgtatctgagaacggagtcgttgggggtggtggagggggttggaattggggacctacggaaggctcagctcttgccaggccaaattgagacatgtctgacacaagcgagagtggtgcaggtctaactcgcttccaggctgaagcttcagaaaaggacagtagctcgatgatgcagactctgttgacagtgacccagaatgtggaggtcccagagacaccgaaggcctcaaaggcactggaggtctcagaggatgtgaaggcctcatctactactcagctgactgatacccaggttctggcagctgaaaacaagagtctagcagctgacaccaagaaacagaatgct

SEQ ID NO: 22021 - DNA, 279 bp, Homo sapiens
  SIMILAR (196)..(279): 961254mologous to Homo sapiens dJ14O9.2 (Melanoma-Associated Antigen MAGE LIKE),accession number Z98046,Smith-Waterman Score= 139.
gcaaatgatttggtgaagtaccttttggctaaagaccagacgaagattcccatcaagcgctcggtgctagcatctctgttgataagcacagaaccgggttatgccacccttggtgtggttggcaaagagtctatagcttgggcatcagggccacctggcatctcttcagtcaggtgctcacaacactctccccttgcagacatgctgaaggacatcatcaaagaatacactgatgtgtaccccgaaatcattgaacgagcaggctattctttggagaag

SEQ ID NO: 22022 - DNA, 499 bp, Homo sapiens
  SIMILAR (108)..(242): 821254mologous to Homo sapiens dJ14O9.2 (Melanoma-Associated Antigen MAGE LIKE),accession number Z98046,Smith-Waterman Score= 169.
catcattacgccaagcttggcacgaggcgagagggacttagagaaggcagacgcatcccgaactcgctggaggacaaggctcagctcttgccaggccaaattgagacatgtctgacacaagcgagagtggtgcaggtctaactcgcttccaggctgaagcttcagaaaaggacagtagctcgatgatgcagactctgttgacagtgacccagaggctcgggaggcacctgccacccaggcctcatctactactcagctgactgatacccaggttctggcagctgaaaacaagagtctagcagctgacaccaagaaacagaatgctgacccgcaggctgtgacaatgcctgccactgagaccaaaaaggtcagccatgtggctgatacaaaggtcaatacaaaggctcaggagactgaggctgcaccctctcaggccccagcagatgaacctgagcctgagagtgcagctgcccagtctcaggagaatcaggatactcgg

SEQ ID NO: 22023 - DNA, 984 bp, Homo sapiens
  SIMILAR (762)..(950): 961254mologous to Mus musculus mage-d2,accession number AF319976,Smith-Waterman Score=333.
tgaaggttgtgggacatgaaataagggactcactttgactgagtgcttgcgttgtaccaggtgggcagccattcttccatcttcttggaaacccagggaagggaaaatatgattttttctattttactgaagagtagactgaggcttgcaagtctaagtgccttgccaagggtggcatagagctggaagcagagactgggtagaattctgtatctgaggaatctgggagaggctagcctagcgagttggctggtgtgtctgttgcagatggctgctgaacataaacctctctgtcctgttatttctctaggactaaggactcacccaagctgggtctgctcatggtgcttcttagcatcatcttcatgaatggaaatcggtccagtgaggctgtcatctgggaggtgctgcgcaagttggggctgcgccctgggtatgattgggctctctcagcgcttgctgtccgtgttgtcctttggcaagagaggacggtcctaggattgcatcagtctggtggtctggtggagcgggtggggtgctggactgggtagagggcccagggttctgacctgggtggatgatgggtgaatggtcctgaactctctgctccctctctcagtgtctcttgggcttctatggagcttccctcttgtgctggaaacctcttttccatcttggaaatgcctctgcccacatctgggaagtgccatagccttgagtgaatttatttgtttatttatttttctttttcttctctcaggatacatcattcactctttggggacgtgaagaagctcatcactgatgagtttgtgaagcagaagtacctggactatgccagagtccccaatagcaatccccctgaatatgagttcttctggggcctgcgctcttactatgagaccagcaagatgaaagtcctcaagtttggctgcaaggtacaaaaagaaggatcccaaggaatgggcagctcagtaccgagag

SEQ ID NO: 22024 - DNA, 578 bp, Homo sapiens
  SIMILAR (75)..(161): 721254mologous to Mus musculus mage-d2,accession number AF319976,Smith-Waterman Score=103.
gacgtccttttctttgccatcgtctcaagttttctgcaaacttgttttggtctttccatctttttctactctgccaggcaaatgatttggtgaagtaccttttggctaaagaccagacgaagattcccatcaagcgctcgggtaaagtcctaccaatcctccctctgccctgagctctgccctccattgcccttacaccattgtgctggggatatcccctgctcttatgcttatgtctctgtcctcccaaagttctgatttggcagtgctagcatctctgttgataagcacagaaccggggttatgccacccttggtgtgggttggcaaagagtctatagcttgggcatcagggccacctggcatctcttcagtcaggtgctcacaacactctccccttgcagacatgctgaaggacatcatcaaagaatacactgatgtgtaccccgaaatcattgaacgagcaggctattctttggagaaggtatttgggattcaattgaaggaaattgataagaatgaccacttgtacattcttctcagcaccttagagcccactgatgcaggcatactgggaac

SEQ ID NO: 22025 - DNA, 2544 bp, Homo sapiens
  SIMILAR (1325)..(1900): 531254mologous to Homo sapiens Human haemopoietic stem cell regulatory protein SCM113,accession number Y79141,Smith-Waterman Score=348.
  misc_feature (1)...(2544): n = a,t,c or g
tcccgaccgacgatttcgtgtgcactgggaaaaggggcggtgtcctcatagctgccgcgctggcacatcttcctggagaaggggagggtgcggctgcagagaattgagacttataagctttgaatttttgtttttgagaacggagtcgatgggggtggtggagggggttggaattggggacctacggaaggtgaggatcaacctccaggcacaacaggggagaggacgttcagtgggcttcaacttgacccaggccttctccccttcaggctcagctcttgccaggccaaattgaaacatgtctgacacaagcgagagtggtggcaggtctaactcgcttccaggcttgaagcttcagaaaaggacagtagctcgatgatgcagactctgttgacagtgacccagaatgtggaggtcccagagacaccgaaggcctcaaaggcactggtaggtctcagaggatgtgaaggtctcaaaagcctctggggtctcaaaggccacagaggtctcaaagaccccagaggctcgggaggcacctgccacccaggcctcgtcttacttactcagcttgactgattacccaggttctggcagcttgaaaacaagagtctagcagcttgacaccaaggaaacagaatggttgacccgcaggcttgttgacaattgcctgccacttgagaccaaaaaggtcagccatgttgctgattacggaaggttcaattacaaaggcttcaggagactgaggcttgcaccctcttcaggccccagcagatgaacctgagcctgagagtgcagctgcccagttttcagggagattcagggtattcgggcccaaggtcaaagccaagaaagcccgaaaggtgaagcatctggatggggaaaaggatggcagcagtgatcagagtcaagcttctggaaccacaggtgggccgaagggtctcaaaggccctaatggcctcaatggcccgcagggcttcaaggggtcccatagccttttgggcccgcagggcatcaaggactcggttggctgctttgggcccggagagcctttgctctccccttggagatcaccttaaagccccgtagggcaaaggggcttcgccgttagagttgccaagttccagttcatcccaagagcctgaagcaccaccacctcggggttttggcccttttgcaagggagggcaaatgaatttggtgaagtaccttttggctaaagaccagacgaagattcccatcaagcgctcggacatgctgaaggacatcatcaaagaatacactgatgtgtaccccgaaatcatttgaacgagcaggctattccttggaagaaggtatttgggattcaattgaaggaaattgataagaatgaccacttgtacattcttctcagcaccttagagcccactgatgcaggcatactgggaacgactaaggactcacccaagctgggtctgctcatggtgcttcttagcatcatcttcaatgaatggaaatcggtccaagtgaggctgtcatctgggaaggtactgcgcaagttgtggactgcgccctgaggatacatcattcaactcttgggggacgtgaaggaagctcatcactgatgagttttgttaagcagaagtacctgggactatgccagaaggtccccaatagcaatcccccctgaatatgagtttcttctgggggcctgcgctctttactaatgagaaccagcaaagatgaaaagtcctcaaagttttgcctgcaagggtaccaaaaggaaggatccccaaggaattggggcagctcagtccccccccgggaaagnaaggggcgaatggaagcggattttgaaggctgcaagctgaggctcaccttggaagccaaggctaagggcccgagattagaagctccgaatgggccantgggcctcggctccggagaaatgcttgccgggcccttgcaactgggacgaagcttgatatcgggaacccctgggccaaagcccggatccccaggcgggagcagaaacttaaagccaaagccccaaagagaagtggcagtgccaagcactggtgccaagtaccagtacccaataacagtgccagtggccagtgccatgcaccagtggtggcttcaagtgctgctgccagccttgaccgccactcttcacatttggggctcttccgctggcctttggttggaacttggttgccagcaccagtcggcacgctctggtgcctgttggtgtctcctacaagtgagattttagatatttgttaatccctgcccagtcttttctctttaaggccaggggtgcatccctcagaaaccctactcaaacacagcacttctaggcaggccacctatcaatccaattgaaagttgacaactctgcattaaaatctatttgccatttcnnnnnnnnnnnnngggggggcccgtttaaaagaaccaagtttaagtaccggggcgtggaaaggaaaattttttataaggggccctaaattcaattcctggcccgggtttaacacggcggaagtggaaaacccggcgttcccaacta

SEQ ID NO: 22026 - DNA, 516 bp, Homo sapiens
  SIMILAR (1)..(42): 641254mologous to Homo sapiens proteasome subunit p58,accession number D67025,Smith-Waterman Score=55.
gaattccgccagccttccttcaggcgctcaatctggccttattccttctgactcaagctttcggacaggaaacccagccaagttcaaccaggtcctggatcagtttggggagaagtttcaagcagatgggacctacaccctaattatccggctgcggcacaacgtgattaagacaggtgtacgcatgatcagcctctcctattcccgaatctccttggctgacatcgcccagaagctgcagttggatagccccgaagatgcagagttcattgttgccaaggccatccgggatggtgtcattgaggccagcatcaaccacgagaagggctatgtccaatccaaggagatgattgacatctattccacccgagagccccagctagccttccaccaggaggggaaggatagttctgtgtactcctttagggagtgggggactagaactgggatgtcttggcttgtatgttttttgaagcttcgattatgatttttaaacaataaaaagttctccacaaa

SEQ ID NO: 22027 - DNA, 476 bp, Homo sapiens
  SIMILAR (2)..(373): 951254mologous to Homo sapiens proteasome subunit p58,accession number D67025,Smith-Waterman Score=584.
  misc_feature (1)...(476): n = a,t,c or g
gcagttccgccagccctccctcaagcgctcactcatgccctatttccttctgactcaagctgtcaggacaggaaacctagccaagttcaaccaggtcctggatcagtttggggagaagtttcaagcagatgggacctacaccctaattatccggctgcggcacaacgtgattaagacaggtgtacgcatgatcagcctctcctattcccgaatctccttggctgacatcgcccagaagctgcagttggatagccccgaagatgcagagttcattgttgccaaggccatccgggatggtgtcattgaggccagcatcaaccacgagaagggctatgtccaatccaaggatagttctgtgtactcctttagggagtgggggactagaactgggatgtcttggcttgtatgttttttgaagcttcgattatgatttttaaacaataaaaagttctccccnnnnnnnnnnnnnnnnnnnn

SEQ ID NO: 22028 - DNA, 434 bp, Homo sapiens
  SIMILAR (198)..(302): 971254mologous to Homo sapiens proteasome subunit p58,accession number D67025,Smith-Waterman Score=162.
ggcacgaggtttcaagcagatgggacctacaccctaattatccggctgcggcacaacgtgattaagacaggtgtggatcaggatctgaggggctgttggaggagcagaagccaggccagggcaaacctagtgggtatccttgggcaagtgaagggtctgtgtccactctgcccaccccatcgctccttcctctcccaggtgtacgcatgatcagcctctcctattcccgaatctccttggctgacatcgcccagaagctgcagttggatagccccgaagatgcagatttcattgttgccaaggtggggctggttcaggaaccacagtgaccaggttgtcactttcctgccaatctcaggaggcaggagtgggaggagtttggccaaggaggggaataagtaaagcaatggcataatcatttcagggcgtgcccc

SEQ ID NO: 22029 - DNA, 2274 bp, Homo sapiens
  SIMILAR (156)..(1094): 431254mologous to Homo sapiens proteasome (prosome, macropain) 26S subunit, non-ATPase, 3,accession number BC000074,Smith-Waterman Score=422.
  misc_feature (1)...(2274): n = a,t,c or g
gcgtcacgctccgggtttgcagctgctccgtcatcgtgcggcccgacgctatctcgcgctcgtgtgcaggcccggctcggctcctggtccccggtgcgagggttaacgcgaggccccggcctcggtccccggactaggccgtgaccccgggtgccatgaagcaggagggctcggcgcggcgccgcggcgcggacaaggcgaaaccgccgcccggcggaggagaacaagaaccccccaccggcgccggccccccaggatgtggagatgaaagaggaggcagcgacgggtggcgggtcaacgggggaggcagacgggcaagacggcggcggcagcggcttgaagcaacttcccagccaagagctggaantacagtcacctttggaaggacatcaaggagcaccgtgaaacaagctagagaaaggcggtttcaggcaaggagccgagattcgtgctgcgggccctgcggatgctgccttccacatcacgccgcctcaaccactatgttctgtataaggctgtgcaggggctttcttcacttcaaataatgccactccgagactttttgctccccttcctggaaagagcccatgggacacaagaggctgatttactgttccgtccccgcacgggaaaagctgcggggacgacccctcctgcctgaagtggaagcctatctccaactcctcgtggtcatcttcatgatgaacagcaagcgctacaaagaggcacagaagatctctgatgatctgatgcagaagatcagtactcagaaccgccgggccctaggaccttgtaggccgcaaagtgttactattatcacgcccgggtctatgagttcctgggacaagctgggatgtggtgcgcatttctttgcatggttcggctccggacagctacgcttcggcatgacgcagacgggcaggccacccctgttgaacctcctgctgcggaattaccttacactacaagcttgtaccgaccagcctgagaagcntggtgtccaagtctgtgttccccaagagcaggcccaacaancaaatgagtggggccaagttacctcctacttacaccaggggcgaatcaaagccatccaggctggagtactcagaggcccggagaacgatgaccaacgcccttcgcaaggccccttcagcacacagctgtcggcttcaaacagacggtgcacaagcttctcatcgtggtggagctgttgctgggggagatccctgaccggctgcagttccgccagccctccctcaagcgctcactcatgccctatttccttctgactcaagctgtcaggacagggaaccctacccaggttcacccaggtcctggatcagtttggggagaagtttcaagcagatgggacctacaccctaattatccggctgcggcacaacgtgattaagacaggtgtacgcatgatcagcctctcctattcccggatcctccttggctgacatcgcccagaagctggcagttggatagccccgaaagatgcagagttcattggtggccaaggccatccggggatggtgtcattgaggccagcatcaaccaacgagaaggcctatgtccaaatccaaggagatgattgacatctattccaccccgagacccccagctagccctccacccagcgcatctccttctgcctagatatccacaacatggtctggtcaaggcccatgagggtttcntccccaaaatcgtacaaacaaggctcttggagtctgcagaggaacggccgtgagcgaagaaacaagcaggacttggaagtttcccaaggagatggccagaagatgatgatgacagcttccccttgaaactggggggctggggaggggtaagggggaaatgggggacaaggcaactttgtcccccttgggggtaccccctgccccagggcacctgtcccccattttccccacacacagctcatatgctggcattccgtggcagggggtgggggtgctgggagccagccacccctgacctccccccagggctcctccccagccgggtgactttacttgtacagccaggcaggagggtgggcaggcaacctccccggggcagggtcctggccagcagtgtggcagacaggaggggaaggatcagtctgtgtactccttttagggagtgggggactagaacttgggatgtctatggcttgctatgttttttgaagcttcgattatgatttttaaacaataaaaaagttctcccaaaaaaaaaaaaaaaaaaaaaaaaaaaagcggccgcgaattc

SEQ ID NO: 22030 - DNA, 416 bp, Homo sapiens
  SIMILAR (409)..(317): 531254mologous to Plasmodium vivax pva1,accession number X92485,Smith-Waterman Score=80.
  misc_feature (1)...(416): n = a,t,c or g
gttttaggatcaccagcaattctctttaatcctctttcttttccttctaaaagcttttgcaaagtccaatttatttttccagtagatagattatcttttaagaaaacgcactagcaagattgtagcaaagtgtgtttatgcaaacaggtggtgcagagacagaggggcggaccttgtgggcagctggaggaccatcccagctcatgggccacgcacagatgggagcacctcagtgttttcagccaagagaacacaagtctcgggatccatgtggctccctcaggccctggacccaggcaggcaggacacccttgaccatggggggccgtggggagggaaagcgcagtaatagctgagtgttcagaggaggggctgggaaggncctcaggcacctgcgtggcagctccacgggccag

SEQ ID NO: 22031 - DNA, 356 bp, Homo sapiens
  SIMILAR (3)..(113): 891254mologous to Homo sapiens peroxisomal 2,4-dienoyl-CoA reductase,accession number AJ293009,Smith-Waterman Score=168.
  misc_feature (1)...(356): n = a,t,c or g
gcctccctctctctatggacgtccgagcgcccccagctgtcatggccgccgtggaccaggctctgaaggagtttggcagaatcgacattctcattaactgctccagcagctcctgcggtctcccattctgcaggtgcggccgggaacttcctgtgccccgctggcgccttgtccttcaacgccttcaagaccgtgatggacatcgataccagcggcaccttcaatgtgtctcgtgtgctctatgagaagttcttccgggaccacggaggggtgatcgtnaacatcactgccaccctggggaaccgggggcaggcgctccaggtgcatgcaggcttccgcaaaggccgctgtggacg

SEQ ID NO: 22032 - DNA, 346 bp, Homo sapiens
  SIMILAR (167)..(24): 401254mologous to Homo sapiens PRO1900,accession number AF118081,Smith-Waterman Score=76.
ctggcccgtggagctgccacgcaggtgcctgagggccaggtgccacgcaggtgtctgaggaccagggcctgagggagccacatggatcccgagacttgtgttctcttggctgaaaacactgaggtgctcccatctgtgcgtggcccatgagctgggatggtcctccagctgcccacaaggtccgcccctctgtctctgcaccacctgtttgcataaacacactttgctacaatcttgctagtgcgttttcttaaaagataatctatttactgtaaaaataaattggactttgcaaaagcttttagaaggaaaagaaagaggattaaagagaattgctggtgaaaaa

SEQ ID NO: 22033 - DNA, 360 bp, Homo sapiens
  SIMILAR (3)..(209): 881254mologous to Homo sapiens peroxisomal 2,4-dienoyl-CoA reductase,accession number AJ293009,Smith-Waterman Score=292.
gtggccctcaggccagcctgagcaccaaggtcactgccagcccgctgcagaggctggggaacaagaccgagatcgcccacagcgtgctctacctggccagccctctggcttcctacgtgacgggggccgtgctggtggccgatggcggggcatggttgacgttcccaaacggaatcttccggccgctgcttcctgccgcctcactcagccaggtggagagcaccaatctgaaccagcaatgcctgcagcccagcccctcctctgaacactcagctattactgcgctttccctccccacggccccaactccagggcaggagcaactggacagtgggcctggcccgtggagctgccacgcag

SEQ ID NO: 22034 - DNA, 1994 bp, Homo sapiens
  SIMILAR (733)..(1065): 971254mologous to Homo sapiens peroxisomal 2,4-dienoyl-CoA reductase,accession number AJ293009,Smith-Waterman Score=553.
  misc_feature (1)...(1994): n = a,t,c or g
atgttggtgggagaccaaaaaggtgagtcccacaggaagagatatggcctttccactggtggctttgtgctcagggcatctgaggaccagatgggacattgcagctccagtgggacctgcctagcaggggtagctacctttatggttattgtgggcaagcaacccccgaaccagaagagccgagaaaccaaagaacaaggcagacagatcccgtttgtctgtgtcagaacagtagataagctggaaatcctagcggcattcctggaaccagggttcatagaggccaacgtggtggattcgcatccacgtggtcaggaaggggagcagggagcaccccgcttcagaacagtcctccacgccagccccacagggagaaggagtttctccggcaggtactggaaggcggatcccacactggagtattccgaccttcagctgcacgactggtgccaaatccccactccctggtgtccccagacttactctgattggtgtcaagggctacactcacacattttcctggccgccaggaagctggctggggccaccggccggcgctgcctccctctctctatggacgtccgagcgcccccagctgtcatggccgccgtggaccaggctctgaaggagtttggcagaatcgacattctcattaactgtgagtcggtgctgagtgaggttggtggcttctcacaggctccagcagctcctgcggtctcccattctgcaggtgcggccgggaacttcctgtgccccgctggcgccttgtccttcaacgccttcaagaccgtgatggacatcgataccagcggcaccttcaatgtgtctcgtgtgctctatgagaagttcttccgggaccacggaggggtgatcgtgaacatcactgccaccctggggaaccgggggcaggcgctccaggtgcatgcaggctccgccaaggccgctgtggacgcgatgacgcggcacttggctgtggagtggggtccccaaaacatccgcgtcaacagcctcgcccctggccccatcagtggcacagaggggctccggcgactggatgcctctcagggaatgagctgggggagaggggagggtgctgggtcttggggctcacggggcctgagccttctgctgccctccaggtggccctcaggccagcctgagcaccaaggtcactgccagcccgctgcagaggctggggaacaagaccgagatcgcccacagcgtgctctacctggccagccctctggcttcctacgtgacgggggccgtgctggtggccgatggcggggcatggttgacgttcccaaacggtgtcaaagggctgccggatttcgcatccttctctgctaagctctaggaatcttccggccgctgcttcctgccgcctcactcagccaggtggagagcaccaatctgcaaccagcaatgcctgcagcccagcccctcctctgaacactcagctattactgcgctttccctccccacggccccaactccagggcaggagcaactggaccagtgggccttggcccgtggaagctgccacgcaggtgccntgaaggccaggtgccacgtcaggtgtctgaaggacccaggtgcccacgcaggtggttgggggtacaagacaaagatgcctgggaatgtcccctggcccccatggtccaagggtgtccctgacctgccctgggtcccagggcctgagggagccacatggattccgaagactttgtgttctctttggctgaaaaacactgaggtgctcccactctgtgcgtggcccatgagctgggatggtcctcccagctgcccacaaggtccgcccctctgtctctgcacccaccctgtttgcataaacacactttgctacaatcttgctagtgcgttttcttaaaagataatctatcttactgtaaaaataaattggactttcgccaaagcttttagaaggaaaagaaagaggattaaagagaattgctggtgatcctaaaaaaaaa

SEQ ID NO: 22035 - DNA, 1647 bp, Homo sapiens
  SIMILAR (1306)..(1611): 881254mologous to Rattus norvegicus transcription factor NF1,accession number X84210,Smith-Waterman Score=462.
atgctagagagccttctctttcctctgaggtttgaactgatgttctgtgtcttcacaccctggcatgacagttacgtgtggtcagcccgctccccaggcccgtccctgccgccgccaggctcctgcctgtgtctcccctgggctggacctaatggtagccgtcaggcaagggagtctggaaaagatattttcaggttgcccgatgttatcgagatgaaggttcaagaccagacagacagcctgagtttactcaggctcagcagggagctgctggatgagaaagagcctgaagtcttgcaggactcactggatagatgttattcgactccttcaggttatcttgaactgcctgacttaggccagccctacagcagtgctgtttactcattggaggaacagtaccttggcttggctcttgacgtggacattccttcctggtggtatggtgaggatcaggattccccagtgctcaggctgcagactagtaccagtcagtggcctgttaggaaccggactgcacagcaggaggggagtggcggcaccaatagctgcaggaactggcccaaatttttctctctcagatttggaaagttcttcatactacagcatgagtccaggagcaatgaggaggtctttacccagcacatcctctacgaggaagtgaacactggtgacagtctcagtgtcatgcccacagcagacattacagctcagtgccagctcttttcccaccgagcccccaaagctctcaatatccagtttactggagttgccctaaaagccatcctaaacagctggcagttctctgaacatatcacacttcactcacaatgtggcttcttcctgataggctcctcccttctgggggttatgttcgaaatatctgataacctgtgtgacatgagcataccaattagaacagacactgccctgcttgcagggctttctttggctaggtcctggaatgctcctgatctgcaagacattaaccctttagatttcggactgtggaggcaggagctagagccagccgcttattcctcaaaggaaacaggaacaggatgtggcagcagcagcaacttgattgacaataaaaatcaaactcagacacttggaacaacacagacccaagactttgttctacatccagtgactcaccagactgaacagaagtttaaaaggagtcctagaactacattaagttgcccaattgcttcctcccttggctttctttcaaccagaggtgcagtgtccaagagaaaggtggttgcgattgcttttaaacatgcacccatttgttatttcagctccacaaagcgcctcaagtctgtggaggatgaaatggacagtcctggtgaggagccattttatacaggccaagggcgctccccaggaagtggcagtcagtcaagtggatggcatgaagtggagccaggaatgccatctccaaccacactgaagaagtcggagaagtctggtttcagcagcccctccccttcacagacctcctccctgggaacggcgttcacacagcatcaccgacctgtcattacaggacccagagaatcaaagttccataaggccagggattccctgctgaatcctagcaccaagaagagtgcttggcacacagctgatgctcaataa

SEQ ID NO: 22036 - DNA, 1954 bp, Homo sapiens
  SIMILAR (1163)..(621): 501254mologous to Gallus gallus nuclear factor I-A5,accession number X68155,Smith-Waterman Score=334.
  misc_feature (1)...(1954): n = a,t,c or g
tcaatagatccccatttcttgagagcagggatccatcatctctgaatcccacacactaacacagccatgccgtgtcacagatgcctgataggtgcaggcaccccaccctgtctcttcctcttcggggacaggtgctggtgggaagcacactgccacccgcaccttcatgccatcagctttacaggctagggcggaccatatgtaggaagggctgctgtggtctagtcctgccagcgacctggtagttggtgacgtgggggaggctgcacctccttctgttgacgtggttggaggctttgtgtctggcaccggcagaggcacaggcctggccatcggtggtggcggtggcggtggcaacattggggtgggaaggaatgggttgtgcaccttgccttggctgctcccattgggctgtccagcctgctgaccagcatcagggcagacaagttggacaaattctttcagcgtctcctgagggtgatagcggatggctgggtgtgagaagtaaggcccaggctgctggaaaaagggtgaatgtcggggaaaatgaaagaatcgatggtgttgcaatgtggaacttgctctggggtccctggtaaatgaacaggtcggtgaatgctgtgtgaaagccgttccccagggaaggaggtctgtgaaaggggaggggctgctgaaaaccagacttctccgacttcttcagtgtggttggagatggcattccctggctccaacttacagacaatccacttggactgactgtccacttccctggggagcgcgcttggcctgtataaaatggctcctcacccaggactgtccatttcatcctccacagacttgaggcgctttgtggagctcgtagaggatgtgctgggtaaagacctcctcattgctcctggactcatgctgtagtatgaagaactttccaaatctgagagagaaaaatttgggccagttccctgcagctaatgggtgtctgtgacactcttaactaagctcaagtgacactaaaaaacacctgaatgtgacaaaactgtccctggaagccccaaatgtcccattttctggctggtccttaatgtcagcgtcacttggcctggcctgggactttcagattgacttgaaatcctgcctgcatgcacaaagtatgcccaaatataaatcgagttccttaacagaaacccctatgtgatggggttggacacagagccctggattagagcattgtggggactttacaaggcgctcgccatcagtactttccagcgggaatacctttaaacaaaatcaccataacaaggtccaacctccagactttatctgcctggcggaggcagtcaattcttcgcatcttgcctttctggtctgggttggaaagaacacaacatggaggttttttccctgtaactgtaagaacaaaatcctctcgatattcgggtcggatatctttccgcaactttgccagaagtcgagatgcccacttctgcttgacctctggtttttcacttagcaattcatccttcacggctctctcttcttcttttgacatacgcttttcatgttttttgaagtattttcgttttcgggcccgcaggttgaaccatgtgtaggcaaaggctcggacgtggggcagaagtgcttcgatgaaaggatgaaattcatcctgggtgagacagagcggagaatacataactgccgggcgctggggtatgcgtgtgcgtctgggtgtgcggtttggaggtgtgcgtgagtgtgggtgagaaagnnnnnnnnnnnnnnnnnnnnnnnnnnnnnnnnnnnnnnnnnnnnnngggggagaaaaaaaaatcaagcctgcttcttgcgttcacatttccaagtcggctcgctctcccgctcgctccccggcccccccgccccctcccccgatcagcgcattactgggtaacgcagtgaggagcagttacagacgaaa

SEQ ID NO: 22037 - DNA, 329 bp, Homo sapiens
  SIMILAR (3)..(158): 311254mologous to Paramecium bursaria Chlorella virus 1 a288L,accession number U42580,Smith-Waterman Score=52.
cccctccacccaaccacactgtctataaactgggcctggcccccagctctgcaagaaggtgagttaagttggggcggcctcagggctcttggaggagcaaccctgatcctgctccatgctcctgtccaggtctggggtcagtgacatatcagagaccccagggagacccatataccctgatgacaagtcccaggtacaacacagagacccaaaccactgctgaatcaccctgtgacccttgtaggtattaagctcttgccctgtgtattatgtctgttctcactctgccaataaagatatacccgagactgggtaatttatggtaattt

SEQ ID NO: 22038 - DNA, 1308 bp, Homo sapiens
  SIMILAR (738)..(613): 1001254mologous to Homo sapiens Human fetal brain cDNA clone vb9_1 derived protein,accession number Y50914,Smith-Waterman Score= 244.
tcaaggctggggcacccgaggaaggacatggatgatgacacaaaagcaactctcatttcctacatgtccttgagtttcaggcatgggtactgcttctccgaagacccctgtgtgcacacggagcttgggatccagtctggaaggggagggcggggcgacccggaccctccagggaacgcccttgagtaactcgcgcacttgggacccattcccacctaggaccataggctcaagatggcctggtggatgccgccggacgcgcctctcctctggcgggaaccgaaggcgccggtaggttttcacacttgcagccgatcggcctcgtggacctccagagtagggggcagcgggcgagagattccccagcggcgttgcaggagcccacgtggagcccacgggcttccctgccctgagcagctgcagctgcagccgccgccgcccagctgaatgcccaagacaggttccacatttgtggcccatttccccagtcctctggcccagggtcacagtccacctgggggcggtgcggggtggtgcagtggatgcagcccagacaggcccccactgcttggggtgggcagccatggtgagcttctcaacccaaacagtcccgcttacgaggttggcgcagggccccggccaccggcagctctggtacacgcgctggaccaccgtctccgagccattctgcacctggcaggacaccgtccgtgtcactgtgtgatggcaccagtgcctgagagccagccccacaggcagcatcggctccttgcctgcgcactggcgggaagggctggcggggccactgatggattgagttttccatgtggagggggcagctttcaaggtaggaatttttggcagttcacgtaacccccagcaggcagagaggaaacgtggcttcgacaccaccagatcctgcagctttccgctgtgcagacgtgctgctgtccacctgacccgtgtaactgcagcctgcagagagaccacaggcccttgaactcccgtctccgcatctccccacccctcgttcgggtttagcgcagggcccacatcagtggtatttatcaacttggatctctgcggcagcatctggcattgagtgggtgataagtaaatatcctcaatctgggtgggcaccatctcatcagctgccagtgcagctctgacaaaggcaggggcaacaatctgtgcaaaggcccttctctcaaaggcttcgtaactacgggggctggggaagcccaagtgagactccagtgagtgtttggcaggcctggtcgcctccaggggccgcacagccgcagacat

SEQ ID NO: 22039 - DNA, 2087 bp, Homo sapiens
  SIMILAR (367)..(1254): 891254mologous to Homo sapiens Human fetal brain cDNA clone vb9_1 derived protein,accession number Y50914,Smith-Waterman Score= 1439.
atgggaagggcagaaatacgaactcctgagctttctcggcaaccaagtcctcttattgggcttatggacatgtccgcttatggacggaatcctgactttccctcgccccaagtcagcagatatttacttatcacccactcaatgccagatgctgccgcagagatccaagttgacggaaagctgcaggatctggtggtgtcgaagccacgtttcctctctgcctgctgggggttacgtgaactgccaaaaattcctaccttgaaagctgccccctccacatggaaaactcaatccatcagtggccccgccagcccttcccgccagtgcgcaggcaaggagccgatgctgcctgtggggctggctctcaggcactggtgccatcacacagtgacacggacggtgtcctgccaggtgcagaatggctcggagacggtggtccagcgcgtgtaccagagctgccggtggccggggccctgcgccaacctcgtaagcagggccctgactctctctataagcccctttatgttttttctggacttagtggaaatgggaaacagctgctgggggctgcagggagaagcagttcccatgcacaaatgcatgaactgcacccggctcagtgacatgagtgagcgactgaccacactggaggccaaggtcctcctgctagaagcagcagaacggccctccagcccggacaacgacctgccagcccccgagagcactccgccgacctggaatgaggacttcctccccgacgccatccctcttgctcaccctgtgccacgacagagaaggcccacgggcccagccgggcccccggggcagacaggaccaccagggcctgcaggcccccccgggtctaaaggtgaccgaggccagacaggagagaagggtccagcggggccgcctgggctcctggggcctccagggccccgtgggcttcctggagagatggggcgccccggccccccaggaccacccggcccagcaggcaacccaggcccctcaccaaacagcccccagggcgccctctactccctgcagccgcctacagacaaagacaatggagactcaaggctggcctctgccatcgtggacacagtgctggcaggtgtcccaggaccccggggtccccctggtccaccaggtccccctgggcctcgaggtcccccaggacccccaggaacacctggatcccagggcctggctggagagcgaggcacagtggggccgtccggcgagggggtgcagcagctgagagaggccctgaagatcctggcagagcgagtcctcatcctggagcacatgattgggatccacgatcccctggcctccccagagggaggttctggccaggatgctgccctgagagccaacctcaagatgaagaggggtggcacccaacccgatggggtccttgctgccctgcttgggcccgaccctggacagaagagcgtggaccaggccagcagcaggaagtctggggtcagtgacatatcagagaccccagggagacccatataccctgatgacaagtcccagtcggctgtgagcgtcctgtgtgccaggtcacgtcttcgtgcccagctcaggccaggtgcagagcagatgaatgactgcaaaggaatcactggcacaaggcaggacattcacgcagtcagctttgcaagtgaacacaatattcaaaactgggtgtcaaagcaccttcaattgtctcccccagtgaccccagcaacgcaggctcccctaaaggtaagagttcctcaggcaagtaccctggtgctgtaacaaatatccccattgaccctgggggcgacatttctcacagctctaaaggataggaagtccaagatcaaggtgccagcagatccggttccctggtgagggctctctttctggtttgcagatggccgccttcttgctgtgtcaggttgggcagcctgtcaccatcttgtagcccagccattgaaagaacgtaggctctgagactgtcacaacagggaagacagagatggaggagtctccatgcgagtgatgctgtcatttctgttcacagtccattgggcagcactagtcatatggcc

SEQ ID NO: 22040 - DNA, 453 bp, Homo sapiens
  SIMILAR (327)..(217): 631254mologous to Homo sapiens 28.4 kDa protein,accession number AF183428,Smith-Waterman Score=98.
ttgaggtgtgggatgcggattccactaaatggactcaaaggctcaggctccgcaaaaggccagccgggatctctgggcgccgactcccaggacgcagctgtgaccctcttgcacgaacccctacggtggaggtcggcggtgcgatagcgtagttcctaaccagtgcttcaccaagcatatgcagagccgccttttgggttagggagaaaaagcactggagggtgggggaggaagaggggtaaagtctttagtaaccaaaagggacttctgacctgacaagggcacccgcaggagcggcgcactagcgcgagccagcagcctccacatggtcacgggctgtccggcggcgcggagctcccccagcgactccggctgtctcctgcacccaggtaagcagcggcgctccactacctagctgtaatcggctcaggacctcgtcggaattgcgcacgc

SEQ ID NO: 22041 - DNA, 1270 bp, Homo sapiens
  SIMILAR (524)..(1012): 421254mologous to Homo sapiens 28.4 kDa protein,accession number AF183428,Smith-Waterman Score=213.
actcaacctcccccggaactcaacccccgtcgctcgagtttctttcgcttccgtcgggactctgcggagtggacccgagtgaacacaacttccggccccactgagcggtgtcctgagccgattacagctaggtagtggagcgccgctgcttacctgggtgcaggagacagccggagtcgctgggggagctccgcgccgccggacgcccgtgaccatgtggaggctgctggctcgcgctagtgcgccgctcctgcgggggttcgtgcaagagggtcacagctgcgtctgggagtcggcgcccagagatcccggctggccttttgcggagcctgagcctttgagtccatttagtggaatccgcatcccacacctcaagactcctccggcggaagaaaatagatcttttgagatgtatagttttactttatcctgggttgtctgtgcttcttttagatgtttccattcctgaaaaacccaagcttagatttattgaaagggcaccactttgtgccaaaagcattggggtggtggctacctgcattgggggccactttgaaatgatgcgcctgacaatcaacccgctctatggaccccaagaacatgtttgccatatggcgagtacccagcccctttcaagcccatcactcgcaaaagtgttgggcatcgcatggtggggaggcaaaaggtgctatttgacactacctgacaccctgtgaaggctggccgccttgtttgtagagatgggtgggcgttgtgaatttgcaagaagtgccaaggtttccttgacccaggttgccctacgaagttgccccttcgccagcaaaaggctgtgagcctgcgggactcctagagaaggatgcgaacaagatcaagaggaaagagaacgtcaacaacccagaaccccttggaccatttgagcggaatagccgactgcccaacatggctgggcatacgggaaagtacctgagccccatatgacgttgaccccacaaggggaaatacttggggcaaggttctacatgcccaaaacgtgtgtagtgagtgtaggagatatactgtatataggctactgaaagaacggattctgccatttctattcccctcgagcctacccgactgaagtctttgggtagctcttaagaccataactaagtgagcagcatttgagtagatttctgaaaaacaatgttatttgttgatttaaaaagaaaactgtatttttattaaataaaatttaaacatcacttcaggaaaaaaaaaaaaaaaaaaa

SEQ ID NO: 22042 - DNA, 470 bp, Homo sapiens
  SIMILAR (206)..(3): 1001254mologous to Homo sapiens adrenal gland protein AD- 004,accession number AF110777,Smith-Waterman Score=378.
cttgtttcaagtctttcgtacaatacattggtatctgttctcagcacaaaaactatatgaaaccagcgttcagggaagaaatcacaaccatggtaatcaacaataactccaccttctctcatttggttatctaactcatcaactactctgtcttcatctaaaatgggacagtcatactcttcatcatagccatcatacaattgctcggtgagcaggatgttcggaagcaacatggtccccgccgcgacggcttcgggcgcctcgctcacgtgccctttgctctggctttcgatgacacatttccgtcgcaaagttggagggtgggcataactcgggtcggtatttactataaagtgatgttgtgattcgctgcactccagcttgggtggcagagtgagtcccttaaaaaaccttcccagctgctgctgtttgtcaaactgtaaaatcatgacattatgtttaactgccat

SEQ ID NO: 22043 - DNA, 565 bp, Homo sapiens
  SIMILAR (484)..(191): 771254mologous to Homo sapiens adrenal gland protein AD- 004,accession number AF110777,Smith-Waterman Score=401.
tcaagagttatgatctttgatccactgctcaatccatttcaagatctgatctacattattttctagctcttctggtttattactgggcagctgatgcacgatttcttcctggtaggattccgtggcttattcataaagaacttgaaaaatctcacactgaatattgtctggtaggttcctctcaatatacccccttggttcaagtctttcggtccaatacattggtatctgttctcagcacaaaaactatatgaaaccagcgttcagggaagaaatcacaaccatggtaatcaacaataactccaccttctctcatttggttatctaactcatcaactactctgtcttcatctaaaatgggacagtcatactcttcatcatagccatcatacaattgctcttctcgagctaaatcacccacattaactgtatttcagtcctgattttgacgcaagttctttgcctagtgtggtttttccaacccctggtgtaccggtgagcaggatgttcggaagcaacatggtccccgccgcgacggcttcgggcgcctcgccggacgcgtggg

SEQ ID NO: 22044 - DNA, 1281 bp, Homo sapiens
  SIMILAR (189)..(851): 411254mologous to Homo sapiens 28-JAN-1994 TATA-binding protein associated factor, hTAFII40 cDNA,accession number T79592_cd1,Smith-Waterman Score=222.
gagcaaagggcacgtgagcgaggcgcccgaagccgtcgcggcggggaccatgttgcttccgaacatcctgcatcaccggtacaccaggggttggaaaaaccacactaggcaaagaacttgcgtcaaaatcaggactgaaatacattaatgtgggtgatttagctcgagaagtctgatcatcggatatcatggagtcctggcaagacggccttctcccaagagcatgcccgaaagatggcacagatgatgggcacaaatcctgaaggatatcggggattactagaatatgagccaagaagttataaatccagatgttggagttttgccttcccgatatgtgaccacaattctaggatgatgcaaaaatttattcaagccatgctaaggaaagctactgttgactgcagatgatgtgccgattgggcaatccaggtgcccgcgctggatccagtctttttacctctcctcccccaaagagattttcttattaagatatttggcaaggcaaaagaaatcaaaccccttttgcccattgatcaagccatatttcaggtcctaggttgccacctgatagatactgctttaacagctcccaaactataggctgaaatcttttacagaaaaagggcattcaacttctgcggggaaggaattaacagtccccgcggttaagtgttgggttcaggttactaagcaggaccaaggtactccccacattaggggcacacccaaccccacaggaccatgtctgttttcaacttaaagtaggggactccccatgtcccttcaccaggtcaaaggtttaccagtaccagatgccctacttcttcagtcttccagctgttaaaagctttcaatttcctggcaacctcagccagtttcagaatgttctggattaatcccatccattaaatcgggtcccaaaaacattcttattacccactaaatatgatgtcatccacaaaatactgcccaatgaatcatcaaatgcattgaaaagaaaacgtgaagatgatgatgatggccgatgatgatgatgatgactatgataatctgtaatcctagccttgctgaatggaacatgaatacttggttcttgaattcattgtactgatactaaacatgcgtgctggatgttttcaagttgtattttagaaaactttcatatttaatgagtaaacacagttaccatacttttcaattgaaatgaagtgtttttcatcagccttaaaagtgtaagaaaaataaagttgtcattcattcgaaaaaaaaaaaaaaaaa

SEQ ID NO: 22045 - DNA, 511 bp, Homo sapiens
  SIMILAR (257)..(343): 1001254mologous to Homo sapiens neuronal growth factor 43,accession number M25667,Smith-Waterman Score=150.
tgttaagtggtctccttgtcactcacatacctttgctcctgagttcttccataggtgccactgaacagcttccttgaggtaaactcttctgaacttgtaacctacattaactgggatattaaataatctcttttaaccttaatgcccttatgaaatgacataaaaagaagaaatgcattgcactgttgtatgagcagataagacaaaatactaattctctccttttccccccatccctatcttgttttctttctcagaagctgtagatgaaaccaaacctaaggaaagtgcccggcaggacgagggtaaagaagaggaacctgaggctgaccaagaacatgcctgaactctaagaaatggctttccacatccccaccctcccctctcctgagcctgtctctccctaccctcttctcagctccactctgaagtcccttcctgtcctgctcacgtctgtgagtctgtcctttcccacccactagccctctttctctctgtgtaagcaaacatt

SEQ ID NO: 22046 - DNA, 1772 bp, Homo sapiens
  SIMILAR (407)..(1141): 471254mologous to Homo sapiens neuronal growth factor 43,accession number M25667,Smith-Waterman Score=452.
aagtgattatttcactgaaggctagacaacaattccgagaaagagacggagagagagggaagaaaaagacagatagatattggggggaaggagaagactggagaagagagggaagagaggacagcggagagagagcaccagagagagagggagagagagagagagcgctagagagagggagcgagcatgtgcgatgagcaatagctgtggaccttacagttgctgctaactgccctggtgtgtgtgagggagagagagggagggagggagagagagcgcgctagcgcgagagagtgagtgagcatgcgagcagaaaagaggtggagagggggggaataagaatagagagagaaggaaaggagagaaggcaggaagaaggcaagggacgagacaaccatgctcccgctgtatgagaagaaccaaacaggttgaaaaaaatgatgacgaccaaaagattgaacaagatggtatcaaaccagaagataaagctcataaggccgcaaccaaaattcaggctagcttccgtggacacataacaaggaaaaagctcaaaggagagaagaaggatgatgtccaagcttgctgaggctgaagcttaataagaaggatgaagccccttgtttgccgatggggtggagaagaaaggagaagggcaccactactgcccgaagcagcccccagccactggctccaaagcctggatgagcccggcaaagcaggagaaacttctttccgaggagaagatgggggaggggtgattgcttgccacagagcaaggcagcccccccaggctccttgcatccttcagaggagaaggccggctcagctgagacagaaagtgccactaaagcttccactgataactcgccgtcctccaaggctgaagatgccccagccaagggaggagcctaaacaagccgatgtgcctgctcctttggggtttttcccaaccccttgggggcccttttgcttgctgccaccacccctgccgcagaggatgctgctgccaaggcaacagcccagcctccaacggagactggggagagcagccaagctgaagagaacatagaagctgtagatgaaaaccaaacctaaggaaagtgcccggcaggacgagggtaaagaagaggaacctgaggctggaccaagaacatgcctggaactctggagaaatgggctttccacatccccaccctccgggctgcttagcctgtctctccctaccctcttctcagctccactctgaagtcccttcctgtcctgctcacgtctgtgagtctgtcctttcccacccactagccctctttctctctgtgtgggcaaacatttaaaaaaaaaaaaaaaaagcaggaaagatcccaagtcaaacagtgtggcttaaacattttttgtttcttggtgttgttatggcaagtttttggtaatgatgattcaatcattttgggaaattcttgcactgtatccaagttatttgatctggtgcgtgtggccctgtgggagtccactttcctctctctctctctctctgttccaagtgtgtgtgcaatgttccggttcaactgaggagkccaaaatatcgagtgaattcaaaatcatttttgttttcctccttttcaatgtgatggaatgaacaaaaaggaaaaaattcaaaaaacccagtttgttttaaaaataaataaataaagcaaatgtgccaattagcgtaaacttgcggctctaaggctcctttttcaacccgaatattaataaatcatgagagtaatcaaaaaaaa

SEQ ID NO: 22047 - DNA, 1620 bp, Homo sapiens
  SIMILAR (134)..(610): 891254mologous to Homo sapiens fumarylacetoacetate hydrolase,accession number M55150,Smith-Waterman Score=728.
  misc_feature (1)...(1620): n = a,t,c or g
ccacggattccgacttccccatccacaacctgccctacggcgtcttctcgaccagaggcgacccaagaccgaggataggtgtggccattgggaccagatcctggacctcagcatcatcaagcacctcttcagcatgtccttcatcccggtggccgaggattccgacttccccatccacaacctgccctacggcgtcttctcgaccagaggcgacccaagaccgaggataggtgtggccattggcgaccagatcctggacctcagcatcatcaagcacctctttactggtcctgtcctctccaaacaccaggatgtcttcaatcagcctacactcaacagcttcatgggncctgggtcacgctgcctggaaggaggcgagagtgttcttgcagaacttgcttgtctgtgaagccaagccaggctcagagatgacaccgaacttcggaagtgtgcattcatctcccaggcttctgccacgatgcaccttccagccaccataggagactacacagacttctattcctctcggcagcatgctaccaacgtcggaatcatgttcagggacaaggagaatgcgttgatgccaaattggctgcacttaccagtgggcctaccatggccgtgcctcctctgtcgtggtgtctggcaccccaatccgaaggcccatgggacagatgaaacctgatgactctaagcctcccgtatatggtgcctgcaagctcttggacatggagctggaaatggctttttttgtaggccctggaaacagattgggagagccgatccccatttccaaggcccatgagcacatttttggaatggtccttatgaacgactggagtgcacgagacattcagaagtgggagtatgtccctctcgggccattccttggggaagagttttggggaccactgtctcttccgtggggtggttgcccatgggatgctcttcatgccctttggctgtgcccaacccgaaagcagtaccccaggccccctgccgttatctgtgccatgacgagccctacacatttgacatcaacctctctgttaaccctgaaaggacgaaggaatgcagccaggcggctacccatatgcaaagtccaaattttaaagtacatgtactggacgaatgctgcagcaagctcactcacccactctgtccaacggctgcaaacctgcggccggggggacctcctgggctttctgggacccatcaggcgggcccggagcccagaaaaatttcggctccatggttgaaactgtcgtggaagggaacgaagcccattagaccttggggaatggtcagacccaggaagtttctgctggacaggggatgaagtcatcataacagctatggctacccgggacttcaagtggtactgcccagggggatggttaaccgcatcggctttgggcaagtgtgctggaaaagtgctgcctgctctcctgccgatcatgagattttctctgctcttctggaaacaaagggctcaaagcaccccttttcaaccctgtgactgggggtcctcccctcgggctgtaggcttggttccgccatttcagttgacaaattaaagccattgtgctctgaggcctgcactgccgcagaaaaaaaaaa

SEQ ID NO: 22048 - DNA, 778 bp, Homo sapiens
  SIMILAR (493)..(534): 781254mologous to Homo sapiens dJ796I17.2 (CGI-51),accession number AL035398,Smith-Waterman Score=54.
gcgattctcggaattcttccatcttaccaaggagaggtgctttgctgaaagttaaccaggaactggcaggctacactggcggggatgtgagcttcatcaaagaagattttgaacttcagttgaacaagcaactcatatttgattcagttttttcagcgtctttctggggcggaatgttggtacccattggtgataagccgtcaagcattgctgataggttttaccttgggggacccacaagcatccgcggattcagcatgcacagcatcgggccacagagcgaaggagactacctaggtggagaagcgtactgggccggcggcctgcacctctacaccccattacctttccggccaggccagggtggctttggagaacttttccgaacacacttctttctcaacgcaggaaacctctgcaacctcaactatggggagggccccaaagctcactatatcgtaaagctggctgagtgcatccgctggtcgtacggggccgggattgtgcctcaggcttggcaacatcgctcggttgggaacttaattactgcgtccccatgggagtacagacaggcgacaggatatgtgatggcgtccagtttggagctgggataaggttcctgtagccgacacccctacaggagaagctctgggactggggcagcagcaaggcgcccatgccacacaccgtctctcgaggaaacgcggttcagcgattctttgactgcggaccctgtgggaaaccccgtcaataaatgttaaagacacactccgagaaa

SEQ ID NO: 22049 - DNA, 2649 bp, Homo sapiens
  SIMILAR (1513)..(1749): 641254mologous to Homo sapiens dJ796I17.2 (CGI-51),accession number AL035398,Smith-Waterman Score=259.
tcgagtgctgatgtgtctgctccccgcctccaggtaaatactttggctgtgggtgtgtgggccggacgggcacctctctcatctgatgaggcctcacacgacattggcaataaagtacctgctggtgctgaggggctctccacctttcccagtttttcactagagaagagtctgtgagtcacttgaggaggcgagtctagcagattctttcagaggtgctaaagtttcccatctttgtgcagctacacagtccacgcgccagcagcttcgcggatgtcagtgaacgctcttcgcttgcgcagtcagaacgtcctccgcggccgtgtgaacatccgggtcacaggcgcataaggaccaatgagcgaaggcatcgcgagccagggggcgcggagaaggcggggaatcatggggctgcgaggcctctgggccagcagggcagacgggcgccgcggggagacggagcctgaagctaaacaggaaattcttgaaaacaaagatgtgagttttctgttgaaggtcttgatagaattgttagtggaaacattcacttccatacaccactagggagatgatgttttcaaggccaaaaacctaattgaggtaggtgtggtctctacatggtgtgctttcccagtctcttctgaagaactcgtaaatgtccccatgtgaaacattgacacatgtcaaggtacatattgtggtgtagtatctttataattccctttctgtccatcagagaaaagctgtttttatggccagaataacaccatggttggaaacaatgaaggcagtatggtatgctacaggctttttactttcttatattggaacttagagttgggaacttttacactatgactgcattctaaagaaacttcgtatggcctgtccttcttcaaaccacggcccggaaacttcgaaagaaagtaggaagcccaacagatcattgagtacactggcctgatagaaaagttaaaataggtggcttatttgtgaaagtcagctgagtacagtgtgagtagcatttcagtccttccctctgggcttgggggaaaacagggtggctttttcactgattcccaaaggctcatatttgattcagtgagtatctaacggatgctggcacctgcactgtcagcccttactttggggatcttaccacagaatcttagcggaattgcgtgttttaatagaatccacgtggcccttcgaagggtagctctgcaacgggacaagccaggcattctcctgcggcccttgcaccccatcgcggagctctgcacgccacgggcattcagtgtgtggccagttgctagttgctgatgttcctggagtgaaaggaatgctgggagaaaacaaccatttgtttcttaagtactaatcaatgaatggataatttgcacatattttcctttggatcttttcagttgttttttataagagtcctttcccctcacggcgccaagtctagaaggctcgcgtctcactttggaaaccatgtacctgttatgccagggtggctttggagaacttttccgaacacacttctttctcaacgcaggaaacctctgcaacctcaactatggtaaaacttgcgctattcaagaaaccattgtagtacagttgttttcatgtttaaaagcacagtacacaaagatcaggcttggcaacatcgctcggttggaacttaattactgcgtccccatgggagtacagacaggcgacaggtacgtgttgggaattattttccacaatcacatcccactctccagtaattttattttgttttggacgtggttcgcgtctggggacacggcaggggctgccaggctgctgcggctccctactgatgacagggccttcagagatggcggcggctgctcccacaaccgccagctcccattcccctccacgcctctcctgttctccacacaaagcccaagctggaaagggtgtagtcacgcaggctgcatgcatgtgtgcctgggggcccagctacccgggcttggggcccagcttggccatggaagtgagagccaggtggagaggctcctggcgtgtggtgggaggtggggtgcaaggcgccaagggtgctgttggcatgaccttcctaaagcaccccatgctgggtgcttcctggcgggtgagaagaaggtgggagatgaccaggagccctgcaccaagacagcggccgtgagggagggagagagcgtggggtgcacagcagaaggtggatgtttggggctgtctggaggatgccaaggctggcttgcccctggtctggtggaacttcgcagcgctgcagccaggcaggaaggcagcaggaggaggaggaagcggaggcggcaccttctgagagttcatcctcagaaggtggtaagtgggcagactagagcgtgaagccagaggcacttcatcaagtgctttccacaaaagaccaaaaataagatcgctactaggacaaaggacagtcacctggtgaggatctgccatcaggccacattttcccattgggtgactcctgcaaaggccctacactttgacgtcctccccatctccggcagctccttaaactaagaactcattttaatttctgaattctccctttttaaagaccagataaatttacctttgggacagttagatgtg

SEQ ID NO: 22050 - DNA, 1020 bp, Homo sapiens
  SIMILAR (805)..(1014): 851254mologous to Homo sapiens procollagen C-terminal proteinase enhancer protein 2,accession number AF098269,Smith- Waterman Score=286.
atggagagttgtgaggttcctaaacccagagaagatctttctggactacctttggaggtccatgggagaggtgacactgagtggtcacctcgagctttacgtagatcaactgtgcctcgagctttacgtagatcaactgtggtctgcattttagaatgcacgttcccaaaggttcacagtcagctgcaaggccaggtgcacactgcagacacctgtgagacctgtggatgccgaggaggcaccaaaggggagagggaacagtgggctctggctctgggagtctccaagcatttgctgctgctgctcctcgcagccacaggaggtgccagtgctgtggttgatgccagacctgccttcctgcttctgtgggttcggctttgttgtcccttcacgtttttcccatttgcctttccacttggcagacttcagtctgaacaccctcccaatgccgaagggcctgttcgcagctgggatctttcgaacatcttcatgcttaggcagcatttgcacaagaggcataacctgaagtcctgtcttgttcgttttgtagccaagtcttcattcagcttaagaagtactagtggctgctggttgcctctcaccccaactgaccagccacagcttggaggggagaacgctgtcctggttgccagcaggtctaaatttgatagactggcaatgaacagccatagcatgaagacatccgagcctggaactgagtgtctaggaaagtccctggtgaagatgaggccacggggactgcgggatcagacatgggagggtggacccatagaaacgatcgcgggaacacagccagggagggctgagaaccgggaccagcttttattagccggcactgttatcacaaccatcactcgcgatgggagtttgcacgccacagtctcgatcatcaacatctacaaagagggaaatttggcgattcagcaggcgggcaagaacatgagtgccaggctgactgtcgtctgcaagcagtgccctctcctcagaagaggccagtag

SEQ ID NO: 22051 - DNA, 438 bp, Homo sapiens
  SIMILAR (139)..(435): 981254mologous to Homo sapiens procollagen C-terminal proteinase enhancer protein 2,accession number AF098269,Smith- Waterman Score=500.
atgttgctggaacaactggacattgacatgccagaaagtgaatttagacacagagcttatacccttcatgaaaataaactcaaaatgggtcacaggcctaaatgtaaaacacaaagctttgaaactcctggaataaaattattagccggcactgttatcacaaccatcactcgcgatgggagtttgcacgccacagtctcgatcatcaacatctacaaagagggaaatttggcgattcagcaggcgggcaagaacatgagtgccaggctgactgtcgtctgcaagcagtgccctctcctcagaagaggtctaaattacattattatgggccaagtaggtgaagatgggcgaggcaaaatcatgccaaacagctttatcatgatgttcaagaccaagaatcagaagctcctggatgccttaaaaaataagcaatgttaa

SEQ ID NO: 22052 - DNA, 1356 bp, Homo sapiens
  SIMILAR (481)..(834): 1001254mologous to Homo sapiens TRPC1A protein,accession number Z73903,Smith-Waterman Score=617.
atgtctggtgaagaacttgtattcagaatatacaaagaactcatacaactcaacgataaaaaggtaaagattccaaagtatgacagaaagttaggcagagctgtgaaggtcactctgaagggtctgggacctcagagaggcagcaaggagcaaagtccatcgaaagacagtcagtgtagcactggggttgaatctcctattggtgaatacaagcactgctggcgggttcaagcttctgctgaccagcggaaagacttcttcagtgagtgggggctgttcacagggggttttctgaaagagtatctactatgcggggttgactctctgaccatattttacaactgcttaggggattcccggttaaaatgctgggattataggcgtgagccacagcactgggccacgaatagcctctttttgacaaaggctctctggatgtacaagtgtgggattgcccatggatgcatggaatcgggtgttctggcgcatgtggcaatctttgtcacaagatttagctatggagaagaactgcagtcctttgtgggagctgtcattgttggtacatacaatgtcgtggttgtgattgtgcttaccaaactgctggtggcaatgcttcataaaagctttcagttgatagcaaatcatgaagacaaagaatggaagtttgctcgagcaaaattatggcttagctactttgatgacaaatgtacgttacctccacctttcaacatcattccctcaccaaagactatctgctatatgattagtagcctcagtaagtggatttgctctcatacatcaaaaggcaaggtcaaacggcaaaacagtttaaagataatatgtgtcctttttctcttgcattttcctgtgtgggtggaccttgtcatcacagtggtctgtgagagcctgagagtctgggcagattgttccatgcctcgcctgaggtgtaaagaccttgctgcagctttcatcggaggagcagggaaagaggttcccagacctgttttcacatgtggtggcattcttactggagagtctggatttattggcagtgaaggttttcctggagtgtaccctccaaatagcaaatgtacttggaaaatcacatatcatattgttgttttgaaggaatggaggaatttgaaacagaagagagatgaaaactatcaaaaagtgatgtgctgcctagtgcatcgttacttgacttccatgagacagaagatgcaaagtacagatcaggcaactgtggaaaatctaaacgaactgcgccaagatctgtcaaaattccgaaatgaaataagggatttacttggctttcggacttctaaatatgctatgttttatccaagaaattaa

SEQ ID NO: 22053 - DNA, 837 bp, Homo sapiens
  SIMILAR (349)..(705): 771254mologous to Homo sapiens procollagen C-terminal proteinase enhancer protein 2,accession number AF098269,Smith- Waterman Score=453.
attcacgttcccatacttcccttcatctgctctgtattggagctgattctcagctctcttgccctctggctttttgttaggttctgccaaggggacaaatcacggaagattggattggaacaaaaagcagcagaaggcaggccaattgtgtctgagagaaatgaacttcttattcagtttttatcagacttaagtttaactgcagatgggtttattggtcactacatattcaggccaaaaaaactgcctacaactacagaacagcctgtcaccaccacattccctgtaaccacgggagctccacccctgctttgcggcacttctatatgccctcccccggcaacactctcaggccatgccagtggccaaggcttcagtgaccagtaccagtgttcccccagtgaagtaatggcaccctggccattggttcagtctttgcctacctgtgaggttcccgaaggaaaagtagtcgttctcaatttccgattcatagacctcgagagtgacaacctgtgccgctatgactttgtggatgtgtacaatggccatgccaatggccagcgcattggccgcttctgtggcactttccggcctggagcccttgtgtccagtggcaacaagatgatggtgcagatgatttctgatgccaacacagctggcaatggcttcatggccatgttctccgctgctgaaccaaacgaaagagagaaatcagtaatttattattgcacaaaaccctacccagatgctgcagcaaaacatgaaaaatactttctagagctaagtgctgtccgagatagaatcagggacacgttcattgcttttgcccaaatttaa

SEQ ID NO: 22054 - DNA, 4345 bp, Homo sapiens
  SIMILAR (350)..(2674): 991254mologous to Mus musculus Mtrp1 beta,accession number U95167,Smith-Waterman Score=4033.
gaattccgatctctcgtcctcttcctgggctaggccgccccaggcgcggcccctgcgactcctggcacggccccgtgctcggctgccgccctggcgcgcgccacactgtcgtccccggacgggcgcggaccggctcggccggggcgccggcggctggggaggggtcgctggccccggggccgcgcatgcgccgccaccaacttggggctgtcagtggagggcgagtgctggttctcaggggaggcgacgccttcgggccaacgggcctcgagccgaggcagcagtgggaacgactcatcctttttccagccctggggcgtggctggggtcggggtcggggtcggggccggtgggggccccgcccccgtctcctggcctgcccccttcatgggccgcgatgatggcggccctgtacccgagcacggacctctcgggcgcctcctcctcctccctgccttcctctccatcctcttcctcgccgaacgaggtgatggcgctgaaggatgtgcgggaggtgaaggaggagaatacgctgaatgagaagcttttcttgctggcgtgcgacaagggtgactattatatggttaaaaagattttggaggaaaacagttcaggtgacttgaacataaattgcgtagatgtgcttgggagaaatgctgttaccataactattgaaaacgaaaacttggatatactgcagcttcttttggactacggttgtcagaaactaatggaacgaattcagaatcctgagtattcaacaactatggatgttgcacctgtcattttagctgctcatcgtaacaactatgaaattcttacaatgctcttaaaacaggatgtatctctacccaagccccatgcagttggctgtgaatgcacattgtgttctgcaaaaaacaaaaaggatagcctccggcattccaggtttcgtcttgatatatatcgatgtttggccagtccagctctaataatgttaacagaggaggatccaattctgagagcatttgaacttagtgctgatttaaaagaactaagtcttgtggaggtggaattcaggaatgattatgaggaactagcccggcaatgtaaaatgtttgctaaggatttacttgcacaagcccggaattctcgtgaattggaagttattctaaaccatacgtctagtgacgagcctcttgacaaacggggattattagaagaaagaatgaatttaagtcgtctaaaacttgctatcaaatataaccagaaagagtttgtctcccagtctaactgccagcagttcctgaacactgtttggtttggacagatgtcgggttaccgacgcaagcccacctgtaagaagataatgactgttttgacagtaggcatcttttggccagttttgtcactttgttatttgatagctcccaaatctcagtttggcagaatcattcacacaccttttatgaaatttatcattcatggagcatcatatttcacatttctgctgttgcttaatctatactctcttgtttacaatgaggataagaaaaacacaatggggccagcccttgaaagaatagactatcttcttattctgtggattattgggatgatttggtcagacattaaaagactctggtatgaagggttggaagactttttagaagaatctcgtaatcaactcagttttgtcatgaattctctttatttggcaacctttgccctcaaagtggttgctcacaacaagtttcatgattttgctgatcggaaggattgggatgcattccatcctacactggtggcagaagggctttttgcatttgcaaatgttctaagttatcttcgtctcttttttatgtatacaaccagctctatcttgggtccattacagatttcaatgggacagatgttacaagattttggaaaatttcttgggatgtttcttcttgttttgttttctttcacaattggactgacacaactgtatgataaaggatatacttcaaaggagcagaaggactgtgtaggcatcttctgtgaacagcaaagcaatgataccttccattcgttcattggcacctgctttgctttgttctggtatattttctccttagcgcatgtggcaatctttgtcacaagatttagctatggagaagaactgcagtcctttgtgggagctgtcattgttggtacatacaatgtcgtggttgtgattgtgcttaccaaactgctggtggcaatgcttcataaaagctttcagttgatagcaaatcatgaagacaaagaatggaagtttgctcgagcaaaattatggcttagctactttgatgacaaatgtacgttacctccacctttcaacatcattccctcaccaaagactatctgctatatgattagtagcctcagtaagtggatttgctctcatacatcaaaaggcaaggtcaaacggcaaaacagtttaaaggaatggaggaatttgaaacagaagagagatgaaaactatcaaaaagtgatgtgctgcctagtgcatcgttacttgacttccatgagacagaagatgcaaagtacagatcaggcaactgtggaaaatctaaacgaactgcgccaagatctgtcaaaattccgaaatgaaataagggatttacttggctttcggacttctaaatatgctatgttttatccaagaaattaaccattttctaaatcatggagcgaataattttcaataacagatccaaaagactatattgcataacttgcaatgaaattaatgagatatatattgaaataaagaattatgtaaaagccattctttaaaatatttatagcataaatatatgttatgtaaagtgtgtatatagaattagttttttaaaccttctgttagtggctttttgcagaagcaaaacagattaagtagatagattttgttagcatgctgcttggttttcttacttagtgctttaaaatgtttttttttatgtttaagaggggcagttataaatggacacattgcccagaatgttttgtaaaatgaagaccagcaaatgtaggctgatctccttcacaggatacacttgaaatatagaagttatgttttaaatatctctgttttaggagttcacatatagttcagcatttattgtttaggagtataattttattttatctaaaataatagtctattttttcttttgtattttgttataatcttaagcaacaaagaaaaaaccctaatatttgaatctatttatgtctttcaatttaaattcacttcagtttttgttattgtaatatatttacttttacatggttataatcactttatatttttaatgtttttttcacttaatattttatatatacatttccatgtattgatgtagttagtccacatttaaatttttatagaattatatagtttttgaaaaatacagtcagtagatgttttattttttagctattcagttatgtttataagtttgcatagctacttctcgacatttggtttgttttaatttttttgtatcataatagtcctatttttttttcaagttggagtgaatgtttttagttttaagatagataggagacacttttttatcacatgtagtcacaacctgttttgtttttgtaaaacataggaagtctctttaatgcaatgatttgttttatatttggactaaggttcttgagcttatctcccaaggtactttccataatttaacacagcttctataaaagtgacttcatgcttacttgtggatcattcttgctgcttaagatgaaaagcattggttttttaaaattagagaataaaatatgtatttaaatttttggtgtgttcacataaagggatgtagctaaaatgttttcataggctattatatattctcgcagcatttccagttaagaggatattaggtatataattctcttcttaaccgaatgtcagatggtcttacgccacagggtgcaggtaacccttggtctgtaagcaccaccgatccagggatcattgtctaaataggttactattgtttgtttcatcttgcttttgcatttttattttttaatttccaaattttaagtgttccctctttggggcaaattcttataaaaatgtttattgtaaagttatatattttgtctacgatgggattatgcacttcccaattgggattttacatctggatttttagtcattctaaaaaacacctaattattaaaacatttatagagtgcctactgtatgcatgagttgagttgcttctgaggtacattttgaatgacagcatattgtaagaaaaaaaaaggtgaataaaatttgacattagattataaaaaaaaaaaggaattc

SEQ ID NO: 22055 - DNA, 1844 bp, Homo sapiens
  SIMILAR (597)..(1337): 631254mologous to Homo sapiens procollagen C-terminal proteinase enhancer protein 2,accession number AF098269,Smith- Waterman Score=733.
gcgcggtgggtgcggaggggcgtgtgtgccggcgcgcgcgccytggggtgcaaaccccgagcgtctacgytgccatgaggggcgcgaacgcctgggcgccactctgcctgctgctggctgccgccacccagctctcgcggcagcagtccccagagagacctgttttcacatgtggtggcattcttactggagagtctggatttattggcagtgaaggttttcctggagtgtgcgcctccagagagcaaatgtacttggaaaatcacagttcccgaaggaaaagtagtcgttctcaatttccgattcatagacctcgagagtgacaacctgtgccgctatgactttgtggatgtgtacaatggccatgccaatggccagcgcattggccgcttctgtggcactttccggcctggagcccttgtgtccagtggcaacaagatgatggtgcagatgatttctgatgccaacacagctggcaatggcttcatggccatgttctccgctgctgaaccaaacgaaagaggggatcagtattgtggaggactccttgacagaccttccggctcttttaaaacccccaacttggccagaccggggattaccctgcaggagtcacttgtgtgtggcacattgtagccccaaagaatcagcttatagaattaaagtttgagaagtttgatgtggagcgagataactactgccgatatgattatgtggctgtgtttaatggcggggaagtcaacgatgctagaagaattggaaagtattgtggtgatagtccacctgcgccaattgtgtctgagagaaatgaacttcttattcagtttttatcagacttaagtttaactgcagatgggtttattggtcactacatattcaggccaaaaaaacttgcctacaacttacagaacagcctgttcaccaccacattccctgtaaccacgggtttaaaacccaccgtggccttgtgtcaacaaaagtgtagacggacggggactctggagggcaattattgttcaagtgacttttgtattagccggcactgttatcacaaccatcactcgcgatgggagtttgcacgccacagtctcgatcatcaacatctacaaagagggaaatttggcgattcagcaggcgggcaagaacatgagtgccaggctgactgtagtctgcaagcagtgccctctcctcaggaagaggtctaaattacattattatggggccaagtagggtgaaggatggggcgaggcaaaattcatggccaaacagctttatcatgatgttccagacccaggaatcagaagctcctgggatgcccttaaaaaataagccaatgttaaccagtgaactgtggtcccatttaagctgtattctgcccattgccctttgaaaagatcctatgttcctcctcagtagaaaaaaaaatacgttataaaattacatattctgaaagagcattcccgaaaagatggggactggttgactcttcaccatgatgggaggtatgagggcctcccgagatagctgagggaagttcctttgccctgctgtcagaggagcagctatctgattggaaacctgccgacttagtgcggtgataggaagctaaaagtgtccaagcgttgaccagcttggaagccgtttatttatacatctctgtaaaaaggatattttagaattggagttgtgtgaaagatgtcaaaaaaagattttagaagtgccaatatttataagtgttatttggtttcaccttcaagccttttgccctgaaggtggttacaatcttgtcttgcgttttctaaatcaatgcttaataaaatatttttaaaggaaaaaaaaaaaaa

SEQ ID NO: 22056 - DNA, 389 bp, Homo sapiens
  SIMILAR (36)..(209): 281254mologous to Human immunodeficiency virus type 1 gag protein,accession number AF024331,Smith-Waterman Score=47.
  misc_feature (1)...(389): n = a,t,c or g
cgcagcagcaatgaagagagcacacctgtggggggcgccattgtgcnccacacagtgggtgatggcaggcttctgaggcggccctaaagagagtttggtgcaagcttcctttgatgttttttagaagccagatttggcctcaagaactggggtcactgctggcgacactgaagctcgccccatgcgttgctgctggccctgagcatcactcgccgtcccacttgttcctcctcgtcgtcatcgcaggtttnnnnnnnnnnnnnnnnnnnnnnnnngttcacaccctcgcgcgcgcacctgctgttaagaggtacagccccaccccagcaaaatcctcgcttcctcttccccgagacgtagccccagaggagcgaatctggaacgaaatt

SEQ ID NO: 22057 - DNA, 720 bp, Homo sapiens
  SIMILAR (445)..(314): 431254mologous to Mycobacterium tuberculosis seq ID no 4C,accession number AX004945,Smith-Waterman Score=64.
  misc_feature (1)...(720): n = a,t,c or g
tttcgtgggatcccccgggggtgcaaccttgctccacctgtgctgccctcggcgggcctggctggccccgcgcagagcggcggcggcgctcgctgtcactgccggaggtgagagcgcagcagtagcttcagcctgtcttgggcttggtccagattcgctcctctggggctacgtcccggggaagaggaagcgaggattttgctggggtggggctgtacctcttaacagcaggtgcgcgcgcgagggtgtgaacnnnnnnnnnnnnnnnnnnnnnnnnnnnnnctgcgatgacgacgaggaggaacaagtgggacggcgagtgatgctcagggccagcagcaacgcatggggcgagcttcagtgtcgccagcagtgaccccaggtacggtatctacttcgcagcgcgcctggccgagaaataagaaagagggcagccagtaggcaggcctatacccaacaaaagtataatcgagacgccctgagttcagaagttcttgaggccaaatctggctcctaaaaaacatcaaaggaagcttgcaccaaactctcttcagggccgcctcagaagcctgccatcacccactgtgtggtgcacaatggcgccccccacaggtgtgctctcttcattgctgctgctggtgacaattgcaggtagggaactactaccctggagatacccgtgttggacttgagtttcttgactagtgtaagcaactcaga

SEQ ID NO: 22058 - DNA, 1088 bp, Homo sapiens
  SIMILAR (1)..(687): 981254mologous to Homo sapiens dJ30M3.3 (novel protein similar to C. elegans Y63D3A.4),accession number AL031775,Smith- Waterman Score=1199.
gctcgaggggtgtgttcctacttagctttgtacagcccagatgtgatatttctacaggaagttattcccccatattatagctacctaaagaagagatcaagtaattatgagattattacaggtcatgaagaaggatatttcacagctataatgttgaagaaatcaagagtgaaattaacaagccaagagattattccttttccaagtaccaaaatgatgagaaaccttttatgtgtgcatgtgaatgtgtcaggaaatgagctttgccttatgacatcccatttggagagcaccaaagggcatgctgcggaacgaatgaatcagttaaaaatgggtttaaagaaaatgcaagaggctccagagtcagctacagttatatttgcaggagatacaaatctaagggatcgagaggttaccagatgtggtggtttacccaacaacattgtggatgtctgggagtttttgggcaaacctaaacattgccagtatacatgggatacacaaatgaactctaatcttggaataactgctgcttgtaaacttcgttttgatcgaatatttttcagagcagcagcagaagagggacacattattccccgaagtttggaccttcttggattagaaaaactggactgtggtagatttcctagtgatcactggggtcttctgtgcaacttagatataatatttgtaaaatgcttttcaagtgtggggttttgccctgattgttgcaaatacaatttccaccttctgggaaaggtaggtttgctgtggagggaaataatgtactaggatccattgtcacagaaaaaccaactatgatttatggttgtgttttcagaattcaacattaaagattaatgtttatttaaacgaacacattcctgcattcaggatgtgaggccatttaatagaaagggcacaaagcctgtcagagtttttcaacggtgcttacagctgccagctgggattcccaaacaggtaccccattgtctctgagctaatgtttatatttttccattcaggcaccgaaatagttaatatttaaaataagtcttcaaaagaaaacataagagattattgagttc

SEQ ID NO: 22059 - DNA, 1227 bp, Homo sapiens
  SIMILAR (84)..(203): 851254mologous to Homo sapiens dJ30M3.3 (novel protein similar to C. elegans Y63D3A.4),accession number AL031775,Smith- Waterman Score=164.
cacaggcgcctgcgcagagccgcgcgttggcctcctgttccgcttaaaggggcggtgcagaggcggcaggaatatggagttggggagttgcctgttatggctttagggaggcggcggaggaagagggcgagcctgaggtgaaaaagcggcgacttctgtgtgtggagtttgcctcggtcgcaagctgcgatgccgcagtgagctcagtgcttcctggccgagaacgactgggagatggaaagggctctgaactcctacttcgagcctccggcggaggagagcagccttggaacgccgacctgaaaccatctctgagcccaagacctatgttgacctaaccaatgaagaaacaactgattccaccacttctaaaatcagcccatctgaagatactcagcaagaaaatgggcagcatgttctctcttcattacctgggaatatttgatgggattaggatcttaaacaatctgttcagaggagggctcgaggggtgtgttcctacttagctttgtaagtattatcacttctatttaatagtaatgtgtcttatgtatatacggaacgaatgaatcagttaaaaatggttttaaagaaaatgcaagaggctccagagtcagctacagttatatttgcaggagatacaaatctaagggatcgagaggtgagtgacaaagtcagtttgatgtttgaggacagattattgctatggagactaatttaggttcctttttgccagtatacatgggatacacaaatgaactctaatcttggaataactgctgcttgtaaacttcgttttgatcgaatatttttcagagcagcagcagaagagggacacattattccccgaagtttggaccttcttggattagaaaaactggactgtggtagatttcctagtgatcactggggtcttctgtgcaacttagatataatattgtaaaatgcttttcaaggtccagattcgctcctctggggctacgtcccggggaagaggaagcgaggattttgctggggtggggctgtacctcttaacagcaggtgcgcgcgcgagggtgtgaacgtgtgtgtgtgtgtgtgtgtgtgtgtgtgtgtgtgtgtgtgtgtgtgtaagacctgcgatgacgacgagggcgagcttcagtgtcgccagcagtgaccacaggtacggtatctacttcccagagcgcctggccgagaaataggaaagagggcagccagtaggca

SEQ ID NO: 22060 - DNA, 534 bp, Homo sapiens
  SIMILAR (331)..(378): 1001254mologous to Homo sapiens Human secreted protein encoded by Gene No. 2,accession number W73469,Smith-Waterman Score= 91.
tcaggtaatcaggatgatctcacttgaaattcttaacataaatgcatttgcaaaggcctttttctccccaaataatgtcacattcttgggttcccggtggaccagtcttctggggagccagccttcaacccactgcgccagggcttctggatgtgaactaggctctgtccatgagatgcaccgtgtatcaaaagcatctggaatggtatctgacacataagacgtgtacagtacattccaaaaacattcattaaggaactgctgctctgacactgatgctacactggtggaacacagtccctttggcccggaagcagttgcgccagcagcgtcgcgcggcccagttcccttttccggtcggcgtggtcttgcgagtggagtgtccgctgtgcccgggcctgcaccatgagcgtcccggccttcatcgacatcagtgaagaagatcaggtgtgcttcggtcagctcgccggccggcggtcccagcgcggggcccgacgcttcaccgccagctccctggtcggcgtcgggactcat

SEQ ID NO: 22061 - DNA, 1408 bp, Homo sapiens
  SIMILAR (254)..(847): 361254mologous to Homo sapiens Human secreted protein encoded by Gene No. 2,accession number W73434,Smith-Waterman Score=156.
  misc_feature (1)...(1408): n = a,t,c or g
gcgtcgcgcggcccagttcccttttncggtcggcgtggtcttgcgagtggagtgtccgctgtgcccgggccctgcaccaatgagcgtcccggccttcatcgacatcatgtgaagaagatcaggctgctgagcttcgtgcttatctgaaatctaaaggagcctgagatttcagaagagaactcggaaggtggacttcatgttgatttagctcaaattattgaagcctgtgatgtgtgtctgaaggaggatgataaagatcgttgaaagtgtgatgaacagtgtgggtatcccctactcttggatcctgggagccagacaagcaaggaagcttttgatttgaaagccttatgtgaaaaagctgggtccaaatttccgcgaaggtgaaccgccccgtctcttgagacttgcagttttttaagcaaccttttccaccgggatgggataaggaatacttcctgttaagatacacagtgttatttgcagcctttattaaagtgggcagcatcttgtgggggccatccagtaccatccccaactggagcctgggatcaagtttagaaaatgggatttcctgaactggaatcctaaccactggaaaaaaaagcacaccccttttaaagactacctttatgaaggcacttgtggaatcgtaagaagagtgatgctgcttcaaaaggcatgggtggaattgctcggaagttacccaggagggcaatgcttcccagggctcgagttgatgcccacagggtgtattgtaccgagcattgaaagatccaaattgcatttctttttgacccaccttcttacttttaaaaccagtcaagttttttggaaaggcgagcttattccattgttcctttttaaccaaattttgtgagtgcctaaatgggccatcatatgtccaggttttatccggattaattaaggaccttccattgaattccacttggccctgttaccatggacccaggaatatggccaaaaatgaggcttcttttccttttatgggaaatggccagtagaaaaataaggaaatttccttttgaccacaatgccagcaagaaccttccagattgggagctgatggatgttgaaagccatttggttattgacgccggtaaggaactaaaaatgggtctactgccaaaattggtccagacccaggagaaaagtagttgtcagtcatagcacacatcgggacatttggaaaacgagcagtggcaaacaactgtattgacacacttaaatgcctgggaaacaaaatctgaacaaaggtgaaaaacagccttttgagtcttttctgatacctgaagtttttatgcttataaattttgggttcctttggaaaaaaaagcccctaaaatcataggtaaaacattataaactaaaaaaaaaaaaaaaaaagtcg

SEQ ID NO: 22062 - DNA, 413 bp, Homo sapiens
  SIMILAR (124)..(411): 971254mologous to Homo sapiens tetraspan NET-7,accession number AF120266,Smith-Waterman Score=465.
  misc_feature (1)...(413): n = a,t,c or g
ngggatcgtccggnatttttggatagaagcattcgtcggggctggtagcccggcagccgcaggtggggccactatgttctggctgagggaccgagccggagagccccggagcccccgtaaccctactgcgcgcgcttctcctacctctggctcaagttttcacttatcatctattccaccgtgttctggctgattggggccctggtcctgtctgtgggcatctatgcagaggttgagcggcagaaatataaaacccttgaaagtgccttcctggctccagccatcatcctcatcctcctgggcgtcgacatgttcatggtctccttcattggtgagctggcgtccctccgtgacaacctgtaccttctccaagcattcatgtacatccttgggatctgcctcatcatggagcg

SEQ ID NO: 22063 - DNA, 335 bp, Homo sapiens
  SIMILAR (335)..(288): 1001254mologous to Homo sapiens DNA replication and repair associated protein (DRASP),accession number Y82741,Smith-Waterman Score=86.
ttgaggtgaaatttcaatgggtattaagtctggggtagagcttctctctccccaaatctagcttccaaagatgtggagctggtggagctgtccattggtccactgccctgtttctcctgggtgctgcctctgcctcctcatatcaccagcgtcccgggtgagggacttggggtgaaagtactgaagggctttgaagtcgttgtggatggcatgccccaccactatcttccctgtgagtatcttcaagatctggcctcgagcaatcttgaagggtgtggcattcaccatgtgagatgcttcagagacatggtggcattctccgggcagtcagcctt

SEQ ID NO: 22064 - DNA, 572 bp, Homo sapiens
  SIMILAR (358)..(471): 1001254mologous to Homo sapiens DNA replication and repair associated protein (DRASP),accession number Y82741,Smith-Waterman Score=200.
agtcgcgacgagggaagatggggacatatgtcacatatagagcagttaaggaactagggaaagtggaagactcataagacctgtctttgacctggtatgttctatctctacagaacctaatatggcttatacatactgccacagaaaggactgaggtagacagtggcaaagacttcctaggagttgaacccctgaaattacataaggagtaggaccccaccagaattctgtctttgtaggctgctgactgcagaagaaactgtgtagcggaggcagggggaagaggagtacagagagtacactgggaaggaaagaacggtttcttttctcttcatgctcttgtcttccttgcttgctcaggttgggaagagcggacattcctctgtggaagatgcccaggccaccatggagctatataagttggttgaagtcgagtgggaagagcacctagcccggaatccccctacagactagtggcagtggggacgctggtgatatgaggaggcagaggcagcacccaggtgaaacagggcagtggaccaatggacagttccaccaggttccacatcttt

SEQ ID NO: 22065 - DNA, 500 bp, Homo sapiens
  SIMILAR (271)..(399): 691254mologous to Homo sapiens Human secreted protein encoded by gene No. 119,accession number Y27907,Smith-Waterman Score=119.
  misc_feature (1)...(500): n = a,t,c or g
aaaaactgaacaaacagaagtgattttatctaatacagttccaaggtagaaaaagtggagcaggcagggcttgcacccctctccacccccccatgggggtngngttnagacggcacatacacaatcatagtaaattggcagaagaaaaacacaatagattcctggctagatggggagagataaggcaatgtgcatgggggaatcagaggggagatgtgagcccctctgctcctcccacaagagtttcccctttggcccgggcacggtgggctcacgcctgtaatcccagcactttgggaggcggaggcgggtggatcactttgcggtcaggagttcgagaccagcctgggccaacgtgggtgaaatcccgtttctacttgaaaatacaaaaatttagcttgggcatngttgcnttcctgttatttcccagctacttttgggaggcttnaggcaggaaaatcattttgaaccccagggagntggaagtttnccgttacttt

SEQ ID NO: 22066 - DNA, 398 bp, Homo sapiens
tttttttttgagacggagtctcgctctgtcgcccaggccggactgcggactgcagtggcgcaatctcggctcactgcaagctccgcttcccgggttcacgccattctcctgcctcagcctcccgagtagctgggactacaggcgcccgccaccgcgcccggctaattttttgtatttttagtagagacggggtttcaccttgttagccaggatggtctcgatctcctgacctcatgatccacccgcctcggcctcccaaagtgctgggattacaggcgtgagccaccgcgcccggcctgaaacatataatttttgttcctttattattatttcttctttacctgtggagccagaggcaaggaagatgaccaagaattcagacataggagagatctgga

SEQ ID NO: 22067 - DNA, 2227 bp, Homo sapiens
  SIMILAR (707)..(1477): 881254mologous to Mus musculus hexokinase,accession number L16949,Smith-Waterman Score=1213.
ggctcattgctgggaccggcagcaacgcctgctacatggaggagatgaagaacgtggagaaggtggagggggaccaggggcagatgtgcattaacatggagcggggggcctttggggacatttggtgtctgtgatgatatcaggacacactacgacagactggtggacgaatattccctaaatgctgggaaacagagggtatgagaagatgatcagtggtatgtacctgggtgaaatcgtccgcaacatcttaatcgacttcaccaagaagggattcctcttccgagggcagatctctgagacgctgaagacccggggcatctttgagaccaagtttctctctcagatcgagagtgaccgattagcactgctccaggtccgggctatcctccagcagctaggtctgaatagcacctgcgatgacagtatcctcgtcaagacagtgtgcggggtggtgtccaggagggccgcacagctgtgtggcgcaggcatggctgcggttgtggataagatccgcgagaacagaggactggaccgtctgaatgtgactgtgggagtggacgggacactctacaagcttcatccacacttctccagaatcatgcaccagacggtgaaggaactgtcaccaaaatgtaacgtgtccttcctcctgtctgaggatggcagcggcaagggggccgccctcatcacggccgtgggcgtgcggtattcccggcgtttccacaagactctaaggcgcttggtgccagactccgatgtgcgcttcctcctctcggagagtggcagcggcaagggggctgccatggtgacggcggtggcctaccgcttggccgagcagcaccggcagatagaggagaccctggctcatttccacctcaccaaggacatgctgctggaggtgaagaagaggatgcgggccgagatggagctggggctgaggaagcagacgcacaacaatgccgtggttaagatgctgccctccttcgtccggagaactcccgacgggaccgagaatggtgacttcttggccctggatcttggaggaaccaatttccgtgtgctgctggtgaaaatccgtagtgggaaaaagagaacggtggaaatgcacaacaagatctacgccattcctattgaaatcatgcagggcactggggaagagctgtttgatcacattgtctcctgcatctctgacttcttggactacatggggatcaaaggccccaggatgcctctgggcttcacgttctcatttccctgccagcagacgagtctggacgcgggaatcttgatcacgtggacaaagggttttaaggcaacagactgcgtgggccacgatgtagtcaccttactaagggatgcgataaaaaggagagaggaatttgacctggacgtggtggctgtggtcaacgacacagtgggcaccatgatgacctgtgcttatgaggagcccacctgtgaggttggactcattgttgcctacattctcctgaaaggagcggatgatgctggcgccgaagttatcattgagccaatcacagtggaggacagggaggatatggctgtcatcaaggctgtcatcaaggctgtcatcaaggctgtcatcatcattcctggctttgtggatttcctagtatgcaatgccctgagaggaatggccaagatgggagaaggagaggagctctgggaagttgggcctccaggacccaatgcccaactaagcgccaaactcccagggcccaggattgtctcagaaacaacagcccccacccccttcctcaagaaccctgcagaaatggacagcaggcatctccaaagtgacctgtgtagattaatgaccagtaaaggcacaccccagatgccctggcactatggacggcaccaggagggggatagtgggagcccaggagtaataagttggatttccctgccagctggacgagatgaggactcagagtcaagatcaagttgcttttcagggacactgacaacgttctggccactcctagacactggaaacaaacaagacgcgatccaagacctgagaagccttgcctgccatcagtgtgacaaggaggtgatcaaggaagtggtttcgatgggcctccgggacgtggaggccgacagaacagtaaaggcaagacaaggggacggagcaccggccccacctccaggaccaccaggcggtactctaagttctggggacactgaacctccatcccactga

SEQ ID NO: 22068 - DNA, 3598 bp, Homo sapiens
  SIMILAR (3517)..(767): 1001254mologous to Homo sapiens hexokinase I,accession number AF016365,Smith-Waterman Score=4735.
tttttttttttttttttgaattggtacaaagtttactaggtcatacgacacggctcacaaagcggtgggaaattccagtgatggcattgtttgttggttggttccttttatccaaatggaagacaagacacatttccgcaggactgtccacctccccccacgagacaaacagaatgcaagactgtcacacgcggctaggactggttccacggacacacgattttgtggcattgacacaccacgatgcgatgccaggccacagtgggtgccaggaggggaggaagcagctaatgctatgcccacactcgccttcaggcagtgcccccgggagggaggcccggcagtgtctgctggtgataatacatttcacacagggagggggaaccccaaggatgggctttggaggcccagaaggcctgtcaggtggtgtgattttccatctccagccaataaataactctgttggatgaatgcatacattagaaatggatgccactacacttcacacgtgggggaccaggtcaaaatcaaaccatgcaaagtggcagggcaagtgaggagggatccgggtgagagatattatcaacagcacacgctctattctgtaccctacaatatataccattagttggattttgctttcctcccccgcgccggcaggccctggcgccagcgtctcccagcgcaactcgctgggagggtagggggtcgccgcttgaagagagaagtgctggagaggcagtaggctggggatcccggactcttagctgcttgcctctgtgcgtaaccgcacgcccacggccgtgatgagggcggcccccttgccgctgccatcctcagacaggaggaaggacacgttacattttggtgacagttccttcaccgtctggtgcatgattctggagaagtgtggatgaagcttgtagagtgtcccgtccactcccacagtcacattcagacggtccagtcctctgttctcgcggatcttatccacaaccgcagccatgcctgcgccacacagctgtgcggccctcctggacaccaccccgcacactgtcttgacgaggatactgtcatcgcaggtgctattcagacctagctgctggaggatagcccggacctggagcagtgctaatcggtcactctcgatctgagagagaaacttggtctcaaagatgccccgggtcttcagcgtctcagagatctgccctcggaagaggaatcccttcttggtgaagtcgattaagatgttgcggacgatttcacccaggtacataccactgatcatcttctcatacctttgtttcccagcatttagggaatattcgtccaccagtctgtcgtagtgtgtcctgatatcatccagacacccgttgtccccaaaggccccccactccatgttgatgcacatctgcccctggtccccctccaccatctccacgttcttcatctcctccatgtagcaggcattgctgccggtcccaacaatgagtccaacctcacaggtgggctcctcataagcacaggtcatcatggtgcccactgtgtcgttgaccacagccaccacgtccaggtcaaattcctctctcctttttatcgcatcccttagtaaggtgactacatcgtggcccacgcagtctgttgccttaaaaccctttgtccacgtgatcaagattcccgcgtccagactcgtctgctggcagggaaatgagaacgtgaagcccagaggcatcctggggcctttgatccccatgtagtccaagaagtcagagatgcaggagacaatgtgatcaaacagctcttccccagtgccctgcatgatttcaataggaatggcgtagatcttgttgtgcatttccaccgttctctttttcccactacggattttcaccagcagcacacggaaattggttcctccaagatccagggccaagaagtcaccattctcggtcccgtcgggagttctccggacgaaggagggcagcatcttaaccacggcattgttgtgcgtctgcttcctcagccccagctccatctcggcccgcatcctcttcttcacctccagcagcatgtctttggtgaggtggaaatgagccagggtctcctctatctgccggtgctgctcggccaagcggtaggccaccgccgtcaccatggcagcccccttgccgctgccactctccgagaggaggaagcgcacatcggagtctggcaccaagcgccttagagtcttgtggaaacgccgggaatactgtgggtgcgtcttgtaaagagatccgtcgacaccaaccgtggtccgcagcctgggtgtgcccttgttatcacgcaggcggttcaagatggcgcccagtgtggcagccaccaagttggctgagcgaaatgagacaatggtgcaaacgtgctggactgagacacagtcatcatcggacggctccactcccaggcgggtcaggatttctttggcattgtggaggccttccttattcttttcgatggctgacacatcactggtgttaaacttccctcgggtgagcagctccggggtgatccgcccttcaaataagaggccctccttggccatcttgactaggatcagtcgaaccagctctcccaagtacatgccactgaccatcttctcaaacagctgttttccagggttgagggatccccggtctatctccctgtcaaactctgtccggatgtcttctaatgatccatcgtctccaaaggctccccattctgtattgatacacatcctcccctcgtctccttccaccagatcaatgtgcctcagttcctccatgtagcaagcattggtgccagtgccgatgatcaggccgacttcacagtgctggtcgtcatagccacaggtcatcatggtgcccactgtgtcattcaccacagctacgatgttggcatcatagtcccctcgctttttgatggctttgttaagcagtttgaccacatctgctccttccactccgctcgctttaaatcgctttgtccaggtgatcaggatggcctcatctattttggattgttggcaaggaaaagaaaacgtgaatcccacaggtaacttcttgtccttgatcttccttttctccatgaaatctcccaggcactcagcaacatgatcaaaaagctggcttccactgccgtgcacgatgttctctggggtgtcataaacctcggactccatgtgaacattctggtttttctcatgattcacttgcacccgcagaattcgaaaggaagacccaccaagatccagggcaatgaaatctcccttttcagagccatcaggaatggaccttacgaatgttggcaacatcttgactgtggctgttggattaaaatcccgggagaggccattcttcatctccttcctgaagcgagtcatgatatctatgagagtttcatcggagagccgcatggcatagagatacttgtcaatctttttgacctggtcatccttcagctccgtgaagtaataggccaggagctgcgcggcgatcatgctggcggtcggggtcgcggggcggcaggcgtggggacggtcggtcctccgcagccctggcgagccgtggtcctccggcgg

SEQ ID NO: 22069 - DNA, 3209 bp, Homo sapiens
  SIMILAR (1848)..(1492): 891254mologous to Homo sapiens DNA replication and repair associated protein (DRASP),accession number Y82741,Smith-Waterman Score=556.
ttttttttttccattataaaaatttatcaagggaataatttgagtttttagaggcttggtttagcaaggtaaaaaagacaaccaaattattaaaacactttataaattattttaaaacctaccaactggggcctaaatgaaataaaccccctattaccttaggaaagagacagctttcctaaatcacagaagttggtttccaagctacactcttacttctaatgccttggaaccctaaggagaactaaagctcaccagcgatggctgctctggaagtcaaggtgggaagaacaggcaatatcctgacacaggctagatacagactctgagccaaaagcagactctgtgacatggaaagggaccacacaattttaatttttttttttttttgagacagagtctcgctctgtggccgtggcccaggctggagtgcagtggcacaatctcggctaactggaaagtccgcctcctggggttacgcaattctcctgcttaagcctcccaagtagctggaactaaaggtgcccgccaaccacgcctggctaatttttttgtatttttttagtagagacgggggtttcaccgtgttagccaggatgggtctcgatctcctgacctcgtgatctgcccgcctcggcctcccaaaagtgctgggattacaggcgtgagccaccgcgcccggccctatttttagttttaaacaaaaaagtttaagaagtaaaaaaaaaacatgttttgttgtcgttttctttgagagggagtttagcattgatgcccatgctggagtgcagtgacacgatctcgggttcactgcaatcttccgcctccttgggctcaagcgattctcctgcctcaagcctcctgagtagctaggatttacaggctcctgccaccacaccccacacattttttgtatttttagtagagaacgggaattcgccatgttggccaggctggtcttgaactcctgatctcaggtgatccgcccgcctcggcctccctaagtgttgggactacaggcgtgacgtctcgatgcctggccccaaccagaacacttctgagcgtggaagagaatgctgttaattactcaagaccaaaaggcataaaaggagacatatgtccacccaagtgataaggcagtctgggaaactacatttcccagtatgccctgccccgtgaaagttaaaaatcttagctggcacagagcgccctgggactcctgtggttagcaccatttaagaagtacaaggtatacggttgggttctgacgtgaaggcatgttccccttccatgggacacttaaccagacacaggacacaacacgtgaggtgaaatttcaatgggtattaagtctggggtagagcttctctctcccccaaatctagcttcccaaagatgtggagctggtggagctgtccattggtccactgccctgtttctcctgggtgctgcctctgcctcctcatatcaccagcgtccccactgccactagtctgtagggggattccgggctaggtgctcttcccactcgacttcaaccaacttatatagctccatggtggcctgggcatcttccacagaggaatgtccgctcttcccaacctggatatcccggtttagcagcttcttggtgagatgcttcagagacatggtggcattctccgggcagtcagccttccggttgaggggggggatatgggaggtgtcacgggtgagggacttggggtgaaagtactgaagggctttgaagtcgttgtggatggcatgccccaccactatcttccctgtgagtatcttcaagatctctccatccttgaaatgctcactcccacaagttttctttcttctggaatccaccttcctcttccacaggtgatttccatggtataccctgtttggactcatactgccagtggctccttaccttcttattgatctccaccccatgacattaatttgccttcagtcctaaatgacactcatgtttgagatgtccatgtatttagttcagttctggcttgctacatgaagtcctttaactattaccattatgttggccttagacacatggctgggacccgggctccagggaggctaacaaaagcccaaaattacatgcaattagatgtgtatgggtactagaggaagagaatctgtggctttcatcaaattctcagagtctacaaaccgtaaaaaattaagaatcacatataaactaaagttgcagaagcaaccttattcacactagttttggaaccaagtaaaataaaaataacttctcaatatttcaggaaactgttttttttttttgagatggagtcttgctctgttgcccaggctggagtgtactggcgcgatcttggctcactacaacctccgcctcccgggttcaagcgtttctcctgcctcagcctcccaagtagctgggactactggcacctgccaccatgcctggctaagttttgtatttttagtagagacggagtttcaccatatgggccaggctggtcttgaactcctgatcttgtgatctgcccgcttcaggctcccaaagtgctgggattacaggtgtgagccaccacacctggccttcaggtaacttattttttaaaagagatgaggtcttgctatttttcccaggttggctggcctcaaactcctgggctcaagcaatgctctcacctcaaactcctgagtagctgggattacagacacatgtcaccacacctagccatttcaggctcttgaagtaggaggacatgctaccaatgaggacaaccgaagaacacaccacaggctctgaaggccattcccaaatgaggttccaaacaggttttcaacaaaagtgacagtcctgcatagcctcccaaagggaccccctctgaaggggctaggctcatctggacataccttagtctcataaccccagcttggcactggggaagtgctttatgatgaaaaccagacgtagtcccgtgaactagatatttcgttactcctgacttcacctacttactgtccaccaccaccttcacttcttattaacctcgacatatagccctcatcaaagctgggcagatttgctgtctcagacccgtcccatcttctgcctctcctatgcctttgcttggctgcgcccctttgtgcacaagatgtttaactcttctttccgtcttttctaaaatagtcagtcacctcacctctaacgc

SEQ ID NO: 22070 - DNA, 228 bp, Homo sapiens
  SIMILAR (26)..(82): 941254mologous to Homo sapiens Human endometrium tumour EST encoded protein 144,accession number Y60084,Smith-Waterman Score= 106.
  misc_feature (1)...(228): n = a,t,c or g
acagcaatcccactagcagttctgatgggtttcgcctttaacttgggcatcaagnccttgcgatactgaggagggacggcagcaatgatatccaccaggcggggctgggcagaaaggccatatttggcagctgtcttggttttcacccagactatggaggattcaccaccagaccaggaagcaanagcctgggctccagagttggccactcctccttgcacagatgag

SEQ ID NO: 22071 - DNA, 436 bp, Homo sapiens
  SIMILAR (134)..(298): 981254mologous to Homo sapiens unnamed protein product,accession number AK001284,Smith-Waterman Score=289.
aagatactgcaaagatgttacctggatgcggttcctggccaaaaacatccttcgtttctgccattccttgttacgtgaactcctgctcttctcagttcaggagaaccagcctgtgaagacaaagtacaaagacaggtattctgagagaagcctcacaaagtgtattggaattactattgaaaccagaccagattactgcatgaagcgacatttaagtgacatgttgacctatggctgcacaaggctggagattggggtgcagagtgtttatgaagatgtggctagagacaccaacaggatttgggtaggtgtgattggtgttgtgccaggagaaggaagcaaaggggaactagggaaacaagcactgatcagcatcttagaaacaaccaagaggaatgccaggccgaggaggatggaattttcccttaaggaatag

SEQ ID NO: 22072 - DNA, 1359 bp, Homo sapiens
  SIMILAR (88)..(480): 981254mologous to Homo sapiens unnamed protein product,accession number AK022626,Smith-Waterman Score=675.
atgcaacgcagagctgtcagtcaggaaggctgcactggcagagtggagcaaaaggggaagaacctggggcaacatcttgagtcctgggatattccaatgcctttagttagctcaggagtagagcatggtaacctgagagagctggcacttgcaagaatgaaagacctcggaatacagtgtcgagatgtgagaaccagagaagttggaatccaagaaattcatcacaaagtacggccataccaggttgaattggtaaggagagattatgttgcaaatggtggctgggaaacattcttgtcatacgaagacccagatcaagacattttgattggcctcctacgattacgcaagtgttcagaagaaactttccgtttcgaattgggtggaggtgtctccatagtacgagagctgcatgtgtatgggagtgtggtccctgtgagcagccgggatcctactaaatttcagcatcagagtttagggtcccgagatgttattttccttccacaagagacatccacagctttcacgatggttaccgatcatatgtgccattcatctaagaccaagttgcaacacggggcggggcgtggctttgtgcacgtcggcttccgggaagagctttacgatacattgaccgacattttacgacaggcgggattgttttgtggctgtcagctttccccgtggtctgagtttgtggctgcatttttatctctggtggctctgctacggcggcgcagaaatgaggcagaagcggaaagggtgaaaaccaagacagctgccaaatatggcctttctgcccagccccgcctggtggatatcattgctgccgtccctcctcagtatcgcaaggtcttgatgcccaagttaaaggcgaaacccatcagaactgctagtgggataaggaatggggaagctcctgatggggttcagaacacactaccgcaaaagacggtgtcttggcatactgagtatcttaagaccctgaaacatgaagctgctagtttaatagtacctgctgcaaatattgagatccagtgtgttcatgaggcgtttgagtcacaaagatactgccctggtggacctgattctgattttgagtattccacccagtcttacactggctatgagccaacctccatgagagctatccgtgccagatatgaccctttcctacagacaagacaccgaatagaacagttaaaacaacttggtcatagtgtggataaagtggagtttattgtgatgggtggaacgtttatggcccttccagaagaatacagagattattttattcgaaatttacatgatgccttatcaggacatacttccaacaatatttacgaggcagtcaagtaa

SEQ ID NO: 22073 - DNA, 2497 bp, Homo sapiens
  SIMILAR (433)..(1155): 651254mologous to Saccharomyces cerevisiae Lpg22p,accession number U43281,Smith-Waterman Score=835.
  misc_feature (1)...(2497): n = a,t,c or g
gacctatcctcatctgtgcaaggaggagtggccaactctggagcccaggctgttgcttcctggtctggtggtgaatcctccatagtctggtgagtgtagtgcccaactctggagcccaggatgttgcttcccggtctggtggtgaatcctccatagtctggagatctcagccctgctgagcttgatgatgctgactataggagatgttattaaacaactgattgaagcccacgagcaggggaaagacatcgatctaaataaggtgaaaaccaagacagctgccaaatatggcctttctgcccagccccgcctggtggatatcattgcttgccgtccctcctcagtatcgcaaggtcttgatgcccaagttaaaggcggaacccatcaaaaactgcttagtgggattgttgtcgtggctgtgatgtgcaaaccccacagatgtccacacatcagttttacaggaaatatatgtgtatactgccctgggtgggacctgattctgattttgagtattccacccagtcttacactgggctatgagccaacctccatgaggagctattccgtgccagatatgaccctttcctacaaacgaaggaccgaatagaacagtgaagacaacttggtcatagtgtggataaagtggagtttattgtgatgggtggaacgtttatggcccttccagaagaatacagagattattttattcgaaatttacatgatgccttatcaggacatacttccaacaatatttacgaggcagtcaagtattctgagagaagcctcacaaagtgtattggaattactattgaaaccagaccagattactgcatgaagcgacatttaagtgacatgttgacctatggctgcacaaggctggagattggggtgcagagtgtttatgaagatgtggctagagacaccaacaggggccacactgtgaaggcagtgtgtgagtcatttcacctggccaaagattccggttttaaagtggtggcccatatgatgcctgacctgccaaacgtgggactagaaagagacattgaacaagttcacagagttttttgagaaccctgctttttcgtcccgatgggcttaaaactctatcctaccctggtgattcgtgggaccgggctttatgagctttggaaatccaggaagatataagagttacttctcctagtgacctgggttgaattgggtggctcggttcctagccctcgtgcctccatggactcgagtgtaccgagtacagagggatattccaatgcctttagttagctcaggagtagagcatggtaacctgagagagctggcacttgcaagaaatgaagaccttcggatacagtgtcgagatgtgagaaccagagaagttggaatccaagaaattcatcacaaagtacggccataccaggttgaattggtaaggagagattatgttgcaaatggtggctgggaaacattcttgtcatacgaagacccagatcaagacattttgaattggcctcctacggattacgcaagtgttcagaagaaactttccgtttcgaattgggtggaggtgtctccatagtacgagagctgcatgtgtatgggagtgtggtccctgtgagcagccgggatcctactaaatttcagcatcagggatttggcatgctgctcgatggaggaagcagaaagaattagctagaggaggaacatgggtctgggaaaaatcgctgtaatatcaggggtcggcaccagggaattattattggaaagatcggctacagattaccaaggccccgtacaatggtgaagatgctggaaataatgggccacacccagtcccactccttctgcagtatccttccctggcatgaacaccggagaatcaggatttccttaaatactcaacagagagggcttnagcagagcaaatgggggggcttcaccctcatccccgcagctgcagagactggaaactgccttcaaggccacggctggtcatctgctgacccacaccccagatccgcccttctcctgcgtgcaccccaaaaaaaatcacttgcgtttttgaggcttaaatcatctatcccagtttctacattttgcatgaggcctgcaggtggcctattttgactcagacggtgaaaaaagcaaattaactcatttggacaccataactcatgcaataaaactgattgtcattcgaggagcaaacttaagagtagtttatttatataccctgggggacagatagtcaggttgaaacaggaaaaccaccagactctaatctcagccctttaacgacatacgcattggagcgcaagttaggaaaatgagcttttgttttcatggaaatcattctgattacagtgctgatgtttagaaataaatagcagtgtgactgggaaagaggaattgcagttgtgggggtgtgagcctggcagcagccagccagcagcctctcccaggcgggagtctaccatccgagacggcgatgacaaagagcttc

SEQ ID NO: 22074 - DNA, 457 bp, Homo sapiens
  SIMILAR (1)..(330): 1001254mologous to Homo sapiens branched-chain alpha-keto acid dehydrogenase E1-alpha subunit,accession number M22221,Smith- Waterman Score=591.
ggcgatggcattgcagcacgaggccccgggtatggcatcatgtcaatccgcgtggatggtaatgatgtgtttgccgtatacaacgccacaaaggaggcccgacggcgggctgtggcagagaaccagccctttctcatcgaggccatgacctacaggatcgggcaccacagcaccagtgacgacagttcagcgtaccgctcggtggatgaggtcaattactgggataaacaggaccaccccatctcccggctgcggcactatctgctgagccaaggctggtgggatgaggagcaggagaaggcctggaggaagcagtcccgcaggaaggtgagggcacattcaggactagaagcccctctgggcatggggtggacatggcaggtcagcctgtggaacttgcgcaggtgcgagtggccagcagaggtcacgaataaactgcatctctgcgcaaaaaaaa

SEQ ID NO: 22075 - DNA, 297 bp, Homo sapiens
  SIMILAR (5)..(214): 401254mologous to Homo sapiens branched-chain alpha-keto acid dehydrogenase E1-alpha subunit,accession number M22221,Smith- Waterman Score=105.
gtgtgtgatgtatcgggactaccccctggaactattcatggcccagtgctatggaacatcagtgacttgggcaaggggcgccagatgcctgtccactacggctcaaggaacgccacttcgtcactatctcctctccactggccacgcagatcctcaggcagcacgaggccccgggtatggcatcatgtcatccgcgtggatggtaatgatgtgtttgccgtatacaacgccacaaaggagcccgacggcgggctgtggcagagaaccagccctttctcatcgaggccagacctacag

SEQ ID NO: 22076 - DNA, 1874 bp, Homo sapiens
  SIMILAR (107)..(943): 491254mologous to Homo sapiens branched chain decarboxylase alpha subunit,accession number Z14093,Smith-Waterman Score=495.
  misc_feature (1)...(1874): n = a,t,c or g
ctgactggttgttagccaagatggcggaagcgatcgctgcagcgaggtgtctggcggctaaaccgtggtttgagccatgctgccctcctgctgctgcggcagcttgggggctcaggggactgagctagatctcacccccccaggcagcagcagcagtgttcagctctggatgacaagcccccagttcccaggggcctcggcgggagttatagataagttggaattcatccagtcccaacgtcatctctggaatccccatctaccgcgtcatgggacccgcaaggccagattcatcaaccccaggcgagggacccccaccttgccgaaggagaaaggtggttgaagctcttacaagagcattgacactgctttaacacccatgggaccgcatcctctaatgagtcttcagcgggcagggccgaattctccttcttacatgaaccaattattggttgaggaggggcacgcacgtgggggagtgcccgccgccttggacaaacacggaccctggtgtttggccagtaccgggagggcaggtgtgctgatgtatcgggactaccccctggaactattcatggcccagtgctatggcaacatcagtgacttgggcaaggggcgccagatgcctgtcaactacgggctgcaaggaacggcacttcgtcactatctcctctccactgggccacgcaggatccctcagggcggtggggggcggcgtacgcagccanaggcggggccaatgccaacagggttcgttcatctgttactttcgggcgaggggggcagccagttgagggggggacgcccatgcccggctttcaactttcgctgccacaatttgagttgccccatcatcttcttctgccggaacaatggctacgccatctccacgcccacctctgagcagtatcgcggcgatggcattgcagcacgaggccccggggtatggcatcatgtcaatccgcgtggatggtaatgatgtgtttgccgtatacaacgccacaaaggaggcccgacggcgggctgtggcagagaaccagcctttttctcatcaggcccatgactccagggtccaggcccccagccccaggtgacgccagttaaacgtaccgctcggtggatgaggtcaatttactgggaaaacaagggcccacccattctcccgggcttcggccactatctgtttagccaaaggctggtgggatgaggagcagcagaaggcctggaggaagcagtcccgcaggaaggacccagggcccgtgcagcccagtggtgatggaggcctttgagcaggccgagcggaaggcccaaacccaaccccaaacctacttcttctcagacgtgtatcagaatatgcccgcaccagttcggcaaccaccagagtcttgtggcccgccacttcaagacctacgggaaccattacccatgggatcacttcgataagtgagacctgctcagcccacccccacccatcctcagctaccccgaagaggtaagccccaactcctaaggggaagcagggggaccctgaacagcacacccactgtcttcccccagtcagctcccctcctaaaatactcagcggcccagggcggctgcccactcttcacccctgctcctcccggctgttacattgtcaggggacagcattttgcaccagttgttaaggctccgtcagcccccttttcacctgttgttacagtgccttttcccaggggctgggtgatgggcacattcaggactagaaacgccctctgggcatggggtggacatggcaggtcagcctgtggaacttgcgcaggtgcgagtggccagcagaggtcacgaataaactgcatctctgcgcctggatatctaccaaaaaaaaaaaaaaa

SEQ ID NO: 22077 - DNA, 504 bp, Homo sapiens
  SIMILAR (258)..(371): 761254mologous to Xenopus laevis maternal transcription factor,accession number X57165,Smith-Waterman Score=141.
gggtctcctgcagcggcaaaatcttctaacgcaactacctcagcaaagccaagccaacctcctacagtcgcagccaagcatcaccctcacctccgagccagcaaccccaacacgcacaatagcagcaaccccaattcagacacttccacagagccagtcaacaccaaagcgaattgatactcccagcttggaggagcccagtgaccttgaggagcttgagcagtttgccaagaccttcaaacaaagacgaatcaaacttggattcacttcacgccacctccacctctgctgagtccatccagaactctctcttcacagtggcctctgccagcggggctgcgtccaccaccaccaccgcctccaaggcacagtgagctgggcagagctgggctgccagaagcctttttcactctgcagtgtgattggactgccagccaggttaataaactgaaaaatgtgattggcttcctctcgccgtgttgtgagggcaaaggagagaaggga

SEQ ID NO: 22078 - DNA, 1895 bp, Homo sapiens
  SIMILAR (119)..(298): 911254mologous to Homo sapiens Oct-1 protein (AA 1 - 743),accession number X13403,Smith-Waterman Score=279.
caaagcctagccgacctcctacagtcgcagccaagcatcaccctcacctcccagatctggcccagtccagcctgaggtttctggagctggggtaacttatctgtaaccaccccatctaaagccagcaacccctacacgcacaatagcagcaaccccaattcagacacttccacagagccagacagcaccaaagcgaattgatactcccagcttggaggagcccagtgaccttgaggagcttgagcagtttgccaagacctttaaacaaagacgaatcatacttggattcacctcagggggatgctgggctcgctatggtgaaactatatggaaatgacttcagcccaactaccatctttcgatttgaagccttgaacctcagctttaagaacatgtgcaagttgaagccacttttagagaagtggctaaatgatgcagagaacctctcatctgattcgtccctctccagcccaagtgccctgaattctccaggaattgagggcttgagccgtaggaggaagaaacgcaccagcatagagaccaacatccgtgtggccttagagaagagtttcttggagaatcaaaagcctacctcggaagagatcactatgattgctgatcagctcaatatggaaaaagaggtgattcgtgtttggttctgtaaccgccgccagaaagaaaaaagaatcaacccaccaagcagtggtgggaccagcagctcacctattaaagcaattttccccagcccaacttcactggtggcgaccacaccaagccttgtgactagcagtgcagcaactaccctcacagtcagccctgtcctccctctgaccagtgctgctgtgacgaatctttcagttacagcctccacctccgaggcatccagtgccagtgagaccagcacaacacagaccacctccactcctttgtcctcccctcttgggaccagccaggtgatggtgacagcatcaggtttgcaaacagcagcagctgctgcccttcaaggagctgcacagttgccagcaaatgccagtcttgctgccatggcagctgctgcaggactaaacccaagcctgatggcaccctcacagtttgcggctggaggtgccttactcagtctgaatccagggaccctgagcggtgctctcagcccagctctaatgagcaacagtacactggcaactattcaagctcttgcttctggtggctctcttccaataacatcacttgatgcaactgggaacctggtatttgccaatgcgggaggagcccccaacatcgtgactgcccctctgttcctgaaccctcagaacctctctctgctcaccagcaaccctcccggaggcttcaccattgagattagtaacaacaatagcactatggtgatgacaggcatgcggatccagattgggactcaagcaatagaacgggccccgtcatatatcgagatcttcggcagaactatgcagctcaacctgagtcgctcacgctggtttgacttccccttcaccagagaagaagccctgcaggctgataagaagctgaacctcttcactgttagaaaatttcagaacatcagacacaccctattcaaatgtgagaacaaaaacaccttccagcagtgcctgcttctggaacaggactcctcctgcggtacagggttttgctcaatgactacctacccggtcatgctgctgtccagtgagcagccggtccagagcttgtcggtccggcagtgtgttattctgctagatgcggcagctgtgatctcagggggaatgggggctgtatgcctgctcctgacacacctctgcccgttgtgctatgcaggtcttttatcagaaatcaccgatccagagagcttcgtgaaggacctgttgtactcagtcccctga

SEQ ID NO: 22079 - DNA, 2633 bp, Homo sapiens
  SIMILAR (169)..(930): 811254mologous to Mus musculus oct-1,accession number X70324,Smith-Waterman Score=970.
  misc_feature (1)...(2633): n = a,t,c or g
atgagggtaagaacttcatctttgccctcaactatgctcagggtccaaaactatgctcgggccaaagcaggccctgaatacgcttttgttgactcaacagaatgcagccctcagtggatggtttctcccttgaaacgaggcacacaaaccaatggtctggactttcagaagcagcctgtgcctgtaggaggagcaatctcaacagcccaggcgcaggctttccttggacatctccatcaggtccaactcgctggaacaagtttacaggctgctgctcagtctttaaatgtacagtctaaatctaatgaagaatcgggggattcgcagcagccaagccagccttcccagcagccttcagtgcaggcagccattccccagacccagcttatgctagctggaggacagataactgggcttactttgacgcctgcccagcaacagttactactccagcaggcacaggcacaggcacagctgctggctgctgcagtgcagcagcactccgccagccagcagcacagtgctgctggagccaccatctccgcctctgctgccacgcccatgacgcagatccccctgtctcagcccatacagatcgcacaggatcttcaacaactgcaacagcttcaacagcagaatctcaacctgcaacagtttgtgttggtgcatccaaccaccaatttgcagccagcgccagtttatcatctcacagacgccccagggccagcagggtctcctgcaagcgccaaaatcttctaacgcaactacctcggcaaagccaagccaacctcctacagtcgcagccaaggattaaccctcacttcccagccagcaaccccaacatgcacaatagcagcaacccccattcagacacttccacagagccagtcaacaccaaagcgaattgatactcccagcttggaggagccccagtgaccttgaggagcttgagcagtttgccaagaccttcaaacaaagacgaatcaaacttggattcactcagggtgatgttgggctcgctatggggaaactatatggaaatgacttcagccaaactaccatctctcgatttgaagccttgaacctcagctttaagaacatgtgcaagttgaagccacttttagagaagtggctaaatgatgcagagaacctctcatctgattcgtccctctccagcccaagtgccctgaattctccaggaattgagggcttgagccgtaggaggaagaaacgcaccagcatagaagcccaacatccgtgtggccttagagaagagtttcttggagaatccaaaagcctacctcggaagagatcactatgattgccgatcagctcaatatggaaaaaggggtgattcgtgtttggttctgtaaccgccgccagaaagaaaaaagaatcaacccaccaagcagtggtggggaccagcagctcacctattaaagcaattttccccagcccaacttcactggtggcgaccacaccaagccctgtgactagcagtgcaacaactaccctcacagtcagccctgtcctccctctgaccagtgctgctgtgacgaatctttcagttacaggcacttcagacaccacctccaacaacacagcaaccgtgatttccacagcgcctccagcttcctcagcagtcacgtccccctctctgagtccctccccttctgcctcagcctccacctccgaggcatccagtgccagtgaggaccagcacaacacaggaccacctccactcctttgtcctcccctcttgggaccagccaggtgatggtgacagcatcaggtttgcaaacagcaggcagctgctgcctttcaagggagctgcacagttgccagcaaatggccagtcttgctggccatggcagctgctgcaggactaaacccaagcctgatggcaccctcacagtttgcggctggaggtgccttactcagtctgaatccagggaccctgagcggtgctctcagcccagctctaatgagcaaaaagtacactggcaaactattcaaactcttgcttctggtggctctcttccnaaataaacatcacttgaatgcaaactgggaaccctggtaatttgcccaatgcgggaggagccccccaanatcgtgactgcccctctgttccctgaaccctcaagaacctctctctgctcacccagcaaccctgttagcttggtctctgccgccgcagcatctgcagggaactctgcacctgtagccagccttcacgccacctccacctctgctgagtccatccagaactctctcttcacagtggcctctgcccagcggggctgccgtcccacccacccacccaccgcctcccaaggcacagtgagctgggcagagctgggctgcccagaagcctttttcactctgcagtgtgattggactgccagcccaggttaataaactgaaaaatgtgattggcttcctgtcgccgtgttgtgagggcaaaggagagaagggagaaaaaaaaaaaaaaaaccacacacacccatacacaatataccagaaaaagaaagaaaggatggagacggaacatttgcctaattttgtaataaaacactgtcttttcaggattgcttcatggattggagaactttctaaccaaaaattaaaaa

SEQ ID NO: 22080 - DNA, 514 bp, Homo sapiens
  SIMILAR (3)..(110): 1001254mologous to Homo sapiens cerebral cell adhesion molecule,accession number AF177203,Smith-Waterman Score=187.
gcggccgcctcatcagctggagcggctcccaaaagaccctgcgcagcccccgcctggacctgactggcagcagcgggcacagcctccaaccccagccccgagatgagctctaggtccaggtgatgactgcaaagcagtgtccaggagcaggccactactgcccagagagcagaggaggaggttgttggcagggactgcagatcctgtcagacctggccaccaccttgggcatggccactctgccctctggacctgtctttcatcgggagaaaccactcagagatggatcccattccctaaaggtctcacagcaaaggagcaggactcccaggcccctgtaccctgcctggcctgattcagggccttgtggcccccagcttctgtttcaagctgggcagaccccagcaccctcctccctggccggtgcaaagtacagggaggtaaagcaggacccttgcagacctgttgcccagcacacagtaggccctcaataaaagccatttgcaccctcgtg

SEQ ID NO: 22081 - DNA, 505 bp, Homo sapiens
  SIMILAR (1)..(237): 971254mologous to Homo sapiens Human secreted protein encoded from gene 2,accession number Y30812,Smith-Waterman Score=403.
aacctcggcgtagacctgctcccgggctaccaggacccttactcgggccgcactctgaccaagggcgaggtgggctgcttcctcagccattactccatctgggaagaggtggttgccaggggcctggcccgggtcctggtgtttgaggatgacgtgcgctttgagagcaacttcagggggcggctggagcgtctgatggaggatgtggaggcagagaaactgtcttgggtactcctactggacgctggcctatgccctgcgtctggcgggtgcccgcaagctgctggcctcacagcctctgcgccgcatgctgcccgtggacgagttcctgcccatcatgttcgaccagcaccccaacgagcagtacaaggcacacttctggccacgggacctggtggccttctccgcccagcccctgctcgctgcccctacccactatgccggggacgccgagtggctcagtgacacggagacatcctctccatgggatgatgacagcggccgc

SEQ ID NO: 22082 - DNA, 626 bp, Homo sapiens
  SIMILAR (521)..(619): 1001254mologous to Homo sapiens Human secreted protein encoded from gene 2,accession number Y30812,Smith-Waterman Score= 166.
tgcgcgctgcccgcgccgcgccgttgctccatttgttgctcctgctggggccgtggctggaggctgcgggcgttgcggagtcgccgctgcccgccgaggtccttgccatcctggcccgcaatgccgaacactcgctgccccactacctgggcgctctggagcggctggactacccccgggccaggatggccctctggtgtgccacggaccacaatgtggacaacaccacagagatgctgcaggagtggctggcggctgagggcgatgactatgctgctgtggtctggaggcctgagggcgagcccaggttctacccagatgaagagggtcccaagcactggaccaaagaaaggcaccagtttctgatggagctgaagcaggaagccctcacctttgccaggaactggggggccgactatatcctggagccacgctgggtctctggcaggaccactcagtgaactccttggggggctgcagcccaggcagggctggagcctgtgacgtcccctcctcaaagtttgcagacacagacaacattctgaccaacaatcagactctgcggcttctcatggggcaggggcttccagtggtggccccaatgctggactcccagaccaatgtat

SEQ ID NO: 22083 - DNA, 2541 bp, Homo sapiens
  SIMILAR (331)..(831): 921254mologous to Homo sapiens Human secreted protein encoded from gene 2,accession number Y30812,Smith-Waterman Score=847.
  misc_feature (1)...(2541): n = a,t,c or g
atgcgcgctgcccgcgccgcgccgctgctccagctgctgctcctgctggggccgtggctggaggctgcgggcgttgcggagtcgccgctgcccgccgtggtccttgccatcctggcccgcaatgccgaacactcgctgccccactacctgggcgctctggagcggctggactacccccgggccaggatggccctctgccttcagggcccagctcaaccccagtgggacctgtggttggctggatttgaagaggagcagacaggaacctctgaagtccactggggcccaacgtggcagggatcgaccacgctggaggcttccgggcacaggtgtgccacggaccacaatgtggacaacaccacagagatgctgcaggagtggctggcggctgtgggcgatgactatgctgctgcggtctggaggcctgagggcgagcccaggttctacccagatgaagagggtcccaagcactggaccaaagaaaggcaccagtttctgatggagctgaagcaggaagccctcacctttgccaggaactggggggccgactatatcctgtttgcagacacagacaacattctgaccaacaatcagactctgcggcttctcatggggcaggggcttccagaggtggccccaatgctggactcccagacctactactccaacttctggtgtgggatcaccccccagggctactaccgccgcacagccgagtacttccccaccaagaaccgccagcgccggggctgcttacgtgtccccatggtccactccaccttccttgcatccctgcggggctgaaggggcagaccagcttgctttctacccgccacatcccaactacacttggcctttcgacgacatcatcgtcttcgcctatgcctgccaggctgctggggtctccgtccacgtgtgcaatgagcaccgttatgggtacatgaatgtgccggtgaaatcccaccagggggctggaagacgagagggtcaacttcatccaccatgatcttagaagcactagtggacggcccccgcatgcaggcctcagctcatgtgactcggccctcttaagaggcccagcaagatagggttttgacgaggtctttgtcatcagcctgggttcgcaggcctgaccgtcgggaacgcatgctcgcctcgctctgggagatggagatctctgggagggtggtggacgctgtggatggctggatgcttcaacagcaggtgccattcaggaacctccggccgtaggacctgctccccgggctaacaaggacccttacttcgggccgcactcttgaccaagagcggaggtgggcttgctttcctcagaccattactccatctggggaagaggtggtttcccagggggcctggccccggggtcctggttgtttgaaggaatgacgttgcgcctttgagaacaaactttcaagggggcggcttggagcggctgaatggaagaatgtggaaggcaagagaaacttgtcttgggaaaaancccccttttgnattctacccctcggacgggaagcaggttgaacccttgagaagggagacgggccgtggaggggctgccgggccctggtggtggctgggtaactccctaactgggacgctggcctaatgccctgcgtctggcgggggggcccgcaagcttgctggccttacagccttttgcgccgcattgctgccccgtggaacgaatttccttgcccattcattgtttcgaccaagcaccccaacgaagcaagtacaaaggcacacttctggccacgggaccctggtggccttctccgcccaagcccctgctcgctgcccctacccactatgccgggggacgccgagtggatactgttatctcggagacatcactctccatgggatgatgacagcggccgcctcatcagctggagcggctcccaaaagaccctgcgcagcccccgcctggacctgactggcagcagcgggcacagcctccaaccccagccccgagatgagctctaggtccaggtgatgactgcaaagcagtcgtccaggagcaggccactactgcccagagagcagaggaggaggtttgttggcagggactgcagatcctgtcagacctggccaccacctttgggcatggcccactctgccctctgggacctgtctttcatcggggagaaaccacttcagagatggatcccatttccctaaaaggtctcacaggcaaagggagcaggacttccagggcccctgttaccctgcctggcctgatttcaggggccttgtggcccacagctttcttgttttcaagctggggcagaccccaggattcctttccttccttaaaggactcaggtgaagggggcccctctgcccccttctacctccacctcagcaccctcccccagcttgatgtttgggtctccccagcaccctcctccctggccggtgcaaagtacagggaggtaaagcaggacccttgcagacatgttgcccagcacacagtaggcccctcaataaaagccatttgcactttaaaaaaaaaaaaaa

SEQ ID NO: 22084 - DNA, 468 bp, Homo sapiens
  SIMILAR (204)..(371): 711254mologous to Homo sapiens p53 induced protein,accession number AF010310,Smith-Waterman Score=189.
  misc_feature (1)...(468): n = a,t,c or g
gagctaagtcacaacgccaaggccaaggtgatggtggcctcccacaatgaggacacatgntcttcgcactgcgcaggatggaggagctgggcctgcatcctgctgaccaccaggtgtactttggacagctgctaggcatgtgtgaccagattcagcttcccgctgggccaggccggctaccccatcctcacacagattcaccttttttcaccccacacttgcagagctgctggaggtgaggtcaggtgcctcccagccctgcccagagtatgggcactcaggtgtgggccgaacctgatacctgcctgggacagccactggaaacttttgggaactctcctcgaattgtgtgcccaaggcccccacctctgtgacccccatgtccttggacctagaggattgtccaccttctgccaaggccagcccacacagcccgagccccttggggagcagtggccgggctgggga

SEQ ID NO: 22085 - DNA, 1896 bp, Homo sapiens
  SIMILAR (1)..(1251): 991254mologous to Homo sapiens proline oxidase 2,accession number U79754,Smith-Waterman Score=2115.
atggctctgaggcgcgccctgcccgcgctgcgcccctgcattccccgcttcgtcccgctgtccacggcgccggcctcccgcgagcagcccgcagcgggcccagcggccgtgccaggaggtgggtcggccacggcagtgcggccgccggtgcccgccgtggacttcggcaacgcgcaggaggcgtaccgcagccggcgaacctgggagctggcgcggagcctgctggtgctgcgcttgtgcgcctggcccgcgctgctggcgcgccacgagcagctgctgtatgtttccaggaaacttctaggacagaggctattcaacaagctcatgaagatgaccttctatgggcattttgtagccggggaggaccaggagtccatccagcccctgcttcggcactacagggccttcggtgtcagcgccatcctggactatggagtggaggaggacctgagccccgaggaggcagagcacaaggagatggagtcctgcacctcagctgcggagagggatggcagtggcacgaataagcgggacaagcaataccaggcccactgggccttcggggaccgcaggaatggtgtcatcagtgcccgcacctacttctacgccaatgaggccaagtgcgacagccacatggagacattcttgcgctgcatcgaagcctcaggtagagtcagcgatgacggcttcatagccattaagctcacagcactggggagaccccagtttctgctgcagttctcagaggtgctggccaagtggaggtgcttctttcaccaaatggctgtggagcaagggcaggcgggcctggctgccatggacaccaagctggaggtggcggtgctgcaggaaagtgtcgcaaagttgggcatcgcatccagggctgagattgaggactggttcacggcagagaccctgggagtgtctggcaccatggacctgctggactggagcagcctcatcgacagcaggaccaagctgtccaagcacttggtagtccccaacgcacagacaggacagctggagcccctgctgtcccggttcactgaggaggaggagctacagatgaccaggatgctacagcggatggatgtcctggccaagaaagccacagagatgggcgtgcggctgatggtggatgccgagcagacctacttccagccggccatcagccgcctgacgctggagatgcagcggaagttcaatgtggagaagccgctcatcttcaacacataccagtgctacctcaaggcaagcccccgctcagcccctccctgcctgccctggggcttggagaccccacaggaggggctcctctcatctgagctccctggcatttggctggatgcctatgacaatgtgaccctggacgtggagctggctcgccgtgagggctggtgttttggggccaagctggtgcggggcgcatacctggcccaggagcgagcccgtgcggcagagatcggctatgaggaccccatcaaccccacgtacgaggccaccaacgccatgtaccacaggtgcctggactacgtgttggaggagctgaagcacaacgccaaggccaaggtgatggtggcctcccacaatgaggacacagtgcgctttgcactgcgcaggatggaggagctgggcctgcatcctgctgaccaccgggtgtactttggacagctgctaggcatgtgtgaccagatcagcttcccgctgggccaggccggctaccccgtgtacaagtacgtgccctatggccccgtgatggaggtgctgccctacttgtcccgccgtgccctggagaacagcagcctcatgaagggcacccatcgggagcggcagctgctgtggctggagctcttgaggcggctccgaactggcaacctcttccatcgccctgcctag

SEQ ID NO: 22086 - DNA, 2474 bp, Homo sapiens
  SIMILAR (1471)..(1929): 771254mologous to Homo sapiens proline dehydrogenase/proline oxidase,accession number U82381,Smith-Waterman Score=590.
  misc_feature (1)...(2474): n = a,t,c or g
taatgagagggaaaacaagtatgaagctgtgtggctgaaaccgtcttggcaagttagggaaagaaaacggaagtcactggggctgatcacagtgctaagcatgagagcactgcaagatgaggtcacggaggtgggcagggaccggcttgtgccaggccttgctggcagggtgaagagtttgccttttctctgcgtacaatggaaaggagaagaggttttaagcaagagaatggcttggtcatgtgtatgtctttgagacaccctggctagtctatgtatgatgcaaaaggtgggtggggcagggtgacaagaaaatactgttccggagcttcctgtggctgtgcctataagaggtggtggtggtggtgtggaaggaggtgtggcagtgaataaacagagatgtagaaacagcgtgtacatatattttaaggaacactgaggacgtgatgctggaatttgtgatgagagagtggaaaaaatccaggaaacttctaggacagaggctattcaacaagctcatgaagatgaccttctatgggcattttgtagccggggaggaccaggagtccatccagcccctgcttcggcactacagggccttcggtgtcagcgccatcctggactatggagtggaggaggacctgagccccgaggaggcagagcacaaggagatggagtcctgctcctcggctgcggagagggatggcagtggcacgaataagcgggacaagcaataccaggcccaccgggctttcggggaccgcaggaatggtgtcatcagtgcccgcacctacttctacgccaatgaggccaagtgcgacagccacatggagacattcttgcgctgcatcgaagcctcaggtagagtcagcgatgacggcttcatagccattaagctcacagcactggggagaccccagtttctgctgcagttctcagaggtgctggccaagtggaggtgcttctttcaccaaatggctgtggagcaagggcaggcgggcctggctgccatggacaccaagctggaggtggcggtgctgcaggaaagtgtcgcaaagttgggcatcgcatccagggctgagattgaggactggttcacggcagagaccctgggagtgtctggcaccatggacctgctggactggagcagcctcatcgacagcaggaccaagctgtccaagcactttggtaagtccccaacgcacagacaggacagctggagcccctgctgtcccggttcactgaggaggaggagctacagatgaccaggatgctacagcggatggatgtcctggccaagaaagccacagagatgggcgtgcggctgatggtggatgccgagcagacctacttccagccggccatcagccgcctgacgctggagatgcagcggaagttcaatgtggagaagccgctcatcttcaacacataccagtgctacctcaaagatgcccatgacaatgtgaacccttgaccgtggacctgtctccccgagagggctggtgttttggggccaagccggtgcggggcgcatacctggcccaggagcgagcctgtgcagcagagatcggatatgaggaccccatcaaccccatgtacgaggccaccaacaccatgtaccacaggtgcctggactacgtgctggaggagctgaagcacaacgccaaggccaaggtgatggtggcctcccacaatgaggacacagtgcgcttcgcactgcgcaggatggaggagctgggcctgcatcctgctgaccaccaggtgtactttggacagctgctaggcatgtgtgaccagatcagcttcccgctgggccacggctggctaccccgtgtacaagtacgtgccctatggccccgtgatggaggtgctgccctacttgtccccgccgtgccctggaagaacagcagcctcatgaagggcacccattcgggagcggctagttgctgtggctggaactcttgaggcggctccgaactggcaacctcttccatcgccctccttagctaatcgccagctacaccctctagccttccagcaccccccgccccctgctccaggccattcaaccaacaagctgcaagccaaaccccaatccttcaacacagattcaccttttttcaccccaccactttgcagagcttgcttggaggtgaggtcagngtgccctcccagcccttgcccagagtatgggcactcaggtgtgggccgaacctgatacctgcctgggacagccactggaaacttttgggaactctcctctgaaatgtgtgggcccaaggcccccacctgctgtgacccccatgtccttggacctagaggattgtccaccttctgccaaggccagcccacacagcccgagccccttggggagcagtggccgggctggggaggcctgcctggtcaataaaccactgttcctgcagctgagagccctttgccctcacacagggtcagctctgggcaacaaagag

SEQ ID NO: 22087 - DNA, 303 bp, Homo sapiens
  SIMILAR (66)..(302): 981254mologous to Homo sapiens c394H11.1 (similar to SOX (SRY (sex determining region Y))),accession number Z99757,Smith- Waterman Score=431.
ggcgcagccacggggcgctgtggacggcaggcccctgctcccccaagtcctgccgcacaggcggttggagcttgctgagcgagagcgagaagcggcccttcgtggaggaggcagagcgccttcgcgtgcagcacaagaaggaccaccccgactacaagtaccagccacggcgcaggaagagcgccaaagccggccacagcgactccgactcgggcgcggagctgggaccccaccctggcggcggtgccgtgtacaaggctgaagcagggcttggagatgggcaccaccatggcgaccacacag

SEQ ID NO: 22088 - DNA, 2892 bp, Homo sapiens
  SIMILAR (1183)..(2073): 991254mologous to Homo sapiens c394H11.1 (similar to SOX (SRY (sex determining region Y))),accession number Z99757,Smith- Waterman Score=1634.
  misc_feature (1)...(2892): n = a,t,c or g
ctccctggatctaggggatgagggcccagaacgaggctggggtctggggttcagtggagcaatgaccaggaatcaggctgcgatctgtagtccaggtgtctggcgtcagacagcaccctcctgtacacggcacagctatactgcagggttagggacaggatttactgccaccaacggaagcgttgattccaagtctcagacacccgcccccaggctgggcctcccttaacggaaggtgacgctctctgggaggtccttggtgctcacctccctggctgcttggggccccagggctcctgcctagggatgttttggggctgcagaaggaccctctgcccattatcagacgagaagtgcagagagcaaatgcgtgctgttggcgccccccacccccacactgagtgtgtgagacggataggcccagccagaagcttggggacccgctcccagcctggagtgacggacgctgagcagcaggagcacagctgttcccgacacatccgtgatctgggcgtgcacctgtcactggggagagagcagtgctggtctccacgctttgggcatcgcctgctgcctgaatcctttccacatgcgaacagcctggtcaggggtcctcaccggtcagtagctactcccgccagcgcgggttcacggatcaggaggctcccagtgtgtcaggggagtgcgaggtgaagatggggagggctggtctggaatatgctcgccctccgtggaggtcgggggcatcaggaggaccaggaggacgtctgggctgcaggcagacgcctaacagatgagttccgcgggcgccccagggcatgctctgagggccacggaaggatgcggggacccccgagcggagggcagggcctccagggggaagaggcactgcagacggaggtgggtgcggtgcgctggcaggaagcggcagcacgacccccgactttgcatctggacttttctagtaacggaccagctccttctgccgaccgggccggggagaccgcgtggctcagtggctgcagcggccaccggcccgggcgtgggggctttgagggcaccggcgcgggcgcagccacggggcgctgtggacggcaggcccctgctcccccaagtcctgccgcacaggcggttggaggtgagcctcgggaagagtcccaaggagtgtgtcctgtggctcacttgctgagcgagagcgagaagcggcccttcgtggaggaggcagagcgccttcgcgtgcagcacaagaaggaccaccccgactacaagtaccagccacggcgcaggaagagcgccaaagccggccacagcgactccgactcgggcgcggagctaggaccccaccctggcggcggtgccgtgtacaaggctgaagcagggcttggagatgggcaccaccatggcgaccacacagggcagacgcacgggccgcccaccccgctcaccacccccaagacggagctgcagcaggcgggcgccaagccggagctgaagctggagggacgccggccggtggacagcgggcgccagaacatcgacttcagcaatgtggacatctcggagctcagcagcgaggtcatgggcaccatggacgccttcgacgtccacgagttcgaccagtacctgcccctgggcggccccgccccacccgagccgggccaggcctatgggggcgcctacttccacgccggggcgtcccccgtgtgggcccacaagagtgccccgtcggcctccgcgtcgcccaccgagacgggtcccccacggccgcacatcaagacggagcagccgagccccggccactacggcgaccagccccgaggctcgcccgactacggttcctgcagcggccagtccagcgccaccccggccgcccccgccggccccttcgccggctcacagggcgactatggcgacctgcaggcctccagctactatggtgcctaccctggctacgcacccggcctctaccagtacccctgcttccactcgccgcgccggccctacgcctcacccctgctcaacggcctggccctgccgcccgcccacagccccaccagtcactgggaccagccgaggagaaacggcagcacagcccaaggaccaaaggagggggtggcaggggccttgcagggcgctgtgaggtccaaggccggtcttggcgccgagaagcccctgcactcaaggccacattccctcgacaacggctgcacgggctgtccgggatccggggtgtctgtccgcagactgggatgagtctactcgagcatctccgggacctgcctgtcagatctgaggtgtctccttgctggcagagtgcgctcacgcgagggctggctgttgatgaacacatcttctcttttatttttatgtttttgataatttttattttttaaagcttaaatgtgtttcttctgaaagctgttaaagatgtatttatgttctgtgttattttatctttaattaatgaggtaattcgggcaaagagtagaatttaagacaaaacggaagctggggaagcttcccttgagggcaggcaggaggtgggagttgcagctgttggccggcatcacgttgctcgttgctcggcttatggggaggccgccctggagggcccggaggtcccaaggtccctgggaggactgggcccctcatgcctcgagcttggcaaccgaaaacccgagggaggagaagggacctgccttgagcttggcaaccgaaaacccgagggaggagaagggacctgccttgtgacatctctgatcaggttggggtgccccagcacaggtnaccagtttggggtttgggaagcaggattccgtccctgttccccgattgttgccacgtggtaggacacatagggacacagggatttctggggttctttgcccttga

SEQ ID NO: 22089 - DNA, 1762 bp, Homo sapiens
  SIMILAR (531)..(1118): 291254mologous to Xenopus laevis APEG precursor protein,accession number X51394,Smith-Waterman Score=138.
ctaagacacctccactcttggcaggtacatcagcgccccctgctgggccacagcacagttgcgtctctgggatgccccgtctgcccttctgaccacgtccagccagtgactgcgtccacgcatgtaccacagggatgctctgtcctcagcagggaggcctgggtcccggtacacaatgctcagtgtgcctgcgtaggtacgcccacgtgcaggtactgttattatcctcagacaaagaaactggggcacagagaggttgcgcagcctgccccaggtcacccagagtacgtgaacctgactgctggagccgcactgtgggggaaagtgctttaaacggcactggttcccgtgcagctgtgaagccagctgcctcatcagcagcacctcagcgctggtaacacacaggtttcctgaggttccggctgccccaggggcacaaggaagagagccttccatgccgatggggaaggggctgtgcgtggaggaagctgcatggaagctggccccatgggtctgcagtgtgtagacaagaagcaccagggggtgcacaatctggggaggcacgagtctttctccagagccaagtgggagcaattcttccccggccttggccaaatccagctcccagcgagccgggcagagccctctggcctcttccacaggaccgtgagtcttcccatccaggccaggccagcaggcctctgggcctgccaaaggcacccaggagccgagccgggccagcgaggggacgccgtgcagctgcttcccaggccgcagaccagcccccacggccctcaggatgctgctctctcctctgccccgcacccctggagacagctcaggcatcaccaggtctccaggaggcccccctccatcctttctgtgggcatcgcagcccttgtcccgtgccatggcaactgtctcccacagaccccattcaatccaggcctccagcaaggggatgggccccagcaaaccaggggcggccttctcacccacggtgtcgtggaggcggaggtgcattctgcggccacggattctatatacacagcccttgaccttcagacttgccagcatggtcttgtcgatccatccgaagcccccaaaggagacactgcgcttccggccaaacatggttgtggctgcagagcccggggtcccagcgatgtcccaacgacgtccccggggctgcacacgcttctcacatactgacaaagccccattggacacgtgcacagacatgaacgcatacacatgtgcccgcaggcactcatccacatactcagaccacatcacactgcaaggggcattcgcatgtacacacacatgggcacagagctgtacctgtcagccgccccccacccccgccgccaagtgtctagacagaggtcagagcagtggcatgcttcacgctggctgtgtggggtgggggggcggtacccatgtgcgggtggatttgtcttcccagctgaaccgcagggttcgtcctcatctctgcatgctcaggtgctggtcctcatgccacagggctagcgtgtcctgcacgcatcccagtctgcacaccacagggccagtgctcatctctgcacgcactggtgctgaccacacctggtacacagcaggcacttactaatggcagcccctcaaagggatgtggcacgtacactacaacagacactggggggagtgggcacagatagggccccaggccccaccctacccccaagcagtggagaaagggaagaaaacgtctcaaaaaaaa

SEQ ID NO: 22090 - DNA, 765 bp, Homo sapiens
  SIMILAR (1)..(225): 771254mologous to Homo sapiens Human secreted protein, SEQ ID NO: 8172,accession number G04091,Smith-Waterman Score=303.
atgggcaaagatttcatgacaaaaacatcaaaaacaattgcaatgaaagcaaagattgagaaatgggatctaagtaaactaaagggcttctgcacagcaaaagaaactatcatcagagtcaacaaacaacctatggaatgggagaaaatttttgcaatctatacatctgacaaaggtctaatatccagaatctacaagaaacttaaacaaatttacaagaaaaaacccaaacaaccaaacgtctttcctgtattgaatgaaatgacaattccagagacgcaaagcccagcctccaagttttacaaacctcagagtttgagctactttgacgaatcctctaaattcttgggtgtcaaaggcatgttactaaataggttgctaaaggcaccaaggaaaccaaaaaaggaaagagctctccctaaagtccaaaaatcccgccaagagagccccagagcagaggaaaatccaaagtggagagaggggaagaaagagaccagtgagtcatccgtccagaaggcggggagagcagcagcggcccaagcaggagctgcagcgagccgggtacctggactcagcggtagcaacctcgccccttgcaacaaaggcagactgagcgccagagaggacgtttccaactcaaaattgaaaatcctttcttctggaagaaaacatacggagcatgtgatcatgctcaaggcctgggggttgggcaggcaaagtctccgatgcagactctttgaccttatcccttcccataaggtatag

SEQ ID NO: 22091 - DNA, 1651 bp, Homo sapiens
  SIMILAR (403)..(927): 401254mologous to Homo sapiens osteoblast stimulating factor- 1,accession number AB004306,Smith-Waterman Score=231.
  misc_feature (1)...(1651): n = a,t,c or g
cggagtgcaaataccagttccaggcctggggagaatgtgacctgaacacagccctgaagaccagaactggaagtctgaagcgagccctgcacaatgccgaatgccagaagactgtcaccatctccaagccctgtggcaaactgaccaagcccaaacctcaagtccaaaaatcccgccaagagagccccagagcagaggaaaatccaaagtggagagaggggaagaaagagaccagtgagtcatccagtccagaaggcggggagagcagcagcggcccaagcaggagctgcagcgatgccngggtacctgggacttcagcggtagcaaccttcgccccttgcaccaaaggcagacttgagcgccagagagggacgtttccaactcaaagtaagatgcaggcttcaacagtaccagcagcagcgttcgaaaattttgcagctgccttcttggcatttcatttttcattactgggcagctgtgggatacttgctgaagcaggggaagaaagagaaaccagaaaaaaaaagtgaagaagtctgactgtgggagaattggcagttggagtgtgtgtgttgccccacccagtggagactgtgggctgggccaccacgggagggccactcggacctgaagctgagtgcaagcaaaaccatgaagacccagagatgtaagatcccctgcaactgggaaggaaggcaatttgggcgcgggagtgcaaaattacccagtttccaggcctggggggaatgtgacctggacaccagccctgaagacccaaaactggaagtttgaagcgagccctgcacaaatngccgaatgcccagaagactgtcaccatctccaaagcccttgtggcaaactgaccaagccccaaaaccttcaagcagaatcttaagaagaagaaaaaggaaggcaagaaaccggaaggaagattgcgggattaaaaggatggtcacctgtggggaccataaaaagggcatcagcccaacaggatcagtttaactatgggcatttatatgtaccgtaggctttgtattcaaaaatattctatagttaagtacccattaagcaaaacaaaaaggaaaagaaaatttttgtagtagcgttttttaaatgtatacttttaggaccagtgggggcttataataaaggactgtaatcttatttaggaagttgacttatagtacatgataaatgatatacgattgaggtaagttttttgaaattatgtgacattttacattaaattttttttacattttttgggcagcaaatttaaatgttatgactatgtaaacttacttctcttgttaggtaatttttttcccccctagatttttttcccaattgcgaaaaatatatacctaaacaaaatagcaatacaaacataatcactctatttgaagaaaatatccttgttttctgcccaatagattttttaaaatggtagtcagcaaatggggggtgggggaagcagagcatgtcctagttcaatgttgacttttttttttttttttaaagaaaagcattaagacataaaattctttcactttggcagaagcatttgttttcttgatgaaattatttttccatctgaggaaaaaaaatactaggaaaataaatcaaggtgatgctgaaaaaaaaaaaaaaa

SEQ ID NO: 22092 - DNA, 2305 bp, Homo sapiens
  SIMILAR (1)..(1962): 1001254mologous to Homo sapiens ribosomal RNA upstream binding transcription factor,accession number U65487,Smith-Waterman Score=3429.
atgaaatatattcaggacttccagagagagaaacaggagttcgagcgaaacctggcccgattcagggaggatcaccccgacctaatccagaatgccaagaaatcggacatcccagagaagcccaaaaccccccagcagctgtggtacacccacgagaagaaggtgtatctcaaagtgcggccagatgccactacgaaggaggtgaaggactccctggggaagcagtggtctcagctctcggacaaaaagaggctgaaatggattcataaggccctggagcagcggaaggagtacgaggagatcatgagagactatatccagaagcacccagagctgaacatcagtgaggagggtatcaccaagtccaccctcaccaaggccgaacgccagctcaaggacaagtttgacgggcgacccaccaagccacctccgaacagctactcgctgtactgcgcagagctcatggccaacatgaaggacgtgcccagcacagagcgcatggtgctgtgcagccagcagtggaagctgctgtcccagaaggagaaggacgcctatcacaagaagtgtgatcagaaaaagaaagattacgaggtggagctgctccgtttcctcgagagcctgcctgaggaggagcagcagcgggtcttgggggaagagaagatgctgaacatcaacaagaagcaggccaccagccccgcctccaagaagccagcccaggaagggggcaagggcggctccgagaagcccaagcggcccgtgtcggccatgttcatcttctcggaggagaaacggcggcagctgcaggaggagcggcctgagctctccgagagcgagctgacccgcctgctggcccgaatgtggaacgacctgtctgagaagaagaaggccaagtacaaggcccgagaggcggcgctcaaggctcagtcggagaggaagcccggcggggagcgcgaggaacggggcaagctgcccgagtcccccaaaagagctgaggagatctggcaacagagcgttatcggcgactacctggcccgcttcaagaatgaccgggtgaaggccttgaaagccatggaaatgacctggaataacatggaaaagaaggagaaactgatgtggattaagaaggcagccgaagaccaaaagcgatatgagagagagctgagtgagatgcgggcacctccagctgctacaaattcttccaagaagatgaaattccagggagaacccaagaagcctcccatgaacggttaccagaagttctcccaggagctgctgtccaatggggagctgaaccacctgccgctgaaggagcgcatggtggagatcggcagtcgctggcagcgcatctcccagagccagaaggagcactacaaaaagctggccgaggagcagcaaaagcagtacaaggtgcacctggacctctgggttaagagcctgtctccccaggaccgtgcagcatataaagagtacatctccaataaacgtaagagcatgaccaagctgcgaggcccaaaccccaaatccagccggactactctgcagtccaagtcggagtccgaggaggatgatgaagaggatgaggatgacgaggacgaggatgaagaagaggaagatgatgagaatggggactcctctgaagatggcggcgactcctctgagtccagcagcgaggacgagagcgaggatggggatgaggtggggcagacagggcacagtgggaggggaggggagtcctgccaggagggccacctggtgactccacatcctttctcaccccccagaatgaagaggatgacgaggacgaagacgacgacgaggatgacgatgaggatgaagataatgagtccgagggcagcagctccagctcctcctcctcaggggactcctcagactctgactccaactgaggctcagccccaccccagggcagccagggagagcccaggagctcccctccccaactgaccacctttgtttctcccccatgttctgtcccttgcccccctggcctcccccactttctttctttctttaaaaaaaaaaaaaaaaatacggtgggggtagggggctggaggagcccaggccaggactctgcagcctcagagacatcagcccttgggggtcctcctccagggacagcaactatcagactaagccagcaccggaccagcctggcccaccccacccacttctgcacttgcggttccggcatggacaatggaccggagagtgggggtggggggtcccaaagagtttgatgaggccctccacacctgcggcccaatccaaggtggggtggaagctt

SEQ ID NO: 22093 - DNA, 2492 bp, Homo sapiens
  SIMILAR (180)..(2363): 981254mologous to Homo sapiens autoantigen NOR-90,accession number X56687,Smith-Waterman Score=3764.
ctccgccgcgggagggagctgcggctgtgccggccgagcgggggagggcgccgccactcagagccagggagggagccgctggagcggaagcccggaggccgcgctgcgccggggtgaggtggctttgaccccgggttgcccggccagcacgaccgaggaggtggctggacagctggaggatgaacggagaagccgactgccccacagacctggaaatggccgcccccaaaggccaagaccgttggtcccaggaagacatgctgactttgctggaatgcatgaagaacaaccttccatccaatgacagctccaagttcaaaaccaccgaatcacacatggactgggaaaaagtagcatttaaagacttttctggagacatgtgcaagctcaaatgggtggagatttctaatgaggtgaggaagttccgtacattgacagaattgatcctcgatgctcaggaacatgttaaaaatccttacaaaggcaaaaaactcaagaaacacccagacttcccaaagaagcccctgaccccttatttccgcttcttcatggagaagcgggccaagtatgcgaaactccaccctgagatgagcaacctggacctaaccaagattctgtccaagaaatacaaggagcttccggagaagaagaagatgaaatatattcaggacttccagagagagaaacaggagttcgagcgaaacctggcccgattcagggaggatcaccccgacctaatccagaatgccaagaaatcggacatcccagagaagcccaaaaccccccagcagctgtggtacacccacgagaagaaggtgtatctcaaagtgcggccagatgagatcatgagagactatatccagaagcacccagagctgaacatcagtgaggagggtatcaccaagtccaccctcaccaaggccgaacgccagcctcaaggacaaagtttgaccgggcgacccaccaagccacctccgaacagctactcgctgtactgcgcagagctcatggccaacatgaaggacgtgcccagcacagagcgcatggtgctgtgcagccagcagtggaagctgctgtcccagaacgagaaggacgcctatcacaagaagtgtgatcagaaaaagaaagattacgaggtggagctgctccgtttcctcgagagcctgcctgaggaggagcagcagcgggtcttgggggaagagaagatgctgaacatcaacaagaagcaggccaccagccccgcctccaagaagccagcccaggaagggggcaagggcggctccgagaagcccaagcggcccgtgtcggccatgttcatcttctcggaggagaaacggcggcagctgcaggaggagcggcctgagctctccgagagcgagctgacccgcctgctggcccgaatgtggaacgacctgtctgagaagaagaaggccaagtacaaggcccgagaggcggcgctcaaggctcagtcggagaggaagcccggcggggagcgcgaggaacggggcaagctgcccgagtcccccaaaagagctgaggagatctggcaacagagcgttatcggcgactacctggcccgcttcaagaatgaccgggtgaaggccttgaaagccatggaaatgacctggaataacatggaaaagaaggagaaactgatgtggattaagaaggcagccgaagaccaaaagcgatatgagagagagctgagtgagatgcgggcacctccagctgctacaaattcttccaagaagatgaaattccagggagaacccaagaagcctcccatgaacggttaccagaagttctcccaggagctgctgtccaatggggagctgaaccacctgccgctgaaggagcgcatggtggagatcggcagtcgctggcagcgcatctcccagagccagaaggagcactacaaaaagctggccgaggagcagcaaaagcagtacaaggtgcacctggacctctgggttaagagcctgtctccccaggaccgtgcagcatataaagagtacatctccaataaacgtaagagcatgaccaagctgcgaggcccaaaccccaaatccagccggactactctgcagtccaagtcggagtccgaggaggatgatgaagaggatgaggatgacgaggacgaggatgaagaagaggaagatgatgagaatggggactcctctgaagatggcggcgactcctctgagtccagcagcgaggacgagagcgaggatggggatgagaatgaagaggatgacgaggacgaagacgacgacgaggatgacgatgaggatgaagataatgagtccgagggcagcagctccagctcctcctcctcaggggactcctcagactctgactccaactgaggctcagccccaccccagggcagccagggagagcccaggagctcccctccccaactgaccacctttgtttctcccccatgttctgtcccttgcccccctggcctcccccactttctttctttcttt

SEQ ID NO: 22094 - DNA, 3389 bp, Homo sapiens
  SIMILAR (1553)..(2221): 601254mologous to Cricetulus griseus putative,accession number L42571,Smith-Waterman Score=653.
ttagccgtcgctccgcttcgccatctcgggctttgtctggcgactcgctgccccggcgtcggctgcagcggagctgcggctcgactgttcggcccgccgtgctcccaggtgcccccggcctgcgctcccatccacacgctcggcggagggcgctgtgctttgtgcttttcgccgcgaggagcagcaggcagcagccacagccgccgccgccgccgccgccgccacagcagcagcagccgccgccccagcgccgccgcctcgcccggaggaggagccgctgccgccgcgggagggagctgcggctgtgcccggccgagcgggggagggcgccgccactcagagccagggagggagccgctggagcgggaagcccggaggccgcgctgcgccggcacgaccgaggaggtggctggacagctggaggatgaacggagaagccgactgccccacagacctggaaatggccgcccccaaaggccaagaccgttggtcccaggaagacatgctgactttgctggaatgcatgaagaacaaccttccatccaatgacagctccaagttcaaaaccaccgaatcacacatggactgggaaaaagtagcatttaaagacttttctggagacatgtgcaagctcaaatgggtggagatttctaatgaggtgaggaagttccgtacattgacagaattgatcctcgatgctcagttaacattttaaaaatccttacaaagggcaaaaaactcaagaaacacccagacttcccaaagaagcccctgaccccttatttccgcttcttcatggagaagcgggccaagtatgcgaaactccaccctgagatgagcaacctgggacctaaccaagattctgtccaagaaatacaaggagcttccggagagcaagaagatgaaatatattcaggacttctagagagagaaacaggagttcgagcgaaacctggccccgattcagggaggatcaccccgacttaatccagaatgccaagaaatcggacatccaagagaagcccaaaaccccccagcagctgtggtacacccacgagaagaaggtgtatctcaaagtgcggccagatgccactacgaaggaggtgaaggactccctggggaagcagtggtctcagctctcggacaaaaagaggctgaaatggattcataaggccctggagcagcggaaggagtacgaggagatcatgagagactatatccagaagcacccagagctgaacatcagtgaggagggtatcaccaagtccaccctcaccaaggccgaacgccagctcaaggacaagtttgacgggcgacccaccaagccacctccgaacagctactcgctgtactgcgcagagctcatggccaacatgaaggacgtgcccagcacagagcgcatggtgctgtgcagccagcagtggaagctgctgtcccagaaggagaaggacgcctatcacaagaagtgtgatcagaaaaagaaagattacgaggtggagctgctccgtttcctcgagagcctgcctgaggaggagcagcagcgggtcttggaggaagagaagatgctgaacatcaacaagaaagcaggccaccagcccccgcctcaagaagccagcccaggaagggggcaagggcggctccgagaagcccaagcggcccgtgtcggccatgttcatcttctcggaggagaaacggcggcagctgcaggaggagcggcctgagctctccgagagcgagctgacccgcctgctggcccgaatgtggaacgacctgtctgagaagaagaaggccaagtacaaggcccgagaggcggcgctcaaggctcagtcggagaggaatcccggcggggaagcgcaaggaacggggcaagctgcccgagtcccccaaaagagctgaggagatctggcaacagagcgttatcggcgactacctggcccgcttcaagaatgaccgggtgaaggccttgaaagccatggaaatgacctggaataacatggaaaagaaggagaaactgatgtggattaagaaagcagccgaagaccaaaagcgatatgagagagagctgagtgagatgcgggcacctccagctgctacaaattcttccaagaagatgaaattccagggagaacccaagaagcctcccatgaacggttaccagaagttctcccaggagctgctgtccaatgaggagctgaaccacctgccgctgaaggagcgcatggggtgagatcggcagtcgctggcagcgcatctcccagagccagaaggagcactacaaaaagctggccgaggagcagcaaaagcagtacaaggtgcacctggacctctgggttaagagcctgtctccccaggaccgtgcagcatataaagagtacatctccaataaacgtaagagcatgaccaagctgcggaggcccaaaccccaaatccagccggactactctgcagtccaagtcggagtccgaggaggatgatgaagaggatgaggatgacgaggacgaggatgaaagaagaggaagatgatgagaatggggactcctctgaagatggcggcgactcctcttgagtccagcagcagaggacgagagcgaggataggggatgagaataaagaggatgacgaggacgaagacgacgacgaggatgacgatgaggatgaagataatgagtccgagggcagcagctccagctcctcctcctcaggggactcctcagactctgactccaactgaggctcagccccaccccagggcagccagggagagcccaggagcttccctcccccacttgaccacctttgttcttcccccatgttcttgtcccttgcccccctggcctcccccactttctttctttctttaaaaaaaaaaaaaaaaatacggtgggggtagggggctggaggagcccaggccaggacttctgcagcctcagagacatcagcccttgggggtcctcctccagggacagcaactatcagactaagccagcaccggaccagcctggcccaccccacccacttctgcacttgcggttccggcatggacaatggaccggagagtgggggtggggggtcccaaagagtttgatgaggccctccacacctgcggcccaatccaaggtggggtggaagcttggggaagacccattccttcccagaggggcctgccacctggacccctgcattggaactggaggcagggaacatggggaggaggagggtcggtgccttcaagaaaacaggcactgccctggtggccctctcccctgccccctgcaggaaggagctgcctggacccgttcatgggggagggggcagaagtgttttttatatatgtgtatatatttttttttaagctctgagctgtcaacgagacgtttcctaccgaaaaa

SEQ ID NO: 22095 - DNA, 446 bp, Homo sapiens
  SIMILAR (219)..(37): 911254mologous to Homo sapiens unnamed protein product,accession number AX056873,Smith-Waterman Score=292.
  misc_feature (1)...(446): n = a,t,c or g
cgcccttctcccccaacctcgtcgatgctgggttatggggatatagtcgtccttgttcttctggggtcccggcttctgctcttcaagcttgatcccctgcattttctccagcatctcaaaganctccgacgacttcatggtgggaggtgccgtgagaggaggggagagcggccggtctgggagggtcgcatccgagctgttggcccagctcctgcttcttgaccttcagacttgccagcatggtcttgtcgatcctggagggagactcgaggtcagcccggctgaggatgcgatgctgctgcgggctgtagagccactggaaggctgtcagcgtcctctcctcgattcagaaccgcccttcctgcacgtaccagcgcaccagctgccagcgcttctcccccggcgcccggcggcccgccatgcctcgcccggccgctcccgcgaaa

SEQ ID NO: 22096 - DNA, 1506 bp, Homo sapiens
  SIMILAR (663)..(1160): 351254mologous to Chlamydomonas reinhardtii vegetative cell wall protein gp1,accession number AF309494,Smith-Waterman Score= 187.
ttgaccttcagacttgccagcatggtcttgtcgatctggaaggggagacagcgccgctgaggttctatttttacccccctgcatatgccagcccttatggctggcaagaagaggcccctcctccctctccagaggcagaaaggtggacagtgttcccactgtcagtatctcctcttgtggaagggtcgtgaccaccactgtcaccagcactgccaccagcaccaatgctgcctttgcaacatcacgattcgtgtcaccatcactgtccatgtcaccacatgtcatcatcagtgtcaccatcactgtcagcttcactaaaactgccactggctccagcatgctggagaccctggaggctctttccggcacccttctctggccagcccagcgctgcctcaggcttcccacagtcacagctgtcacccaccatccgaagcccccaaaggagacactgcgcttccggccaaacatggttgtggctgcagagcccggggtcccagcgatgtcccaacgacgtccccggggctgcacacgcttctcacatactgacaaagccccattggacacgtgcacagacatgaacgcatacacatgtgcccgcaggcactcatccacatactcagaccacatcacacagccatctaatcggcagggccctgactgtgccagagtcccccaagtgcccatgcctgctgccatctgcttgctgacccagacctggcagagcgcagccagcaggcccagcatggtccaagaaggaggccagtaatcctggatctgaactccccagcacagcctgtgacgccggatggctcctccggaacgcagtaccggctcgcgccgtccatacgtgccgatgtctgtcttctgcgccgcctggcgcgcggctgcctctggacccggagcgaagggcacctcagtccccgcggtcgccccctccctcggcccagccccctcctcctcctcctcctcctcctcctcctcctccggggcggcggggtccctcgcagcagtcctggcgcccctcgccgccgccgccgcgcacgcgcagccggagcccgcgccgatccagggtccggggtcctcgtgctcccgccctcgccgcgcctccgccacccggggcgcgccctggtccctgtgccgctgcctgcggatcgcccactggctgctcatgatctcgatgccctgtgtgagtttcttcagcacgctggtcatattgggaaattctcttgtctctgcgtttacatgtttatcgtctgtctctcccactagaatgtgtggcccatggaggcagtaccctggtcttccttgagggcttcctaagtaccagctgagaggcctggagggagactcgaggtcagcccggctgaggatgcgatgctgctgcgggctgtagagccactggaaggctgtcagcgtcctctcctcgattcggaaccgcccttcctgcacgtaccagcgcaccagctgccagcgcttctcccccggcgcccggcggcccgccat

SEQ ID NO: 22097 - DNA, 5244 bp, Homo sapiens
  SIMILAR (2003)..(2101): 931254mologous to Homo sapiens KIAA1200 protein,accession number AB033026,Smith-Waterman Score=159.
atgtcagaggagcgtcgaacacagagatttcaggggcctcagatcccaagcaaaccgcagcaggaggcagggcaggggaggcagaaagaagcccagcagggctttcagaagacaagcctggaccgctcttatggtgtgacaacaggactccgcttttcacagcctgtacagccaagccacctagagatttctaaacaacaagggaacttagtccaagaagtcctgtggacagccagatctgatacagttgccgataagaccaagctgcctcactctactgcccttacccaggtctttccttatgacatcagagtccccaacatcatcggagaccctcctcagaaactggaagggaatccaagccccgggcgcaccacctatctaatctgcggctggatctcgaaccggggcagcagcctcgaaaccgaaagcaaagaggaagcgggatctgctacagccccaagtccggtcgcccagtcttcccctcaccgtccccatcgcccgcgccctccgcggtcggagctgccggcccctcgcggccacctctctgggcggcggaaaggcctctctgcgggcatagggggcacctaccggcccgggctacctgagggccacagaccacgtggtgtggcagacccactatgtgccagcactgtggacctgcggtcagttcatggaaacagccatcccacgacccctgctgccggggaggggagaaccggcggcagcccgggactccggcgagagcgacgcaaggtcggctgcggcggcggcccgagggcgcccgtgtgcccagtgcgcggcggggacggccgcgagctcgctggagggataaagagagaaataacacatgcgtcgcaatgctttgacaagttacaaactctactgcaaatggctccccagaataatccagaagtcgattccatcatggcagaactcaaggtggaggcgccggccagcgtagactggcagaaacgctgcctgaccctggaaactcagcttttccggttccgcctacaggccagcaagataagggagctgctggctgacaagggacatggcacctacatctcccctttctctctggccaagcagatgcaggagctggagcagaggctgctggaggcagagcagagagcagagaacgctgagacccaggtgggtgtcatggaagagaaggtaaaactatccaatctgaagaatgtggactctgaggggagcctgcaccggaaataccaagaattgctgaaagccataaagggcaaagatgagctcatcagccagctagaggctcagctggagaagcagaagcagatgagggcagaggaagcaaaaactgttcaagaaaaagctgcaaagatcaaggaatgggtgacactcaagttggcaaagatagctccttcacggaagctgctggtgcccccctacggagctgcagagcaggattctgtcccttcagagccgggaatccagcctatgggccaggacagtggctcccaggcccagggtctgaaggcagctgtgcttgcaccttccccaggtgccctgcagagcaaggactctgtttctgaagcagcaagccccttggaggattctagttccagcacggtccattctggggaaacagtagaggccaagccccttcaacctcatctgggaagagagagccctccccaccagccatgcatgaagcttcttaccttcagatgtagttcagcttcctggggtgagggtctggttactgctcagagagggatgctccctgggacaaagacctctgccagggaaggtggtcctggcagcagtctgaccctaccaaaggtgcgggctcctggcaccccgcgggacagcatccagttggccaaaaggcaccacagccagccccaggtgggccatgggcactttggccgtgtggtgaacattgagactgaggccttctcagccctccacccctctggccttcctgagctggagtcccgagctaggtcccgggaggaacgcagagaagatggagatggaggagccacccccagcagggaagaatgaggaaagagagagcccaaaggcccttggagctgagctggaggaagttagagctgggtaacaagccacctacacccccgctgcaccagttttcatcctggctaggccccaaggacccaagaatcagccaaaagaatgctcagtggagcaaacagatccagaaggtgcagggaaccctgtgggttgtttatgagcagtcagggccattaggaaaagctcctttggcctgtggcctacttcagacccaggggccccctcaggacgggcattctcccagtgtcttctgcatgggggagagccggatctatgctgtggccacatcgggcatgcggctctcagatatgtctcccagaagtaatactgcatgctgcggtgagttccaagtgaggcttggaggcaccaaacacccaagccagccaccatatctccacaacgagggcttgtggggggtcccatagccgtatgatttgtaactcacatctgcaacagtggaacactgtgcaagcctcatggaggataatttggttaaagagagctacacagatcagcaacatgccctttatggacgagtcctctgggtctgacgatgactgcagctctcaggcgagtttccgaatctcggtcccctcctctgagtccaggaagaccagcggactaggcagcccccgggccatcaagagaggcgtctccatgtcctcactgagctccgagggtgactacgccatccccccggacgcctgctcactggacagtgactactcagagcctgagcacaaactgcagcgcacctcatcctactccaccgacgggctgggcctgggcggggagtcactggagaagtcgggctacctgctgaaaatggggagccaggtgaagacgtggaagaggcgctggtttgtcctgagacagggacagattatgtactacaagtccccgagtgatgtcatccggaaacctcaaggccaagtggatctgaactcccgctgccaaattgttcgaggggagggttcacagacgtttcagctcatctctgagaagaaaacctactacctgacggccgattcacccagcctgctggaggagtggatccgagtactccagagcctgctgaaggtgcaggccaccgggcctccagctctgcttcggggtggcaccaagcccaccgtgaagggctggctgaccaaggtaaagcatggccactccaaggtggtctggtgcgctcttgttgggaaaatcttctactactatcggagccatgaggacaagcgacccctgggctgcctgcctgtgcgggatgcgcacatagaggaagtagatcgatcctgtgactcagacgaggactatgaggctggaggaaccagacggttgctttcctcccactgcaccctggtgatccaccccacagagcacagccccacctacctcctcattggcaccaagcatgaaaaggatacgtggctctaccacctcacagtggctgcaggtggcagcagtgccaaggtgggcactgcctatgagcagctcattggaaaactgatggatggtgaaggagatccagattcgccgctctggaggcaccccatgctgtgctacagcaaagacggcctatacgcctccctcaccaccctgccctctgaggccttgcagacggaggccctcaagctcttcaagtcctgccagctcttcatcaacgtgccggtggaagctgcctcggtggactaccatgtgtccctggcccagaccgcactgcaggtctgcctggttcaccccgagctgcagagtgagatctactgccaactcatgaagcagaccagctgccgcccacctcagaagtactccctcatgcaggtaggcatgccaggggtggagcagctgacagaagccattggcaagggctgccagcatcacttcctctggtatgtcaagcagcagctccaacgccatgcagatcccagaagtgaaactggccagtatgccacctactgccagcgggcagtggagcggaccctgcggaccggggagcgggaagccaggccatcgcgcatggaagtggtgtccatcctgctgcgtaaccccttccaccactccttgcccttcagcatccccgtgcactttaccaacgggacttaccatgtggttggttttgacggctcttccacggttgatgagttcctccagcggctgaaccaggagataggcatgagaaagccatcccactctggctttgccctcttcacggacgatccctcgggcagggacctggagcactgcctgcagggaagtgtcaagatctgtgatgccatctccaagtgggaacaagccatgaaggagctgcaccccggaaagtctgagggtgggacacgcgtcgtgaagctgatgtacaagaacaggctgtactttcgcagtcaagtcaaaggggagacggaccgagaacggctgctccttgcctctcaaaccagtagagagatagtggcagggaggtttcctatcaacaaggaattggctcttgagatggctgccctgatggcccaggtagaatatggggacttggagaagcctgccctgccaggccctggaggcacatcccctgccaaggctcagcatcttctccagcaggtcctagacaggttccaccccaggcgctatagacatggggcccccgctgaacagctgaggcacctggcagatatgttgaccacaaaatgggcaacattgcaaggatgctcccctcctgagtgcatccgcatctacctgaccgtggccaggaaatggcctttctttggtgctaaactttttgctgctcagcctgcccagctgtcttccaaggagaacgctctggtgtggattgctgtgaatgaggatggcgtcagcatcctggaccacaacactatgcaagtgcacatcacttacccctactcttcagtgacaacgtttggtggctgcagggatgacttcatgcttgtgattagatctatcccagacaagagctctggaaaaagccacattgagaagttgatcttccggatggctgctcccaagattgcagaagctaccttcatcatggccagctatatgaaccattgcactacaactgtgaacccccccaccaacccacccggagcctgccagctgtgggaactggatggacgacagttcttttcttctgtttcctgtgctaccaaggggccaacgttgctgtga

SEQ ID NO: 22098 - DNA, 205 bp, Homo sapiens
  SIMILAR (5)..(205): 801254mologous to Homo sapiens elongation factor 1 alpha- 2,accession number X70940,Smith-Waterman Score=317.
  misc_feature (1)...(205): n = a,t,c or g
ncggggcatctccaagaatgggcagacgcgggagcatgccttgctggcctacacgctggagccggcttacagcgagaagcgctacgacgagatcgtcaagaaagtcagcgcntacatcaagaagatcggctacaacccggccaccgtgccctttgtgcccatctccggctggcacggtgacaacatgctggagccctcccccaac

SEQ ID NO: 22099 - DNA, 6189 bp, Homo sapiens
  SIMILAR (5741)..(5872): 331254mologous to Homo sapiens dJ697K14.6 (probably 5' part of dJ697K14.7 and dJ697K14.11),accession number AL121829,Smith- Waterman Score=46.
tacatcaagaagatcggctacaacccggccaccgtgccctttgtgcccatctccggctggcacggtgacaacatgctggagccctcccccaacgagggacaccagtgtttgctgctcacctctgacagccagacaagggctgtgctcaggggcagctcggctgggcacacagtaggtgctttagcggacagcactgaggcccccagcaagaagcccatgagctcctccccctcccgcagtgccgccgacatctacatccgggagtatttccacagccacgtcagcggcggccaccccgaggccactcctctccgtgtgatgtacacggaccggccgctgagccagacggacccagtcacgctgcagtactgttgcctgaccgacgaccgccaggctttccgcccgcccacacgggcagagctggcgcggcaccgcgtggtggtcaccaccacctcccaggcccgtgagctcagggtgccggtcggcttcttctcccacattctcatcgatgaggcggcccagatgctggagtgcgaggccctcaccccgctggcctatgcctcgcacggcacccgcctcgtgctggcgggcgaccacatgcaggtcacaccccggctgttcagtgtggccagggcccgggcggccgagcacacgctgctgcaccgcctcttcctgtgctaccagcaggagactcacgaggtggcgcggcagagccgcctggtcttccacgagaactaccgctgcacggacgccattgtcagcttcatctcgcggcacttctacgtggccaagggcaaccccatccacgccaggggcaagggtccgccccacccccggcactacccgctcatgttctgccacgtggcgggcagcccagaccgggacatgtccatggcgtcctggctgaatctggctgagattgcgcaggtcgtcgagaaggtgcaggaggcctacaacacctggcccagctgctggggcggccgcgagcagaggtgcatctgtgtcgtttcccacggtgcccaggtcagtgcactgaggcaggagctgaggaggcgggacctaggccaggtgtctgtcggcagttttgagatcctgccagggcggcagttccgggtcgtggtgctcagcactgtgcacacctgccagagcctgctcagccctggggcactggcccctgagttcttcaccgacgcccgcgtgctcaacaccgtcctgacccgcgcccagtcccagctggtggtagtgggggacgccgtggccctctgctccttcggggcctgcggcaagctctgggagagcttcatccgtgagtgcgtggagcggcacagtgtctgccccgagggcctgtccatggagcaggtcgagcagggtgtggcgcagagacggcgctggcctccccgaggcacacaggctggggcagcggggaactgggaggctgccccagagccagtaggggacctggccgaggagcaggcggctgtggtgacggccatggtgaaggcagagccgggagatgaggctctgagcccagcatcccgtgacatcacggcaaccacagcgcagacggaggctgcggcagcaccagcaggagacgcagtgaaggaagacgtggtgcccggggcctgtgcggcaggagcggctgctgcagcgggcgtggagtccacggaggctgaagatgcagaggctgacttctggccgtgggacggggagctcaacgctgacgacgccatcctacgggagcttctggacgagagccagaaagtgatggtgaccgtcggggaggacgggctgctggacactgtcgccaggcccgagtccctgcatcatgcccggctgtacgataacctgcccccggctgcgctacggaagctgctgcacgcggagcccgagcggtaccgccactgctctttcgtgccatataccttcgagcgggcgtcagccatcccgctggacgatgcctcctcgggccccatccaggtcaggggccgcctggactgtgggatggccttcgccggggatgaggtgctggtgcagctcctttcgggagacaaggcgcccgaggggcggcttcggggccgcgtgctgggcgtgctgaagaggaagaggcacgagctggcgtttgtgtgccgcatggacacgtgggacccgcgcatcatggtccccatcaatggctccgtgaccaagatcttcgtggccgagctgaaggacccatcgcaggtccccatctacagcctccggaagggccggctgcagcgtgtggggcttgagaggctcaccgccgaggcccggcacagccggctcttctgggtccaaattgtcctgtggcggcaaggcttctactacccgctgggcatcgtccgggaggtgctgcctgaggccagcacctgggagcagggcctccgcatcctcggcctggagtacagcttgagggtgcccccgtcggaccaggccaccatcaccaaggtgctgcagaaataccacacggagcttggccgggttgccggccgccgagaggactgccgcgccttcttgaccttcactgtggacccccagggcgcctgcaacctcgatgatgccctcagtgtccgagacctgggtcccaggtgcgaggtggctgtgcacatcactgatgtggccagcttcgtgcccagggacggggtgctggacgtggaggcgcgaaggcagggcgctgcgttctatgcccccggcagggagccagtgcccatgctgccggccagcctctgccaggacgtcctcagcctcctgcctggccgggaccgcctggccatctccctgttcctcaccatggagaaggccagtggccagttgaagagcttgcgctttgcaccttccgtggtccagtctgtctgccagctgtcatacgaggagccggaggaggtgatcaggcagctcccgggtgccggccgtgagatgaaaaacagcttggactccgtggacgcttgcgtcgtggccgcgtgctacttctctcggctgctgcgccggcaccgcctgcggtcggactgcttctatgagcagccgcacgagcccggcaccctgggcttccgcgcggcccacatcatggtgaaggagtacatgattcagtttaataggctcgtggctgagttcctggtgggcagcgagtgcacgcggacggtcacgcctctgcggtggcagccagcaccccgcagccagcagctcaaggccctgtgtgagaagcatggggaccgggtgcccctgtcactgcacctcggccaccacctgcacggcggcgggggcagtccccccgacacgcggctgcacctcctggcctccctctggaagcaggtccagtttgctgcccgcacccaggactacgaacagatggtggacttggtcaccacggacgacatgcacccattcctggctcctgcaggccgcgacctccgcaaggccctggagcgctcggcgttcggccgctgcgcccggggccaccagcagcagggcggccactactcgctgcaggtggactggtacacgtgggccacctcgcccatccgcaggtacctggacgtggtgttgcagcggcagatcctgctggcgctgggccatgggggctctgcctactctgccagggacatcgatgggctctgccaggccttcagcctccagcacgcacttgcccagagctatcagcggcgggcgcgcagcctgcacctggccgtgcagctcaaggcccagcctctggacaagctgggcttcgtggtggacgtggaggcgggctcccgctgcttccggctgctcttccccagcaaccgggagacgctgcctgacccctgccccgtcccctacggctccctgcagctggccgagcacccccacgccctggcaggccggccgggcctgcggctcctgtggcggcgccgtgtctactcagcgcagggatccagcccgcccctgccactgcctggcactgtgccggacccacacaccctggccgtggagacggccctgtggaagcagctgctggagctggacagagcctggaatgatgcagccaatcacagagtgacttatcacctttctgtgttctatgggctggacacaaaccgtagtgtttctcggaggaaagtactcaaggctgcgactcaccagggattacctgaggttgtatccacccaggagcccaagtccctggactcctatggggcagacgcagccacagaccagggtcctcctgagaggccctctccacaggctggggagaactgtttggccccgaccctgggcccccacctttccttcctcctcacacctgccagcaggccagcccctcacactcccagcaaaatgggcaaggagaagacccacatcaacatcgtggtcatcggccacgtggactccggaaagtccaccaccacgggccacctcatctacaaatgcggaggtattgacaaaaggaccattgagaagttcgagaaggaggcggctgagatggggaagggatccttcaagtatgcctgggtgctggacaagctgaaggcggagcgtgagcgcggcatcaccatcgacatctccctctggaagttcgagaccaccaagtactacatcaccatcatcgatgcccccggccaccgcgacttcatcaagaacatgatcacgggtacatcccaggcggactgcgcagtgctgatcgtggcggcgggcgtgggcgagttcgaggcgggcatctccaagaatgggcagacgcgggagcatgccctgctggcctacacgctgggtgtgaagcagctcatcgtgggcgtgaacaaaatggactccacagagccggcctacagcgagaagcgctacgacgagatcgtcaaggaagtcagcgcctacatcaagaagatcggctacaacccggccaccgtgccctttgtgcccatctccggctggcacggtgacaacatgctggagccctcccccaaccacaccccagctagctgggggtctcctggggtcacaatcttagacaccccaaggtgcccctccttcaccttcaggaagatgctggaggaagacaccctttccatcctcctcatctccacccccacggagcctaggcaaatagtcattagctttgcctatggaccgccctgctccaccacgagccctgccctccaggaactgctgaaggggtctgtcctccacacctggggtgactgtgagccccttcccatcacaaaggctgcttgccccccaaccactgctcaggacaagcggggcagcccacagcggacactgctgttttcctaccacacctgccggcccggggcccatcagctgtccctgaatgaatgcgtggatgaacgaatgaatgaacagatagccacggacatgcgatttccaactcaaaatcctgccgttgttctggactccccagctgggggcgaggcaggctctgactccgaggccgagatcttgtcccagaagaaggacaggaaggccagccgcctcctgaggaacggctccatcccccggggtcaccacgctgggcccgagggccatgggagcccgcgagcccggaagaggaactggcagggccgggcaccacagtccaacagccgcccgtgcccacggagaagtgggggttccacggagaagcgctgctgttcagcacctgcagtggttgccaagcctgagctgcactcaggagaccacctccttctgcgctgctgccccctctggcgtagcctcctggacttctgcgaggctcagcagaccctcgtgcctgccggccagggccggtgtctccggctgcctgtgtggggaggggagggccgtgcctggtgtggtggggacaagccacagctccagagctgctccggtgtcaccaggctggccaagtccaaagtccctgaggccaccagccttgactgtcctgctggtcccacttttaaagctgctccccaggaccccctggccgctgtggactggggtccctccgcacctggcccatttgtggctgcgtccacaggggctcctgtggcctcccagagccagctcgggggtcagatggtcgcgggggctatggtcactgtgggaaaagaggttctgggcatctgtggagggaggggtggagcatggagtctccaggactgtggccccgttggtgtgctggacgggccctgccttgaagaccatgtctattcttggaccgtcatgaaataa

SEQ ID NO: 22100 - DNA, 1871 bp, Homo sapiens
  SIMILAR (233)..(469): 831254mologous to Homo sapiens elongation factor 1 alpha- 2,accession number X70940,Smith-Waterman Score=326.
tttcgtggcggtgcactgcgccgccaccgtcaataggtggaccccctcccggagataaaaccgccggcgccggcgccgacagtccctctggctgagacctcggctccggaatcactgccagcccccctcgccctgagccagagcaccccgtgtttccgccagcccctcacactcccagcaaaatgggcaaggagaagacccacatcaacatcgtggttcatcggccacgtgcgactccggaaagtccaccaccacgggccacctcatctacaaatgcggaggtattgacaaaaggaccattgagaagttcgagaaggaggcggctgagatggggaagggatccttcaagtatgcctgggtgctggacaagctgaaggcggagcgtgagcctggtcatcaccatcgacatctccctctgggaagttcgaggaccaccaagtactacatcaccatcatcgatggccccgggccaccgcgacttcatcaagaacatgatcacggggtacatcccaggcggactgcgcagtgctgatcgtggcggcgggcgtgggcgagttcgaggcgggcatctccaagaatgggcagacgcgggagcatgccctgctggcctacacgctgggtgtgaagcagctcatcgtgggcgtgaacaaaatggactccacagagccagcctacagcgagaagcgctacgacgagatcgtcaaggaagtcagcgcctacatcaagaagatcggctacaacccggccaccgtgccctttgtgcccatctccggctggcacggcgccaacatgctggagccctcccccaacatgccgtggttcaagggctggaaggtggagcgtaaggagggcaacgcaagcggcgtgtccctgctggaggcccctggacaccatactgccccccacgcgccccacggacaagcccctgcgcctgccgctgcaggacggtgtacaagatttggcggcattggcacggtgcccgtgggccgggtggagaccggcatcctgcggccgggcatggtggtgacctttgcgccagtgaacatcaccactgaggtgaagtcagtggagatgcaccacgaggctctgagcgaagctctgcccggcgacaacgtcggcttcaatgtgaagaacgtgtcggtgaaggacatccggcggggcaacgtgtgtggggacagcaagtctgacccgccgcaggaggctgctcagttcacctcccaggtcatcatcctgaaccacccggggcagattagcgccggctactccccggtcatcgactgccacacagcccacatcgcctgcaagtttgcggagctgaaggagaagattgaccggcgctctaccaagaagctggaggacaaccccaagtccctgaagtctggagacgcggccatcgtggagatggtgccgggaaagcccatgtgtgtggagagcttctcccacgtaacccgtcatcggaccactcccgtgcgcgacatgagacagacggctgcccgtaggcgtcatcaagaacgtgcagaagaagagcgtcggcgccggcaaggtcaccaagtcggcgcagaaggcgcagaaggcgggcaagtgaagcgcgggcgcccgcggcgccgaccctccccggcggcgccgcgctccgaaccccggcccggcccccgcaccgcccccgcggcgcgcgccgctccggcgccccgcacccccgccaggcgcatgtctgcacctccgctttccagaggccctcggtcagcgactggatgctcgccatcaaggtccagtggaagttcttcaagaggaaaggcgcccccgccccaggcttccgcgcccagcgctcgccacgctcagtgcccgttttaccaataaactgagcgaccccaaaa

SEQ ID NO: 22101 - DNA, 1026 bp, Homo sapiens
  SIMILAR (394)..(834): 801254mologous to Homo sapiens neuropathy target esterase,accession number AJ004832,Smith-Waterman Score=608.
atggaaggggagacacttaagatacagacaccagtaggtgccaaactatggactgaactttcccctatatgtccccctccaccctcgaaactcagagatctggagggcgcagggatatcggctgggtttggggggcttggagggaaagacacagagggggcgtcagtagcacctcggacagcaccatccctgtccatggtgctgacagctcgaggcactgacagtcgcatccaagagttccggctgtcagggtggctggcccagcaggaggatgcacaccgtatcgtactctaccagacggacgcctcgctgacgccctggaccgtgcgctgcctgcgacaggccgactgcatcctcattgtgggcctgggggaccaggagcctaccctcggccaggagggcgcgggccccacgcgcaccgtggagtggctaaatatgcgcagctggtgctcggggcacctgcacctgcgctgtacgcgccgtctattttcgcgccgcagccttgccaagctgcatgagctctacgagaaggttttctccaggcgcgcggaccggcacagcgacttctcccgcttggcgagggtgctcacggggaacaccattgccctgggctgctcgcacatcggagtactaaaggcattagaggaggcgggggtccccgtggacctggtgggcggcacgtccattggctctttcatcggagcgttgtacgcggaggagcgcagcgccagccgcacgaagcagcgggcccgggagtgggccaagggcgaccgctccgactgcacttacatcgtgctcaatgggcggctgcgtagcgtgatccagcgaggcattggcaagaaggagctggtgggcgagtacgtccgcggcgacctcatcggcgtggtggaggcactgacccggcagccgcgagccacgacggtgcacgcggtgcgcgacacggagctggccaagcttcccgagggcaccttgggtcacatcaaacgccggtacccgcaggtgcggcctgttgtgggcggggcatag

SEQ ID NO: 22102 - DNA, 396 bp, Homo sapiens
  SIMILAR (202)..(396): 921254mologous to Homo sapiens neuropathy target esterase,accession number AJ004832,Smith-Waterman Score=302.
atggaaggggagacacttaagatacagacaccagtaggtgccaaactatggactgaactttcccctatatgtccccctccaccctcgaaactcagagatctggagggcgcagggatatcggctgggtttggggggcttggagggaaagacacagagggggcgtcagtagcacctcggacagcaccatccctgtccatggtgctgacagctcgaggcactgacagtcgcatccaagagttccggctgtcagggtggctggcccagcaggaggatgcacaccgtatcgtactctaccagacggacgcctcgctgacgccctggaccgtgcgctgcctgcgacaggccgactgcatcctcattgtgggcctgggggaccaggagcctaccctcggccag

SEQ ID NO: 22103 - DNA, 1261 bp, Homo sapiens
  SIMILAR (665)..(781): 1001254mologous to Homo sapiens neuropathy target esterase,accession number AJ004832,Smith-Waterman Score=196.
acaaacgccaacaccctgtctaacaaaacacccaacgctccaacaaacgctacgccaaaacacagcagatacaggacaacagaggagaagaaccacagaaccaccaacagagaaaacaaacaaaacgacagccaaaaaaaaacagaaaaaccccaaacaaggcaacaacacggcgacgacacaacgcaacaacacagacaccagacccacagtctcatggctgtcaatcagcgaagcaggccctgctacctgcatctgccccttcaccgaactaagtttgctgccagacatggacattggccgcaattggctgcccgtgcatagctgtgtcattattcctcccctgtcactgccaatcattgttgcctggttatattccaccaccctggccatcattgtgttgccacgtcattccaggtcaccacatccttgcttcattgcattgccctgccattatgtttacatgcccaatgtccccccgaacaacccccgacctatagcaaaccccggcttggacctgcttgcccacttgtacccgggggcctatggtcctttgcattcccccgtggacattacctggcttataccaaggaacaaatggctaggttggacccctgatacttcccggtgggaacgacttgacacattgttgttcacgaacgggagcatgacttcggtgctggaacctgtgttggacctcacgtacccagtcacctccatgttcactgggtctgcctttaaccgcagcatccatcgggtcttccaggataagcagattgaggtacgccacctcatcccctggcctgcataccgcaaccaggaagagacccagaaccaacagcaatcaaaaccgggcaacgaaaaaacgcagcgtgaaaatggggagagaatgaaagaaaagtacggtgtgtttcgtagtggccacaatgaagctgttagtcattacaagttgctgcttcagcaaaacaagaaatttcaaaacttgatcaagaaaccaacaataaactaccagcagcaaatgaacgctactaccaacacctttcctctccaaataacagcaaccaccgatggtcatcattccactggtcaccaagcatctccagaatttccagctgaaaacaatccaccaccaacgaacaacattaaacaccaaccgccaccaccaccagcccacctgcaagagccattatcaccacgaacctgcaacaagaaacagccacaaccaccaccacaaccaatgacaccaacaacccagcaatga

SEQ ID NO: 22104 - DNA, 2517 bp, Homo sapiens
  SIMILAR (2139)..(2312): 251254mologous to Homo sapiens C2H2-type zinc finger protein,accession number U95992,Smith-Waterman Score=43.
atgctgaggggctgctcgcacatcggagtactaaaggcattagaggaggcgggggtccccgtggacctggtgggcggcacgtccattggctctttcatcggagcgttgtacgcggaggagcgcagcgccagccgcacgaagcagcgggcccgggagtgggccaagagcatgacttcggtgctggaacctgtgttggacctcacgtacccagtcacctccatgttcactgggtctgcctttaaccgcagcatccatcgggtcttccaggataagcagattgaggtcttgccccagaagctgcgggcacatccacgcctgaaatgctggcgctcagtcctggtcaggaacccaggccacaaaggcctgagacccgtttatgaagagctcgactctgactccgaggacctagaccccaatcctgaagatctggacccggtttctgaagacccagagcctgatcctgaagacctcaacactgtcccggaagacgtggaccccagctatgaagatctggagcccgtctcggaggatctggaccccgacgccgaagctccgggctcggaaccccaagatcccgaccccatgtcttcgagtttcgacctcgatccagatgtgattggccccgtacccctgattctcgatcctaacagcgacaccctcagccccggcgatccaaaagtggaccccatctcctctggcctcactgcaaccccccagccttccgccgacagctccgggctgagccagcatcgacgcacgcacagcggcgagaagccgtaccgctgccccgactgcgggaagtccttcagccacggtgccaccctggctcagcaccgtggcatccacactggggcgcggccgtaccagtgcgcggcctgcggcaaggccttcggctggcgctccacgctgctgaaacatcgcagcagccacagcggggagaagccgcaccactgcccggtgtgtggcaaggccttcgggcacggctcgctcctggcacagcacctgcgcacgcacggcggcccgcggccccacaagtgcccggtgtgcgccaagggcttcggccagtgctctgcgctgctcaaacacctgcgcacgcacacgggcgagcggccctacccgtgtccgcagtgcggcaaggccttcgggcagagctcggcgctgctgcagcaccagcgcacacacacggccgagcgcccctaccgctgcccccactgcggcaaagccttcgggcagagctccaacttgcaacaccacctgcgcatccacacgggcgagcggccctacgcctgcccgcactgctccaaggccttcggccagagctcagcgctgctccagcacctgcacccccttggaccatccaagcgtccttgggacctgcacaacacccgtgaaacccatgggacttcttgggtgccacggtgcaacatcatggcccgggaatccacaaggcttcccaagacacacctttacccacgtgcctcccaagaagtcgccaacccaaccaagaacgcgtacattcccatgcttgtgcaaataccattaaccttggaagaccccagaaaaagaggccaatgggagcgctacacaacggccaaaaccgcgcccactaggaggactatccatgctatggaaagaaatgttcttgagccagataccaacgtggctccctccttccctaacttcctttactcgaatgtcatcctctcacgggacccacccgatcacaccctcctggacacttcctacccatgttacctgctggtgacctgtcttgttcatggctatatccgcacagcctggcagaaaacagagaatctgttttcttcctaccagcagtgtatgaaggtcctgaattgctccgtcttctcaccgaaatacgtgaacagccaatcacatcagttcctgctgacaaatcccctggctccaccccctgctgacagtgtacaagattcccccaagagctcagttgtcagagcctcatccacctgccgctggccacagccccgtcgctacacatcccaagccttcgggagcagctttggggctgacaccactctctcaaaggaactaaaggattcgggagccaagaagaaatctttgcaggagacagacaaacactggcagtggctgacttggagaaccctggaaattttcaccatgaaaggttcccggcgcccaagaagccccagtgattcctgcaccgaatccaagagcgaccacgcaggagagagcggctccagcggcacgccatcaaatgccccaaaacgccagaaagtggaggagctgggtcctcatccaggtgcagaaccagctccggtacagccagctccccagcaccctgcacagctgcccctggagctgccccagcggacaaaaagccggtcagggggacaaaggcctgcggccgcgcctgcgcgcaagcctttggggcgctcccggtaccccggcctggccccgccccctggcgcggcgcgccgacgtcgcggtgacgtcacggagttgccatggcgtcgctga

SEQ ID NO: 22105 - DNA, 2027 bp, Homo sapiens
  SIMILAR (396)..(740): 931254mologous to Homo sapiens neuropathy target esterase,accession number AJ004832,Smith-Waterman Score=550.
gagaggagtcagattgtctgacagagtatgaggaggacgccggacccgactgctcgagggatgaaggggggtcccccgagggcgcaagccccagcactgcctccgagatggacgtgagcctgcacttcgtgctctggggctgcctgcacgtgtaccagcgcatgatcgacaaggcggaggacgtgtgcctgttcgtagcgcagcccggggaactggtggggcagctggcggtgctcactggcgaacctctcatcttcacactgcgagcccaacgcgactgcaccttcctgcggatctccaagtccgacttctatgagtatgacagcccgaagttggagtgtgggtggcactcggaggaccccaacccatggacttcgccatcgactggactgaacccactcttcctggagctctgccgccacatggtcttccagcggctgggccagggtgactacgtcttccggccgggccagccagatgccagcatctacgtggtgcaggacgggctgctggagctctgtctgccagggcctgacgggaaggagtgtgtggtgaaggaagtggttcctggggacagcgtcaatagccttctcagcatcctggatgtcatcaccggtcaccagcatccccagcggaccgtgtctgcccgggcggcccgggactccacggtgctgcgcctgccggtggaagcattctccgcggtcttcaccaagtcagctcggaccattacaggctgtgtgtggcgttacgtccgggccagcgcctcctactgcccctacctgcccccactgtgcgaccccaaggacgggcacctgctggtggacgggtgctacgttaacaacgtcccaggctccctgtggcggtacgtgcgcgccagcatgacgctgtcgggctacctgcccccgctgtgcgaccccaaggacgggcacctactcatggatggcggctacatcaacaatctgccaggcaagtggccgcccgcaccacccgcacacgcaagcacctcccgcaccacacacacgcacacgccggacatcgcccgcagcatgggtgccaaaacggtcatcgccattgacgtggggagccaggatgagacggacctcagcacctacggggacagcctgtccggctggtggctgctgtggaagcggctgaatccctgggctgacaaggtaaaggttccagacatggctgaaatccagtcccgcctggcctacgtgtcctgtgtgcggcagctagaggttgtcaagtccagctcctactgcgagtacctgcgcccgcccatcgactgcttcaagaccatggactttgggaagttcgaccagatctatcctccgcaccaccaggaggatgagcacggccgtgaccaccaccgccactccggccccgatcatcacgccaagcacctgagggacgaacggcactggctgcgcaccgcaaatccgtcccgccgagccttccccgggcgccaggacgtcctggaacccatccctctccgccaccttcgcccccgaggagttcgtagccagcccgtgactcgatgtccccatctgcagaatgggccagtgctgctccctccccgggggcgcgactcttccctgaggcccgtgcggcccgcagtgcatgccgggaaacgtagttccgcccgagcggactgcagcgcgttatcgccagaccacggcctaccagacgcccgcctgtccaaccccaccccggggccaaaggccgacctggtacccactgtcagcagcctgcaggcaggcttgcagggtggcccccgctccgacttcgacatggcctatgagcgtggccggatctccgtgtccctgcaggaagaggcctccggggggtccctggcagcccccgctcgggagcctcgtgagcagccggcaggcgcctgtgaatacagctactgtgaggatgagtcggccactggtggctgccctttcgggccctaccagggccgccagaccagcagcatcttcgaggcagcaaagcaggagctggccaagctgatgcggattgag

SEQ ID NO: 22106 - DNA, 1834 bp, Homo sapiens
  SIMILAR (326)..(1132): 911254mologous to Mus musculus neuropathy target esterase homolog,accession number AF173829,Smith-Waterman Score=1194.
tccggagccgggcggaacgctagcggtgttggcgcggagtttacttcggctgcggcccctgggtgtttccacaccggtagccagctgtgccctgaggtggaagaggaccggccacccaggaattttccaacaatggcgccaccatcggtcccggagtcccagtgatgctctgtgccatagagcccccataacttcactactacgtgatagtaaatccccggcaaaaaccagcagcgccttgcaagcccacgccaccccaagcatcccaggactcttctgaaacgactccgggctaccagatcggccgtccagctggaatcaaccgatggaggctccgctgcaaactggaatggtgcttggcgtgatgatcggggccggagtggcggtggtggtcacggccgtgctcatcctcctggtggtgcggaggctgcgagtgccaaaaaccccagccccggatggcccccggtatcggttccggaagagggacaaagtgctcttctatggccggaagattatgcggaaggtgtcacaatccacctcctccctcgtggatacctctgtctccgccacctcccggccacgcatgaggaagaaactgaagatgctcaacattgccaagaagatcctgcgcatccagaaagagacgcccacgctgcagcggaaggagcccccgcccgcagtgctagaagctgacctgaccgagggcgacctggctaactcccatctgccctctgaagtgctttatatgctcaagaacgtccgggtgcttgggccacttcgagaagccactcttcctggagctctgccgccacatggtcttccagcggctgggccaggtgactacgtcttccggccgggccagccagatgccagcatctacgtggtgcaggacgggctgctggagctctgtctgccagggcctgacgggaaggagtgtgtggtgaaggaagtggttcctggggacagcgtcaacagccttctcagcatcctggatgtcatcaccggtcaccagcatccccagcggaccgtgtctgcccgggcggcccgggactccacggtgctgcgcctgccggtggaagcattctccgcggtcttcaccaagtacccggagagcttggtgcgggtcgtgcagcccggcccaccatctggccctgccccttaccccgccccatcttatggccacgcccctcgagccctgcagatcatcatggtgcggctgcagcgagtcaccttcctggcactgcacaactacctgggtctgaccaatgagctcttcagccacgagatccagcccctgcgtctgttccccagccccggcctcccaactcgcaccagccctgtgcggggctccaagagaatggtcagcacctcagctacagacgagcccagggagaccccagggcggccacccgatcccaccggggccccgctgcctggacctacaggcttgcagggtggcccccgctccgacttcgacatggcctatgagcgtggccggatctccgtgtccctgcaggaagaggcctccggggggtccctggcagcccccgctcgggagcctcgtgagcagccggcaggcgcctgtgaatacagctactgtgaggatgagtcggccactggtggctgccctttcgggccctaccagggccgccagaccagcagcatcttcgaggcagcaaagcaggagctggccaagctgatgcggattgaggacccctccctcctgaacagcagagtcttgctgcaccacgccaaagctggcaccatcattgcccgccagggagaccagatggaggaagtgaaagttccagcctttgcggttattgtggattaa

SEQ ID NO: 22107 - DNA, 4430 bp, Homo sapiens
  SIMILAR (1900)..(2718): 871254mologous to Mus musculus neuropathy target esterase homolog,accession number AF173829,Smith-Waterman Score=1192.
  misc_feature (1)...(4430): n = a,t,c or g
ccccacgccaccccaagcatcccaggactcttctgaaacagggcagtgacccgggaggaagtcaccaggtgcagaggaccgtgccctgtggggacctgcctgcaggctgctgacagactccgggctaccagatcggccgtccagctggaatcaaccgatggaggctccgctgcaaactggaatggtgcttggcgtgatgatcggggccggagtggcggtggtggtcacggccgtgctcatcctcctggtggtgcggaggctgcgagtgccaaaaaccccagccccggatggcccccggtatcggttccggaagagggacaaagtgctcttctatggccggaagattatgcggaaggtgtcacaatccacctcctccctcgtggatacctctgtctccgccacctcccggccacgcatgaggaagaaactgaagatgctcaacattgccaagaagatcctgcgcatccagaaagagacgcccacgctgcagcggaaggagcccccgcccgcagtgctagaagctgacctgaccgagggcgacctggctaactcccatctgccctctgaagtgctttatatgctcaagaacgtccgggtgctgggccacttcgagaagccactcttcctggagctctgccgccacatggtcttccagcggctgggccagggtgactacgtcttccggccgggccagccagatgccaagcatctacgtggtgcaggacgggctgctggagctctgtctgccagggcctgacgggaaggagtgtgtggtgaaggaagtggttcctggggacaagcgtcaacagccttctcaagcatcctggatgtcatcaccggtcaccagcatccccaagcgggaccggtgtctgcccgggcggcccgggactccacggtgctgcgcctgccggtggaaacattctccgcggtcttcaccaagtacccggagagcttggtgcgggtcctgcaaatcatcatggtgcggctgcagcgaagtcaccttcctgggcactgcaaaactacctgggtctgaccaatgagctcttcagccacgaagatcaagcccctgcgtctgttccccagccccggcctcccaactcgcaccagccctgtgcggggctccaagagaatggtcagcacctcagctacagacgagcccagggagaccccagggcggccacccgatcccaccggggccccgcagcatggacctacaggggaccctgtgaagcccacatccctggaaaccccctcggcccctctgctgagccgctgcgtctccatgccaggggacatctcaggcttgcagggtggcccccgctccgacttcgacatggcctatgagcgtggccggatctccgtgtccctgcaggaagaggcctccggggggtccctggcagcccccgctcggacccccactcaggagcctcgtgagcagccggcaggcgcctgctgaatacagctactgtgaggatgagtcggccactggtggctgccctttcgggccctaccagggccgccagaccagcagcatcttcgaggcagcaaagcaggagctggccaagctgatgcggattgaggacccctccctcctgaacagcagagtcttgctgcaccacgccaaagctggcaccatcattgcccgccagggagaccaggacgtgagcctgcacttcgtgctctggggctgcctgcacgtgtaccagcgcatgatcgacaaggcggaggacgtgtgcctgttcgtagcgcagcccggggaactggtggggcagctggcggtgctcactggcgaacctctcatcttcacactgcgagcccaacgcgactgcaccttcctgcggatctccaagtccgacttctatgagatcatgcgcgcacagccccatgtgggagctgaatgccggcgcacacggtggcaagccaggaatgtccccctttggggccgccagatggacttcgccatcgactggactgcagtggaggcgggacngcgcgctgtacaggcagggcgaccgctccgactgcacttacatcgtgctcaatgggcggctgcgtagcgtgatccagcgaggcagtggcaagaaggagctggtgggcgagtacggccgcggcgacctcatcggcgtggtggaggcactgacccggcagccgcgagccacgacggtgcacgcggtgcgcgacacggagctggccaagcttcccgagggcaccttgggtcacatcaaacgccggtacccgcaggtcgtgacccgccttatccacctactgagccagaaaattctagggaatttgcagcagctgcaaggacccttcccagcaggctctgggttgggtgtgcccccacactcggaactcaccaacccagccagcaacctggcaactgtggcaatcctgcctgtgtgtgctgaggtccccatggtggccttcacgctggagctgcagcacgccctgcaggccatcggtccgacgctactccttaacagtgacatcatccgggcacgcctgggggcctccgcactggatagcatccaagagttccggctgtcagggtggctggcccagcaggaggatgcacaccgtatcgtactctaccagacggacgcctcgctgacgccctggaccgtgcgctgcctgcgacaggccgactgcatcctcattgtgggcctgggggaccaggagcctaccctcggccagctggagcagatgctggagaacacgggctgtgcgcgcccttaagcagctagtcctgctccaccgagaggagggcgcgggccccacgcgcaccgtgggagtggctaaatatgcgcagctggtgctcggggcaccttggcacctgcgctgtccgcgccgcctcttttcgcgccgcagccctgccaagctgcatgagctctacgagaaggttttctccaggcgcgcggaccggcacagcgacttctcccgcttggcgagggtgcttcacgggggaacaccattgcccttgtgcttggcgagggtgctcacggggccaggggctgtctcgcacatcggagtactaaaggcattagaggaggcgggggtccccgtggacctggtgggcggcacgtccattggctctttcatcggagcgttgtacgcggaggagcgcagcgccagccgcacgaagcagcgggcccgggagtgggccaagagcatgacttcggtgctggaacctgtgttggacctcacggacccaggccacctccatgtttactgggttctgcctttaaccgcagcatccattcgggtctttccagggtaaagcagatttgaggacctgttgcttgccttaatttcaaacgttgacccacagatatcaccgcctcagccatgcgaggccacaaagatggctccctgtggcggtacgtgcgcgccagcatggaccgctgtcgggctacctgcccccgctgtgcgaccccaaggacgggcacctactcatggatggcggctacatcaacaatctgccagcggacatcgcccgcagcatgggtgccaaaacggtcatcgccattgacgtggggagccagggatgagacggacctcagcacctacggggaacagcctgttcggctggtggctgctgtgggaagcggctgaatccctggggcttgacaaggtaaaggtttccagacatggcttgaaatccagttcccgcctgggcctaacgtgtcctgtgtgcggcagctagaggttgtcaagtccagctcctacttgcgagtacctgcgcccgcccatcgactgcttcaagaccatggactttgggaagttcgaccagatctatgatgtgggctaccagtacgggaaggcggtgtttggaggctggagccgtggcaacgtcatttgagaaaatgctcacagaccggcggtcttacagaccttaatgagagccgccgtgcagacgtgcttgccttcccaagctctggctttcactgacttgggcagagattgtgtcccggattgagccccccacggagctatgtctcttgatgggctgtgcttgacggagagggagtcagattgtcttgacagagttttgagggagggacggccgggacccgaactgctcgaagggatgaaaggggggttcccccgaagggcgcaagccccagcactgcctccgagatggaggaggagaagtcgattctccggcaacgacgctgtctgccccaggaagcagcccggctcagcccacagatgcctgaggacctcgacagggggtcacccccctccctcccacccctggactgggctgggggtggcctcgtgggggtagctcactccccctcctgcctgctatgacctgtgacccccgcggcccacacactggactgatcctgccctgagcggggatgcagtgttgccactgatgacttgaccagcccctcccccaataaactcgacctcttggaaatggc

SEQ ID NO: 22108 - DNA, 403 bp, Homo sapiens
  SIMILAR (236)..(180): 471254mologous to Mus musculus SPR2K protein,accession number AJ005569,Smith-Waterman Score=45.
  misc_feature (1)...(403): n = a,t,c or g
annnnnnnnnnccctaagctactgcacactaaacagtgagagagcttttccctgcagtcttgttgaagcaccccgggttgtttgctcattgttggggggggcattttaattttttcattccctggactatgggttatgatatccatactcactgaagacaaaaagccaccttttctgcgtcttgggggcatgcatgtggctcatcatcctttcaaacttgggggggaacagggttttcttccctgtctgtgtatttggagccagcacagttaccaaaattgaacttgtctttcgcttgtgagcggttgtggtcattgtgagaaaatgaactcagaggagaattggtgaattcctatccagtgggcatcttcaaaccctggtcgacggcggaagaatatcaggt

SEQ ID NO: 22109 - DNA, 225 bp, Homo sapiens
  SIMILAR (49)..(192): 931254mologous to Rattus norvegicus C2-HC type zinc finger protein r-MyT2,accession number U67081,Smith-Waterman Score=239.
cataatgccctcaacatccagccatgtcgtagaatgggccaatgtggctttgtgaagcagctggagattcctcagtatggctacagaaacaatgtccccacaactacgccgcgttccaacctggccaaggagctcgagaaatattccaagacctcgtttgaatacaccattaacgacaaccatacttatgggggactagggtgcatgagaccacgcttagtgtga

SEQ ID NO: 22110 - DNA, 1860 bp, Homo sapiens
  SIMILAR (9)..(908): 281254mologous to Ascaris suum putative,accession number M67507,Smith-Waterman Score=170.
atgaccgcggaactcggggaggcccggctacgtccccctcacgaaaggaacgcgggactcgggaaggcccggaaggctggactgcgtccccctcacgtaaggaacgcgggactcgggaaggcccggaaggcctggctgcgtccccctcacgtaaggaacgcgggcgtctgggaggcccggctgcgtccccctcacggaaggaacgcgggactccggaaggcccggaaggcctggctgcgtccccctcacggaaggaacgcgggcgtctgggaggcccggctgcgtccgcctcacggaaggaacgcgggactcgggaaggcccggaaggcctggctgcgtccccctcaaggaaggaacgcggacaaggaacgcgggacttgggaaggccggaaggcccggctgcgtccccctcacgtaggaacgcgggcgtctgggaggcccggctgcgtccccctcacagaaggaacgcgggactcgggaaggccggaagcccggaaggcccggctgcgtccccctcacgtaaggaacgcgggcgtctgggaggcccggctgcgtccgcctcacgtaaggaacgcgggactcgggaaggcccggaaggcccggctgcgtccccctcacgtaaggaacgcgggcgtctgggaggcccggctgcgtccgcctcacagaaggaacgcgggactcgggaaggcccggaaggcctggctgcgtccccctcacggaaggaacgcgggactcgaggaggcccggctgcgtccgcctcacagaaggaacgcgggactcgggaaggcccggaaggcctggctgcgtccccctcacagaaggaacgcgggactcgaggaggcccggctgcgtccccctcacgtgtggaggccaatcagctggaaacctcaagccaaccccaaccaccgatttaggcaggagtctctcctacaactgaagctgacggatgaggagaggcttatatcatcacaggaagagaacagagctttcctcccacagctggggaaatctgccggctctgctggagaggccgccagcccattggtgggcgtgcggtattttgtgttgtcgctctatcctttagaaaatgaactcagaggagaattggtgaattcctatccagtgggcatcttcaaaccctggtcgacggcggaagaatatcaggtcctgagatcacccacccggcgcggcaacagtgcaggtacctctgcccagcacggggctcctggtgacagagtgcaggtgcccctgcccagcacggggcttctggccacagtgcagggtgggagagcaagttggacttggttaggggaaaaaagagatctcgaggttctagcagctgaaatcctgtcctgctttgccctggagactgccatcctcagtggagtgtccgccgggacccctccagccaggccccggaaaaagccaaaagaggtgattgagagagcggaaacacaacctgcagagtgtgctcctaccacactgcccaaggagcttagagagaaaaggtctgctgttcctcacaggctgaaaagcaggtctgtcaccgtcaccccgacagccccctgcttcaccaagtattttcctgggagtctcaggagctcttcacatgtccccgtgccggctgattgctacagcaacctgcggattgtggaagtgagatgtgggcagcctaataatgcactctcgggaacttctgttccttcttctgcaaatgagggtaacaatgcgttctcagcagaatgcttgcaatgccagaatgaaacagccctggaaagaaccctgtatggcctgacaggtagtgtggccactgaaccagacatgactgaattctcctccttcagctgtgacagactttga

SEQ ID NO: 22111 - DNA, 672 bp, Homo sapiens
  SIMILAR (262)..(209): 611254mologous to Drosophila melanogaster CG18807 gene product,accession number AE003826,Smith-Waterman Score=67.
atgatgccgactttgaggattaagagagatactgaacctgcagtgtctgacctaacgtgtagcttctcagctggatactcggaaatgggagcagttgacatgtgtgctgctcttaccatgaagatccctgctcctctgtcaccaggaacatgtcacaaaatagaaagtgtggcttctaggcagaattgggaagacccagaaaggggagggcattccagggcgggtcatgaggaggctgtagccaaggacgaggtgtgtgcggctgttgcctggacgtttgtccaatccacgttgacatttgagggatcacagcgtgtgtgtttttctcaatggctgaaggcaggaccagggccgaaaggtcctgcgatagtaaataggccattggtgccccagcagaggaatgaggaggagcgtcaccagggaagagtccagaattgtggcagggggcaggatacagcccgctgggggcatgtggacacaaagccaggctttggattccgtggagaaggagctggagtggagagaagggagccaggggctgcaggggcacaggcaagaagctggggcaccaggggtggagatgggagacacctggacgccctggaggtgcagggccagcaggatttcctgacccagttgtcatggggtgtgagaaagaagcatcaagggtga

SEQ ID NO: 22112 - DNA, 1380 bp, Homo sapiens
  SIMILAR (1054)..(1215): 891254mologous to Rattus norvegicus C2-HC type zinc finger protein r-MyT2,accession number U67081,Smith-Waterman Score=235.
atgaggactgctgtcctgggtcaggcgcccacccaggtccaaccagctgcggtccgggaggaccagaatgagattttttatttgctaaatgtcgaatattcagagagcccttttgtggccatctccctccggccagcccccatgtccctctcccacttcccacagcttcctgtcggtatagaaaatgatgaagaaatcaaacagttagatgaagaaatcaaggagctaaatgaatccaattcccagatggaagccgatatgattaaactcagaactcagaggttgaggctggggaaggttgagggcctttcccatagtcagccgggtgtggtcaacggctctgctcaacaggtggtttctacccactggacacagttttcccaaggatggagacatcctctggggctggggccccaccaagcaaccgaaagggatttccaggccccccggagaggtccagatttaaatctgataaagaacaaatccaagagaaggaaaaaggaaactccgtccaagcctttaaatttcacacctgtgccggatggggaagaccgccacgcctgtgccggatggagggagaccgccgcgcctgtgccggatggagggagaccgccgcgcctgtgccggagaagagggagaccgccgcgcctgtgccggatggagggagaccgccgcgcctgtgccggatggagggagaccgccgcgcctgtgccggagaagagggagaccgccgcgcctgtgccggatggagggagaccgccgcgcctgtgccggagaagggggagaccgccgcgcctgtgccggatggggggagaccgccgcgcctgtgccggatggggggagaccgccgcgcctgtgccggagaagggggagaccgccgcgcctgtgccggagaagggggagaccgccgcgcctgtgccggagaagggggagaccgccgcgcctgtgccggatggggggagaccgccgcgcctgtgccggatgcaggaaaggcctctcctgccactctctgcggaaggggttgcttgttacctctcaagcccaggagtgttcttactaaaacttggaaagattaccacgatggagagcaacctgaagaccatcgaagaggagaacaaagtgattgagcagcagaacgagtctctcctccacgagctggcgaacctgagccagtctctgatccacagcctggctaacatccagctgccgcacatgtttcttcgaatcttcgttgagcaagctttctggatcgtcactagggacagcgatcaggactcctgcacgtctgatttgcagatagcaggcgggcatcctgggctgctccttgccggtgacacccgatcctcctgcggccttcagcaagagtcctgtgtgctgtga

SEQ ID NO: 22113 - DNA, 2581 bp, Homo sapiens
  SIMILAR (1)..(1824): 691254mologous to Homo sapiens myelin transcription factor 1- like,accession number AF036943,Smith-Waterman Score=2059.
atgcaagacacagaaaaggatgataacaataatgacgaatatgacaattacgatgaactggtggccaagtcattgttaaacctcggcaaaatcgctgaggatgcagcctaccgggccaggactgagtcagaaatgaacagcaatacctccaatagtctggaagacgatagtgacaaaaacgaaaacctgggtcggaaaagtgagttgagtttagacttagacagtgatgttgttagagaaacagtggactcccttaaactattagcccaaggacacggtgttgtgctctcagaaaacatgaatgacagaaattatgcagacagcatgtcgcagcaagacagtagaaatatgaattacgtcatgttggggaagcccatgaacaacggactcatggaaaagatggtggaggagagcgatgaggaggtgtgtctgagcagtctggagtgtttgaggaatcagtgcttcgacctggccaggaagctcagtgagaccaacccgcaggagaggaatccgcagcagaacatgaacatccgtcagcatgtccggccagaagaggacttccccggaaggacgccggacagaaactactcggacatgctgaacctcatgcggctggaggagcagttgagcccccggtcgagagtgtttgccagctgtgcgaaggaggatgggtgtcatgagcgggacgacgataccacctctgtgaactcggacaggtctgaagaggtgttcgacatgaccaaggggaacctgaccctgctggagaaagccatcgctttggaaacggaaagagcaaaggccatgagggagaagatggccatggaagctgggaggagggacaatatgaggtcatatgaggaccagtctccgagacaacttcccggggaggacagaaagcctaaatccagtgacagccatgtcaaaaagccatactatggtaaagatccctcaagaacagaaaagaaagagagcaagtgtccaacccccgggtgtgatggaaccggccacgtaactgggctgtacccacatcaccgcagcctgtccggatgcccgcacaaagatagggtccctccagaaatccttgccatgcatgaaagtgtcctcaagtgccccactccgggctgcacggggcgcgggcatgtcaacagcaacaggaactcccaccgaagagacattcaggtgtttaatctgcagaagcaggaaatgatcgataggttggagagcctctccggatgcccgatcgctgcagcagagaaactggccaaggcacaggaaaagcaccagagctgcgacgtgtccaagtccagccaggcctcggaccgcgtgctcaggccaatgtgctttgtgaagcagctggagattcctcagtatggctacagaaacaatgtccccacaactacgccgcgttccaacctggccaaggagctcgagaaatattccaagacctcgtttgaatacaacagttacgacaaccatacttatggcaagcgagccatagctcccaaggtgcaaaccagggatatatcccccaaaggatatgatgatgcgaacgggtactgcaaggaccccagccccagcagcagcagcaccagcagctacgcgcccagcagcagcagcaacctgagctgcggcgggggcagcagcgccagcagcacgtgcagcaagagcagcttcgactacacgcacgacatggaggcggcccacatggcggccaccgccatcctcaacctgtccacgcgctgccgcgagatgccgcagaacctgagcaccaagccgcaggacctgtgcgccacgcggaaccctgacatggaggtggatgagaacgggaccctggacctcagcatgaacaagcagaggccgcgggacagctgctgccccatcctgacccctctggagcccatgtccccccagcagcaggcagtgatgaacaaccggtgtttccagctgggcgagggcgactgctgggacttgcccgtagactacaccaaaatgaaaccccgggaggatagacgaggacgagtccaaagacattactccagaagacttggacccattccaggaggctctagaagaaagacggtatcccggggaggtgaccatcccaagtcccaaacccaagtaccctcagtgcaaggagagcaaaaaggacttaataactctgtctggctgccccctggcggacaaaagcattcgaagtatgctggccaccagctccccaagaactcaagtaaggatttaatgacaataattctcttttaaaaatccatgcactcagtagttcacaaaaaaaaatgatatgtcatttgcaaagaaaaatgtctgttaaaaaacatggcctgtgcaccccagtgccttgatgtagacatgggattgaatcctcggaatttcagccacttttccacacavcccattctgccttttcccctgacatacctccagcttgttcatatcatatccttcctatctggaatatcctaaagcatgggtgttttctcttcagatatgcatgcatatggaagggaaattttacagttactcaaatttttagaaaatgactgtaaataatcaaaatttaattttt

SEQ ID NO: 22114 - DNA, 4373 bp, Homo sapiens
  SIMILAR (1352)..(3451): 981254mologous to Homo sapiens myelin transcription factor 1- like,accession number AF036943,Smith-Waterman Score=3665.
  misc_feature (1)...(4373): n = a,t,c or g
tgcagtcttgttgaagcaccccggggttttttgctcattgttggtgggtgcattttaattttttcattccctggactatgggttatgatatccatactcactgaagacaaaaagccaccttttctgcgtcttggtggcatgcatgtgtctcatcatcctttcaaacttgtggtggaacagggttttcttccctgtctgtgtattttgagccagcacagttaccaaaattgaacttgtctttcgcttgtgagcggttgtggtcattgtgagggcgggtcatgaggaggctgtagccaaggacgaggtgtgtgcggctgttgcctggacgtttgtccaatccacgttgacatttgagggatcacagcgtgtgaaaatgaactcagaggagaattggtgaattcctatccagtgggcatcttcaaaccctggtcgacggcggaagaatatcaggtcctgagatcacccacccggcgcggcaacagtgcagagtggccacattctggtggaagaagaaaaaaatgtagtgtattgaattcaatcaagtgtttgcatctttcaagctatcaacaaaattccatcaagaaaggttccagttggtctcacagacgtatggatatccgaggagccacctaaagatggagaaatcaaggcatagagagattaagtgactttgccacagtcacaagctggagaggaccaggagtagagcttagagcgagcccctgactctgggcctgcgtcctgccaggagtcacgctgcctccgttcctaggagagaagacttcctgtaagatggaggtggacaccgaggagaagcggcatcgcacgcggtccaaaggggttcgagttcccgtggaaccagccatacaagagctgttcagctgtcccacccctggctgtgacggcagtggtcatgtcagtggcaaatatgcaagacacagaagtgtatatggttgtcccttggcgaaaaaaagaaaaacacaagataaacagccccaggaacctgctcctaaacgaaagccatttgccgtgaaagcagacagctcctcagtggatgagtgtgacgacagtgatgggactgaggacatggatgagaaggaggaggatgagggggaggagtactccgaggacaatgacgagccaggggatgaggacgaggaggacgaggagggggaccgggaggaggaggaggagatcgaggaggaggatgaggacgatgacgaggatggagaagatgtggaggatgaagaagaggaagaggaggaggaggaggaggaggaagaggaagaagaaaacgaagaccatcaaatgaattgtcacaatactcgaataatgcaagacacagattttggatgataacaataatgacgaatatgacaattacgatgaactggtggccaagtcattgttaaacctcggcaaaatcgctgaggatgcagcctaccgagccaggactgagtcagaaatgaacagcaatacctccaatagtctggaagacgatagtgacaaaaacgaaaacctgggtcggaaaggtgagttgagtttagacttagacagtgatgttgttagagaaacagtggactcccttaaactattagcccaaggacacggtgttgtgctctcagaaaacatgaatgacagaaattatgcagacagcatgtcgcagcaagacagtagaaatatgaattacgtcatgttggggaagcccatgaacaacggactcatggaatttatggtgtaggagagcgatgaggaggtgtgtcggagcagtctggagtgtttgaggaatcactgcttctacctggccaggaagctcagtgagaccaacccgcaggagaggaatccgcagcagaacatgaacatccgtcagcatgtccggccagaagaggacttcccaggaaggacgccggacagaaactactcggacatgctgaacctcatgcggctggaggagcagttgagcccccggtcgagagtgtttgccagctgtgcgaaggaggatgggtgtcatgagcgggacgacgataccacctctgtgaactcggacaggtctgaagaggtgttcgacatgaccaaggggaacctgaccctgctggagaaagccatcgctttggaaacggaaagagcaaaggccatgagggagaagatggccatggaagctgggaggagggacaatatgaggtcatatgaggaccagtctccgagacaacttcccggggaggacagaaagcctaaatccagtgacagccatgtcaaaaagccatactatggtaaagatccctcaagaacagaaaagaaagagagcaagtgtccaacccccgggtgtgatggaaccggccacgtaactgggctgtacccacatcaccgcagcctgtccggatgcccgcacaaagatagggtccctccagaaatccttgccatgcatgaaagtgtcctcaagtgccccactccgggctgcacggggcgcgggcatgtcaacagcaacaggaactcccaccgaagcctctccggatgcccgatcgctgcagcagagaaactggccaaggcacaggaaaagcaccagagctgcgacgtgtccaagtccagccaggcctcggaccgcgtgctcaggccaatgtgctttgtgaagcagctggagattcctcagtatggctacagaaacaatgtccccacaactacgccgcgttccaacctggccaaggagctcgagaaatattccaagacctcgtttgaatacaacagttacgacaaccatacttatggcaagcgagccatagctcccaaggtgcaaaccagggatatatcccccaaaggatatgatgatgcgaagcggtactgcaaggaccccagccccagcagcagcagcaccagcagctacgcgcccagcagcagcagcaacctgagctgcggcgggggcagcagcgccagcagcacgtgcagcaagagcagcttcgactacacgcacgacatggaggcggcccacatggcggccaccgccatcctcaacctgtccacgcgctgccgcgagatgccgcagaacctgagcaccaagccgcaggacctgtgcgccacgcggaaccctgacatggaggtggatgagaacgggaccctggacctcagcatgaacaagcagaggccgcgggacagctgctgccccatcctgacccctctggagcccatgtccccccagcaacaggcagtgatgaacaaccggtgtttccagctgggcgagggcgactgctgggacttgcccgtagactacaccaaaatgaaaccccggaggatagacgaggacgagtccaaagacattactccagaagacttggacccattccaggaggctctagaagaaagacggtatcccggggaggtgaccatcccaagtcccaaacccaagtaccctcagtgcaaggagagcaaaaaggacttaataactctgtctggnctgccccctggcggacaaaagcattcgaagtatgctggccaccagctcccaagaactcaagtgccccacgcctggctgtgatggttctggacatatcaccggcaattatgcttctcatcggagcctttcaggttgcccaagagcaaagaaaagtggtatcaggatagcacagagcaaagaagataaagaagatcaagaacccatcaggtgtccggtccccgggtgcgacggccagggccacatcactgggaagtacgcgtcccatcgcagcgcctccgggtgccccttggcggccaagaggcagaaagacgggtacctgaatggctcccagttctcctggaagtcggtcaagacggaaggcatgtcctgccccacgccagggtgcgacggctcaggccacgtcagcggcagcttcctcacacaccgcagcttgtcaggatgcccgagagccacgtcagcgatgaagaaggcaaagctttctggagagcagatgctgaccatcaaacagcgggccagcaacggtatagaaaatgatgaagaaatcaaacagttagatgaagaaatcaaggagctaaatgaatccaattcccagatggaagccgatatgattaaactcagaactcagattaccacgatggagagcaacctgaagaccatcgaagaggagaacaaagtgattgagcagcagaacgagtctctcctccacgagctggcgaacctgagccagtctctgatccacagcctggctaacatccagctgccgcacatggatccaatcaatgaacaaaattttgatgcttacgtgactactttgacggaaatgtatacaaatcaagatcgttatcagagtccagaaaataaagccctactggaaaatataaagcaggctgtgagaggaattcaattcaggtctgaacagctgctgtag

SEQ ID NO: 22115 - DNA, 1558 bp, Homo sapiens
  SIMILAR (2)..(472): 1001254mologous to Homo sapiens eIF4E-transporter,accession number AF240775,Smith-Waterman Score=792.
ggtagaagcaggtctgaagggcttgaaggttgaccagcaagtgaagaattcaactcccttcatggcagaacacctagaagagaccttgagtgccgtaaccaacaatcgacaactgaagaaagacggagacatgactgcgttcaacaagctagtgagcacaatgaaggcaagtgggactttgccttctcagcccaaagtcagccgaaaccttgaaagccatttgatgtcccctgctgagattccaggccagcctgtccctaagaacatactgcaggaacttctgggtcaaccagttcagagacctgcttcttccaatcttctgagtggccttatggggagcttggagcctacaacatctttactgggccaaagagcaccctctcctcccttgtcacaggtgtttcaaactcgagcagcctcagctgactaccttcgcccaagaataccatcaccaattggtttcacaccagggaccacagcagctactcggagatccattccaaggcatgcgcaaacccatgagccccatcacagcccagcagatgagccagctggagttgcaacaggcagctttagaagggctggccttgccacatgaccttgctgtacaggcagcaaacttctaccagcctgggttttggcaaaccacaggtgggacagaaccagagatgggattcagaaacagggcaacagcgagtgaccaagttcaccaggcacccgtgcattcgaggggaattcctcttcccctgcccctgctgcctccatcacaagcatgctttctccttcctttacccctacctcagtgattcgtaagatgtacgagagcaaagagaaaagcaaggaggagccagcatctggaaaagcagctcttggtgacagtaaagaggatactcagaaggccagtgaagaaaacctcctgtcatccagctctgtacccagcgccgaccgagactacttctcccactacaaattccaaactgtcaggcattacagagggtcttcgtgttccaccccacttgtcccaggggcaaccgtttacacccaaagaacaagattattcggaccttaaaggcaactgggggaggaaaaacacccactttgggcattccccagtttccttacaacactttttcttccgccctgttccaccaagttcccctttgtcccccatggtccctaatggttaaggcctgctcaccaagcttcacccagggtttggtacagaggatgctggcccagggagtacatccacagcatcttccaagtttgctccaaactggtgtgcttcctcctgggatggacttgagtcatttacagggaatatctggccccatcctgggtcagcccttttaccctttaactagtcgctagttcaccctctcttaaaccctcgtcctgggaacacctctgcatctggcaatggtgcaacagcagctaacagcgctcagttcttgcatcctccaggctctggtttcccatggcagcagctgttcagcgtttcaggacaacccctcagaaacgtgcccagccggtcaggcctgcccacatgcacttccag

SEQ ID NO: 22116 - DNA, 2769 bp, Homo sapiens
  SIMILAR (2709)..(1483): 951254mologous to Mus musculus Clast4 protein,accession number AB031388,Smith-Waterman Score=2011.
tttttttttcattcacacacttagtcatatgcaattttaatcaaccaaaagaaaatcccaaatgtacaagtgaaaaaaatccaaactgttgacacaggcctaactaatatcagctacttttatgtacagctgtatagttcaaaaaagctatccttatatgtatatacaaaagttcgtttataccccaggtctgtacataagggtctatacattttatttcctcagaacccttaaggtgccacctcttggtgaggacaccaacacttcatttcacatatcttacaaaaaagaaagaccatttccaggattgggcaacattggtgcatcctgtattcagacaatggtacactccactccgactgggttaaggatccttccatcataaatgcgggaccacaccaggatggcatgggggttccaccaaaacagctttcacacagagtggctccaaagtaaaagcccataaaccaacccgaggatgaaggcagggtcctgcccagtgtgccaccacaggtccggggcttaggttgaggtttgcctgccctggttcactgtcggtattccaattcatcttacactggataactttgggcggggcatgggaggggcaggggtttgctgtagcacattttgaggccaaaccttttggcaaggcccacaggggagctgctcctctggctggggcgatgctccacctgggagtgcatgtggggcaggcctgaccggctgggcacgttctgaggggttgtctgaacgctgacagctgctgcatgggaaccagagcctggaggatgcagaactgagcgctgtagctgctgttgcaccattgccagatgcagaggtgttccaggacgagggtttaagagagggtgactagcagcaggtaaagggtaaaagggctgacccaggatggggccagatattccctgtaaatgactcaagtccatcccaggaggaagcacactgtcacacagaaccttctcactgacacagaaccatagtccagagaagctagtggtcttgcccagggctttgtatagaatatcaggctggtcagcgctcaggcccatgttttctccatcacatactttcttgagcagtgcccttaacagctctgcagtaccttcactggccttctgagtatcctctttactgtcaccaagagctgcttttccagatgctggctcctccttgcttttctctttgctctcgtacatcttacgaatcactgaggtaggggtaaaggaaggagaaagcatgcttgtgatggaggcagcaggggcaggggaagaggaattccctcgatgcacgggtgctggtgacttggtcactcgctgttgcctgtttctgaatccatctctggttctgtccacctgtggtttgccaaaaccgaggctggtagaagtttgctgcctgtacagcaaggtcatgtggcaaggccagcccttctaaagctgcctgttgcaactccagctggctcatctggctgactttgggctgagaaggcaaagtcccacttgccttcattgtgctcactagcttgttgaacgcagtcatgtctccgtctttcttcagttgtcgattgttggttacggcactcaaggtctcttctaggtgttctgccatgaagggagttgaattcttcacttgctggtcaaccttcaagcccttcagacctgcttctacctcctccactgaaagcacaacccctgaatgtgagctttctttaagtttttctttatttgcagaaaggctggaaagaagaggtttcaaatccactttggctttctgtagcatttctaaaatatccactttattttcagcatggtcttccaatggtataggagcaaagtaattccccgagttctgtccaggagacaggatggcttgctccagacctgcaagtctctctagctcttcatgtggtgttgacccaagactgctggatcggcttcctgatctgctcgggttagagaaccacctactgaaccgactggcagagactgacccttctcccaaaacatcttctatcatcgaagccaagcatggcaccttatcaaggttaaagaactcattaaagtcaaagtctcctggggactgctcaggcaagacagcatcccttggcacttcctgatcagccgcaggctcctgtgcaaggatgacctccacttcatcctcttcggccactcctccattgcactctactataccttccttcacagaggctgtccgtcgccttgttctttttctccctttgtgatcttcttctagtatcttatcatcaaagccagtcagttcgatggtttcagactgacttgtgggtccagcagagaaccactctggttcttcttctgtgtaagaatcatttcttctacgctcaccaaagacacgcttactatctccaaactctctcctgaaacgcttgtccttgaagtccctctctcggtctctgtctctcaagtcccgcaggtccttatcgctaagacggtgatccttctcaaaggtccgggcagagattatcctcccactgccaatcctacgtccaccaagcagacgaagcccatcactatctttctctaatggacttcctgagcgccgggagctaacagcggctgtcacgtggcagccccctccaaagctccgtctctgagggctgagaacaacatctaagtcatcttctttcacacgctctcgtggatcttgtgatctgcccgccctggcctcccaaagtgctgggattacaggtgtgagccactgcacctggcccat

SEQ ID NO: 22117 - DNA, 443 bp, Homo sapiens
  SIMILAR (112)..(168): 941254mologous to Homo sapiens Human secreted protein, SEQ ID NO: 4179,accession number G00098,Smith-Waterman Score=106.
tccccctagactggggggccctgtaggctgctgttgaaggactgggtagagacattggagggaagggaagggcttttctccacacaagggcagagagtccgtctagatttcttgctgtcctgccagctctgcccatgcctgaggtggtcctacctctcacgggcaccctagctgctgacagcatccctgcctcttgtcacaaactgccccagcaagaatttgaggttctgacaacagtacccatcccccacagtaccccttcagctcagtttctagaaagctcccttttctttgaaatctgcatgttgaattgaactttgtgattttattttttgtttcaaaaaagtttaagaaaatggaaatgggcaacagtgagtgaagacatattttagcactgaatagaatatttttaaaattaaactatttgaaatatgaaaaaaaaa

SEQ ID NO: 22118 - DNA, 274 bp, Homo sapiens
  SIMILAR (141)..(272): 701254mologous to Homo sapiens BCL7B,accession number X89985,Smith-Waterman Score=145.
ccattcttggctgtgacctggtccagctgggccctgaatgaatgtttgcttctcaggccagtattctcccctcctcaccaagccacctccacacagctctaaggaagctcccccaggtccaggcctcaggggagccctgccctcaggccgaccctactgccttttcagagccctccctgccctcctcggaagttgctgatgaacctcctaccctcaccaaggaagaaccagttccactagagacacaggtaagcaatcactttgagttttccag

SEQ ID NO: 22119 - DNA, 1753 bp, Homo sapiens
  SIMILAR (296)..(751): 291254mologous to Homo sapiens B-cell CLL/lymphoma 7B,accession number BC000956,Smith-Waterman Score=101.
atgtgtgcagggaacctgtgcagctgggaggagcgctgggctgtggacgagaaggaagctacagacaagaaacctcacgtgggaggatttggacaaggtgccccggcccccgccgctcccgccgccgccatgtcgggccggtcggtccgggcggtgacccgcagccgtttttaggacgacatcaagaaggtgatggcggccatcgagaaagtgcggaaatgggagaagaagtgggtgactgtgggtgacacgtccctgaggatatttaagtgggttcctgtgacagacagcaaggagaaagaaaagtcaaaatcgaacagttcagcagcccgagaacctaatggctttccttctgatgcctcagccaattcctctctccttcttgaattccaggacgaaaacagcaaaccagagtttccgtgtctgacgtctatcagcttaaggtggacagcagcaccaactcaagccccaagccccccaagcagagtgagtccctgagcccagcacacacctccgacttccgcacggactgactcccagcccccaacgctgggccagggagatcctgggaggagccctcccttgcccttcctcggaagttgctgatgaacctcctactctcaccaagggaagaaccagtttccacttagagacacaggtcgttgaggaacgaggaagactcaggtgccccgcccctgaagcgcttctgtgtgggaccaacccacagtgccgcagacgggttcagaaaagctagcaccatcccggccctccgctttctgggccctgcctctatttattgcattctggttctggccgcgccgcgtttgctgggggtaaagggcaagcactggggtcaagagcctgcacacatgagccttccgggctggaagggtggcgtaggacttggggctgtagcatcatcttcctgaccctggcacctgtgtctacttgctcccgagaagaggaaccgctcatgtcttttttggcaccccaagttgggctgggagcatcggccaccccaagattcatctgtgacctccaggcagcagtctcttgctccagaatctctggacggagcttgctgggcagtttcttgcgagaagagagagatgttggaagggcacctttttaggaagagagcgtgcctcaggttacttgaacttgaacggagatttaagattcccggatttttcccctaggactgggggccctgtaggctgctgttggaggactgggtagagacattggagggaagggaagggcttttctccacacaagggcagagagtccgtctagatttcttgctgtcctgccagctctgccccatgccctgaggtggtcctaacctctcaaggggcaacccctaactggctggacaagcccttttgtgggccgccgttcccccatcccctgccctcagcacacacatctggcacacacggcagcttttggttctcacctctacctgtcattccagcatccctgcctcttgtcacaaactgccccccagccaagaatttgaggttctgacaacaggtacccatccccccacagtaccccctcaggctcagtttctagaaagctcccttttctttgaaatctgcatgttgaattgaactttgtgattttatttttttgtttcaaaaaagtttaagaaaatggaaatgggcaacagtgagtgaagacatattttagcactgaatagaatatttttaaaattaaactatttgcaaatatgaaaaaaaaaaaaaaa

SEQ ID NO: 22120 - DNA, 524 bp, Homo sapiens
  SIMILAR (500)..(384): 941254mologous to Homo sapiens myosin-IE,accession number X98411,Smith-Waterman Score=182.
gtccttcccaaagctttagaggcagaaggaagtatcactatggagcctgggtaggttggcacagagaggtgggaacgcggtgcggagggctggggtgtcccctagttgctaagggatcctcatggtccttccaccccacccccaccccaggatcccccatccctgactgcttggccgcccacctgctcggccttcagggtaagttcgataaagatttgctgcagcttctcattgcacgaagttgatgcaaaactgctcgaagccatttttctggaagatctcgaagccgtaaatgtccagcacaccgatgctgtactcttcctggggtttctgcatagcacggttgatggcctccacgaggaagtcgaagaggcgggcatagagcccttggccagggcatcacgggtgtaggctgcctgctccacgttgagggtcacattgatggactcgctgcgcccgcaccagcgcatgtccatcttgcggctggtcagcttctcctgcagtcgcccgctgtcaatgcccaa

SEQ ID NO: 22121 - DNA, 727 bp, Homo sapiens
  SIMILAR (6)..(617): 431254mologous to Homo sapiens Human PRO1110 (UNQ553) amino acid sequence SEQ ID NO:31,accession number Y99349,Smith-Waterman Score=289.
cccctgggctccttcgcctgctgcagctggtgtctacctgcgtggccttctcgctggggctagcgtgggcgcctggacggggtccatgggcaactggtccatgttccctggtgcttctgcttctccgtgaccctgatcatcctcatcgtggagcttgcgggctccaggcccgcttccccctgtcttggcgcaacttccccatcacttcgcctgctatgcggccctcttctgcctctcggcctccatcatctacccaccacctatgtccagttcctgtcccacggccgttcgcgggaccacgcatcgccgccaccttcttctcctgcatcgcgtgtgtggcttacgccaccgagtggcctggacccgggcccggcccggcgagatcactggctatatggccccgtacccgggctgctgaaggtgctggagaccttcgttgcctgcatcatttcgcgttcatcagcgaccccaacctgtaccagcaccagccggccctgggtggtgcgtggcgcttcctgtcggggctggccttgctgtctgtcctcctctatgccaccgccttgttctctggcccctctaccagttcgatgagaagtatggcggccagctcggcgctcgagagatgtaagctgcagccgcagccatgcctactacgttgtgcctgggaccgccgactggctgtggccatcctgacggccatcaaccactggcgtatgtggctgacctg

SEQ ID NO: 22122 - DNA, 354 bp, Homo sapiens
  SIMILAR (2)..(193): 531254mologous to Homo sapiens Human PRO1110 (UNQ553) amino acid sequence SEQ ID NO:31,accession number Y99349,Smith-Waterman Score=132.
cttcctgtcggggctggccttgctgtctgtcctcctctatgccaccgccttgttctctggcccctctaccagttcgatgagaagtatggcggccagctcggcgctcgagagatgtaagctgcagccgcagccatgcctactacgttgtgcctgggaccgccgactggctgtggccatcctgacggccatcaaccactggcgtatgtggctgacctgtcacctggaggtggctggaaggccagtggactccacatttagggagagtgttacaagaggactcggattcccccaccttcccttcggctttgggaatccaggaaacccgccccgaacccctgaaaagtcccagagaag

SEQ ID NO: 22123 - DNA, 1180 bp, Homo sapiens
  SIMILAR (517)..(1179): 691254mologous to Homo sapiens FAA,accession number AC005565,Smith-Waterman Score=761.
atgggtaccaacgatggaaagatcaaagactttaagactttcactatttcttctaccgctatctactacgaacttcaaagacgaaccagaagccccactctgtgcctcggctcttcgtttgtggtgctgaacgtcatctacgtcatctacgccatctacgtaatcaacacaataaagacgcctgccgggaacgcggcccttcggctgaatcccttcggtggttccaaggccactgccagaggatgcggacgggaaccacgcttgaggggcggcagtctgcccgcgcgagacgcccccgcggactacaccgcggcggcaaagccaaacgcaaaaactacctcaccgcgcgcaggcgcctcccccaggaccaacatggccacgacgcaaggcctcgacctgaggggcgtggcctggccgccgccagccaacgggtgtgcgcgcctggccgcagccaataggaaggcagcgcgggctcgggcgcagggagccgccgccggggctgtaggcgccaaggccatgtccgactcgtgggtcccgaactccgcctcgggccaggacccagggggccgccggagggcctgggccgagctgctggcgggaagggtcaagagggaaaaatataatcctgaaagggcacagaaattaaaggaatcagctgtgcgcctcctgcgaagccatcaggacctgaatgcccttttgcttgaggtagaaggtccactgtgtaaaaaattgtctctcagcaaagtgattgactgtgacagttctgaggcctatgctaatcattctagttcatttataggttgcccaccgtttctcactttattgaatgcagaccagtggctggttgctcaggagaatggtggctgcctgcaggctgttagtgaggttccacttggtggcctgcggactgagcacagctgtgactgcacctgcccaccaggtgcatggcagaatgttgggaaatccctgcctaattttatcacaaccatcaatagttctttgttgcttgaagcggtgtggcatcttcacgtacaaggcattgtgagcctgcaagagctgctggaaagccatcccgacatgcatgctgtgggatcgtggctcttcaggaatctgtgctgcctttgtgaacagatggaagcatcctgccagcatgctgacgtcgccagggccatgctttctg

SEQ ID NO: 22124 - DNA, 912 bp, Homo sapiens
  SIMILAR (508)..(837): 441254mologous to Gallus gallus brush border myosin IB,accession number X70400,Smith-Waterman Score=201.
atggaaaacttccagctgcggaagggcctccaggagccaaggcagtacctggccctcagaacaccggactactattatactctcgccgtatcgtacactgaccaggtggacggcacggacgacagaacgacttcgctgcccctggaggcaggttggaggccaggattcacggcacagtttctgccccgttgtaccacagagtgctatgcaggttattgggatcccgcccagcatcagcagctggtcctgcagctcgtggcggggatcttgcacctggggaacacagtttctgtgaagacgggaattacgcccgagtggagagtgtggaccgtagtgccatcaaccgtgctatgcaaaaccccaggaagagtacagcatcggtgtgctggacatttacggcttcggatcttccagcccagggtgtccacaagaacttccagcaccaggacattgagggaagacccttttcctccttctgcagaaaaatggcttcgagcagttttgcatcacttcgtcaatgagaagctgcagcaaatctttatcgaacttaccctgaagccgagcaggaggagtatgtcaggaaggcatccgctggactccaatccagtacttcaacaacaaggtcgctgtgacctcatcgaaaacaagctgagccccccaggcatcatgagcgtcttggacgacgtgtgcccaccatgcacgccacgggcgggggagcagaccagacactgctgcagaactgcaggcggctgtggggacccacgagcatttcaacagctggagcgccgcttcgtcatccaccactacgctggcaagactcacagacctcttcctggcttgacccccacaggcaactctactaatgcccgaaacattgtcatggacacgcagcagcgaacaggcaacaactag

SEQ ID NO: 22125 - DNA, 443 bp, Homo sapiens
  SIMILAR (2)..(181): 981254mologous to Homo sapiens Human PRO1110 (UNQ553) amino acid sequence SEQ ID NO:31,accession number Y99349,Smith-Waterman Score=304.
tttcgttgagaagtatggcggccagcctcggcgctcgagagatgtaagctgcagccgcagccatgcctactacgtgtgtgcctgggaccgccgactggctgtggccatcctgacggccatcaacctactggcgtatgtggctgacctggtgcactctgcccacctggtttttgtcaaggtctaagactctcccaagaggctcccgttccctctccaacctctttgttcttcttgcccgagttttctttatggagtacttctttcctccgcctttcctctgttttcctcttcctgtctcccctccctcccacctttttctttccttcccaattccttgcactctaaccagttcttggatgcatcttcttccttccctttcctcttgctgattccttcctgtgttgttttgttagaaacacatcctgttttcaccccaatgtatt

SEQ ID NO: 22126 - DNA, 1615 bp, Homo sapiens
  SIMILAR (435)..(4): 1001254mologous to Homo sapiens protein kinase C gamma,accession number Z15114,Smith-Waterman Score=785.
ttacatgacgggcacaggcactgggctggtggggctgcgggcatccgggtgcacgaagtcggggttcacgtaggtgaagccctggaaatcggcctggtcgatgctggccaggactaggcggtctggaggggtcagcgctggcgccgcccgcgtgaagaacttgtcaaagttctcgccgctgcggccacacgggcggggtctgaaaggaggcgggatctccaatcgttccagccgctcccagtcaatccagcggaaaaagccatgtgcacggatggtaggttccccatcaggccctgagcccaggcgcttccctgggtgcttggtcaggaaccccttgcagatggccacggcttcccgggaaagcgacttggggtaggtgacagtttgttccatgatggcctgaaacagctcctcctcgtcctccccatcgaaagggaggctgtcctgccaacatctcatacagcagaactccaaaggaccaccaatcgacagacttcccatagggctggtaggcaatgatctccggggctatgtagtccggggttcccgcagaaggtgcgggttgtcgtcccggggaagacgttctccttacacatgccaaagtcagtgatcttgatgtgtccctcagcatccagcatcacattgtccagcttcaggtccctgtagatgatgccctgattgtgaaggaagaagaggccgatagcgatttctgccgcgtagaacgctgcatggggctccttaaacttgcccagctgttgaatgtggtacatcaagtctcccccggtgacgtactccatcacgaaatacaggcggtccggggtctggaaggtggagtggagctgggtgaggaagtggggccggccgccaggaccccggccccccagcgccagcacacgtttctccaccagcgtgcagtccacatcgtcgtcctggacgatcacgtcctttttcaagatcttgatggcgtagagctcatcagagcccctgcgctcggccagcatcaccttcccaaaactgccttttcctagaaccatgaggaagctgaagtcggagatgtgcaggcgtcctggactcgccccgaagaagcagcgcttggggtcggtgggactaggggaaggggaggggatgggagaggaagaggggcccatccgcacccgctcatacaattccagggggtagttacaagcctcaaacttctggaggaggctgcagttgtcagcatcggccaccggcacattgtaatactcgccctcctcctggttcagtaacttgtaccagccatccacgggcgccttgagcagctccgagacgccaaaggacatggcccccatgaagtcgttgcgggaggtccggtcccagtcccacacctccacgctgagccggcgctccacatcccctggcttcaggttgaacacaaaggtctcattccacacagggtttagcgtggctttcaccgttcgggtcttctgtttcgtcaggttccgagggtctgggatgagcttcagtttcacatagggatcagagagaccattggggtccataggaattaggttacgggcctcgccaacagttacgtggatctcatctgctgtgggagcccggatctccagctgca

SEQ ID NO: 22127 - DNA, 2567 bp, Homo sapiens
  SIMILAR (522)..(722): 391254mologous to Homo sapiens Human PRO1110 (UNQ553) amino acid sequence SEQ ID NO:31,accession number Y99349,Smith-Waterman Score=72.
  misc_feature (1)...(2567): n = a,t,c or g
ggacctgaagctggacaatgtgatgctggatgctgagggaccatcaagatcactgactttggcatgtgtaaggagaacgtcttccccgggcgacaacccgcaccttctgcgggaccccggactacatagccccggagcctcctcagttgtcggccctggaagtgcccagcggcggcagcgccagacgcgccccgttagctcagcgtcgctagcatccgcagccgccaccaggccccgcccagcggccgcagccagccagccgcgcccgggacgactgcagagcgcgccctccaaccccacccagccctcagacccttcagctgccgctgtcgtctttgcttcagccgcagtcagccactggctgccgaggcgttcgatccctagagggaggagcctgtccaaacggacgctaacggcctacctccccttcagggtgctcttacagcctgttccaaagtgtggcttaatccgtctccaccaccagatctttctccgtggattcctctgctaagaccgctgccatgccagtgacggtaacccgcaccacccatcacaaccacccggacgtcatattcggggcctggggtcccccatgatcgtggggtcccctctgggccctgacacagcccctgggtctccttcngcctgctgcagctgggtgtctacctgcgtggccttctcgctggtggctagcgtgggcgcctggacggggtccatgggcaactggtccatgttcacctggtgcttctgcttctccgtgaccctgatcatcctcatcgtggagctgtgcggggctccaggcccttttcccccctggtcttggcgcaaatttccccatcaaccttcgcctgctatgcggccctcttctgcctctcggcctccatcatctaccccaccacctatgtccagttcctgtcccacggccgtttcgcgggaccacgccatcgccgccaccttcttctcctgcatcgcgtgtggttgttaacgccaccgaagtggcctggacccgggcccggcccggcgagatcactggctatatggccaccgtacccgggctgctgaaggtgctggagaccttcgttgcctgcatcatcttcgcgttcatcagcgaccccaacctgtaccagcactcagccggccctggagtggtgcgtggcggtgtacgccatctgcttcatcctagcggccatcgccatcctgctgaacctgggggagtgcaccaacgtgctacccatccccttccccagcttcctgtcggcgctggccttgctgtctgtcctcctctatgccaccgcccttgttctctggcccctctaccagttcgatgagaagtatggcggccagcctcggcgctcgagagatgtaagctgcagccgcaggcatgcctactacgtgggtgcctgggaccgccgactggctgaggccatcctgacggccatcaacctactggcgccatcaaccgtgctatgcagaaccccaggaagagtacagcatcggtgtgctggacatttacggcttcgagtcttccagggtggccacaagaacttccagcaccaggacattgagggaagacccttttcctccttctgcagaaaaatggcttcgagcagttttgcatcacttcgtcaatgagaagctgcagcaaatctttatcgaacttaccctgaagccgagcaggtgggcggccaagcagtcagggatgggggatcctgggatcaaagactttaagactttcactatttcttctaccgctatctactacaaacttcaaagaggaaccaggaggacaagaggagcatgaaagtgaaggagagtgtcacctggaggtggctggaaggccagtggactccacatttaggagagtggttacaagaggactcggattcccccaccttcccttcggctttgggaatcccaggaaacccgccccgaacccctgaaaagtcccagagaagaaaggcaggatccggtccctgctacgtttctggggccatggctggtctgggccccggcgtagcgattcagaggggggaccccggcccctgttttgcagaaagggggctctgggcagaaggtggtccacgaagtcaagagccacaagttcaccgctcgcttcttcaagcagcccaccttctgcagccactgcaccgacttcatctggggtatcgaaagcagggcctgcaatgtcaagaaagtttcgggttccattcggttctcccaccgaccccgcgtgggtctcagcagctcgggcggcgggaggagccgcagccgccaggcagccagcttcgccaaggctctcggcagccgcggcccgcagacagccggcacgcgccctctccgccaccaggatgcccaagaggcagatggagctgctcaccctgtgggcctcaaatgtggagcactattcgatgtccaagtggaaagtgctgcgacatttgagcgtcaccggtgacgccatatcaacggatgccgtggagctcggtcttctgcaggaactaaagagccgtggtttcgattcccagccggaaactgtcttgggtacaggtcccttacacgtctggctgtaa

SEQ ID NO: 22128 - DNA, 446 bp, Homo sapiens
  SIMILAR (414)..(85): 991254mologous to Homo sapiens ATP-dependent RNA helicase,accession number AF214731,Smith-Waterman Score=555.
  misc_feature (1)...(446): n = a,t,c or g
ncaggaagtagtacaagcaggggcggcttgccagactgagtgggatacttggttttctggctctccgtaaacagtggctgggacagcaggagcctgatgcaccagggtgagtgtggcagaaaaaacaagcgtttgtctctttgggttgtattgggagtcattgagcatctctagcagctgtgagagctcagcaaaatggcctttctcaaccatccggtcagcctcatccactaccaggcacctgagctgccgaaggttcctcaaatgataatgcttttctttaattaattcccacagccggcctggagtagcaaccacaatctcaggacgacggttcagcatcctctgctgtttctgcgtggacattccaccaaccaaaatagcagttttaattcctgtaaacctggccacagannnnnnnnaagaatggcgtagcaagggcaaat

SEQ ID NO: 22129 - DNA, 256 bp, Homo sapiens
  SIMILAR (14)..(208): 1001254mologous to Homo sapiens ATP-dependent RNA helicase,accession number AF214731,Smith-Waterman Score=327.
gagaagacgacagaagggaggaaaagctgaccagcaagaagaacgtcggagacaaaagcagatgaaggttctgaagaaggagctgcgccacctgctgtcccagccactgtttacggagagccagaaaaccaagtatcccactcagtctggcaagccgcccctgcttgtgtctgccccaagtaagagcgagtctgctttgagctgtctcttccactcacacccatagcgggagagacctcatgcagatttgcatttg

SEQ ID NO: 22130 - DNA, 1632 bp, Homo sapiens
  SIMILAR (1632)..(1): 1001254mologous to Homo sapiens ankyrin repeat-containing protein ASB-2,accession number AF159164,Smith-Waterman Score=2830.
ctgggtgttctcgtatttcaggtatctaatcagcctgcctgggagcggcaaggtgtctaggagttttatacggtatttcccaatggcctttcgaacccgcagtcggcaaaggtgagccagaggtcttggaggttctgccttctccttgatgacggcccagtcctcaaagctgtcgatgtgttccttcagccgcgagcagagctgcacgttgcccacgtagtccaggaggacatcgatgatgggccccgcccagcggctcacctctggggcagatacgaactcacagaactgcaccacgctgggctccttgtcggccgcgggcgcgtcgttgaacctgctggagggctgcggggccggcgggtgcgggccgttgccgtagagtgagaagcagggctcgccgtcgcagcccaggtccatgaggaacttgagcagcgacaggcacttcatggcgaacatgatggtggcggggaaggcggtggggtgcgtggcgatataggcgtcgatgttcgcgccgtggtccagcagcagctgcattgtgcgcaggcagccgtggcggatggccacgagcaaggggctgatgacgtcgcggttggggtcggcgccgtgttgcagcagcagctcggtggcgtacacgttgttgttgaccaccgcgaagtacagcgcggagctgcgccggtcttcgtagaggcgcgcgcgctcgggcgccagcggcgtgttcacgtcgaagcgcgcgctcagcagcgcctccagcacctcgtcgtggttgcgctcggccgccaggtgcagcggactgacgccgctacggcgtatgcgcgtgcggctggtcaccggcagcagcatctgcacgatcctgtagttgcccttcttggaggcgatgtgcagcgggagcaagccgtccttgttggtcttgttggcgtcggcaccctgtgacagcagaaactccaccacctcctcatgctcattcttgcaggcctcgtagagggcagacgcgttgtcgctggcctgcgtgttgatgtcagcaccgtacttggctaagaacctcaaggcctccaactgtccactctgggcggccacgaacaagggtgtgccgtaggcattcttggattccaccttggctcctccgctcaccaggatctgcatgacctccaggtcattgcgagacacagactcgtgcagagcggtccagccgcggttgcagcggtggttggtgtctgcgttgtgctgcaccagaatcttcacggcctccgcgttcttgcgctcacaggctttgtagagcggtgtctctcgggatttgttggagatgtccggctctgcccctgcttggagcagtgacaggagacagtccaggtggcccctgcacgttgccaagtaaacggctgtttcctcctgcagggtgcgctggtcgatggtccctgggtacgctcgctgcaggactttcaggcagcccacctggccatagtatgcggcctcgtgcagcggcagccagccctccttgttgggctctgcgagattcttcccttccttgatcatggtcttcaaggcctcttcatcgccatccttgatggcctttatcaaggggtccgcaggcgccagctgggaggtcttgaacaagctgctgctgtatttctgcat

SEQ ID NO: 22131 - DNA, 2016 bp, Homo sapiens
  SIMILAR (1749)..(928): 851254mologous to Mus musculus ankyrin repeat-containing protein Asb-2,accession number AF155353,Smith-Waterman Score=1201.
ttactgggtgttctcgtatttcaggtatctaatcagcctgcctgggagcggcaaggtgtctaggagttttatacggtatttcccaatggcctttcgaacccgcagtcggcaaaggtgagccagaggtcttggaggttctgccttctccttgatgacggcccagtcctcaaagctgtcgatgtgttccttcagccgcgagcagagctgcacgttgcccacgtagtccaggaggacatcgatgatgggccccgcccagcggctcacctctggggcagatacgaactcacagaactgcaccacgctgggctccttgtcggccgcgggcgcgtcgttgaacctgctggagggctgcggggccggcgggtgcgggccgttgccgtagaggcatgagaagcagggctcgccgtcgcagcccaggtccatgaggaacttgagcagcgacaggcacttcatggcgaacatgatggtggcggggaaggcggtggggtgcgtggcgatataggcgtcgatgttcgcgccgtggtccagcagcagctgcattgtgcgcaggcagccgtggcggatggccacgagcaaggggcaccgcgaagtacagcgcggagtgcgccggtcttcgtagaggcgcgcgcgctcgggggccagcggcgtgttcacgtcgaagcgcgcgctcagcagcgcctccagcacctcgtcgtggttgcgctcggccgccaggtgcagcggactgacgccgctacggcgtatgcgcgtgcggctggtcaccggcagcagcatctgcacgatccttggcttccttctctgtaaaaccagggcctgaattagatcaatggtccctgcagctatagacaggctgtatctgatttgctcagggagcttttcaaagagacagtggggctccttctctcctggagattctgattcaccggatctgtagttgcccttcttggaggcgatgtgcagcgggagcaagccgtccttgttggtcttgttggcgtcggcaccctgtgacagcagaaactccaccacctcctcatgctcattcttgcaggcctcgtagagggcagacgcgttgtcgctggcctgcgtgttgatgtcagcaccgtacttggctaagaacctcaaggcctccaactgtccactctgggcggccacgaacaagggggtgatgccgtaggcgttcttggattccaccttggctcctccgctcaccaggatctgcatgacctccaggtcattgcgagacacagactcgtgcagagcggtccagccgcggttgcagcggtggttggtgtctgcattgtgctgcaccagaatcttcacggcctccgcgttcttgcgctcgcaggctgtgctcagggggaagcagggatggtcagcagggcctttgtagagcggtgtctctcgggatttgttggagatgtccggctctgcccctgcttggagcagtgacaggagacagtccaggtggcccctgcacgttgccaagtaaacggctgtttcctcctgcagggtgcgctggtcgatggtccctgggtacgctcgctgcaggactttcaggcagcccacctggccatagtatgcggcctcgtgcagcggcagccagccctccttgttgggctctgcgagattcttcccttccttgatcatggtcttcaaggcctcttcatcgccatccttgatggcctttatcaaggggtccgcaggcgccagctgggaggtcttgaacaagctgctgctgtatttctgcatgaccccttggaacaagcccattggggcccgggccggcgaactctcaggaggtgcagtggacctggtccatgggtagaaatgggcaggttggcggttggtacatgcagacgcggtggcctcagcagtggttgggccccttgtcttgtccgctaggctctgctcgatggccatctgcaccagttcatcctcgctcaggctgctgtacaggctgtactcctcctgcccaatggtacactggctgccccgagtgctgatctgcgtggccat

SEQ ID NO: 22132 - DNA, 890 bp, Homo sapiens
  SIMILAR (306)..(887): 621254mologous to Homo sapiens Amino acid sequence of a human secreted peptide,accession number Y12919,Smith-Waterman Score=568.
attcggcaccatgggagcggtcgggtgtattctccgccgcccccacgccctcgaggtccccgccaccgaaccagcggcggacgcgccgcgcctcccgcggcattcccgcaaccggatcgctcctcgctggggcgggacctggcctggcggctctggtcactatgagtgaaacatctttcaacctaatatcagaaaaatgtgacattctatccattcttcagtggaccatcctgaaaacaggatttaccggaggaaaatcgaggaactcagcaaaaggttcaccgccatccgcaagaccaaaggggatgggaactgcttctacagggccttgggctattccatacctggagtccctgctggggaagagcagggagatcttcaagttcaaagaacgcgtactgcagaccccaaatgaccttctggctgctggctttgaggagcacaagttcagaaacttcttcaatgctctgagggccgggcgggcgcagttttacagtgtggtggaactggtagagaaggatggctcagtgtccagcctgctgaaggtgttcaacgaccagagtgcctcggaccacatcgtgcagttcctgcgcctgctcacgtcggccttcatcaggaaccgagcagacttcttccggcacttcattgatgaggagatggacatcaaagacttctgcactcacgaagtagagcccatggccacggagtgtgaccacatccagatcacggcgttgtcgcaggccctgagcattgccctgcaagtggagtacgtggacgagatggataccgccctgaaccaccacgtgttccctgaggccgccaccccttccgtttacctgctctataaaacatcccactacaacatcctttatgcagccgataaacattga

SEQ ID NO: 22133 - DNA, 4116 bp, Homo sapiens
  SIMILAR (985)..(1113): 771254mologous to Escherichia coli phosphate regulon sensor protein phoR,accession number U73857,Smith-Waterman Score=177.
tcaatgccctgtctccggggtggcccgggggcgctggggcgctgggggtccgaggggacgggggcggcttccgtggggggcttcggggcttccgggtgggggaatcggttggtcccggtctctgtttttgggggaccgtggggggagtcggctggggggctcgcctgccgtccgggtgggtgtcgtggggcttggtgtggggggctctgtgcgtgccgggcctctcgggcgggtggtcattcgtgatgtgcaggctgcgggtgtagggcgggcccggtgccggtgcgtaccgtcgatcggctgacgcgttgggggcgagcaggtctcagggcggcgcccccgttccgaggtccgcgtgggatttcggcgacgccgatcggcggcgggccacgcgatcccgggcgggtgtactgtgggtcgtagggggatgccgcggaatatgggggatggcggcccggtgttgagcacgagcttgagcgggcgagaaaagtcgcgcgctcggggacattggatacgctccggctgggcagctcggttgaggacgttgtgccacgcccaggccccggtggcggggtcatcagtgcgatcccccgccaggcgacgtgtgcgtggcgtggagggagatgcagctgcgaaataaaaaacgccgccgttgacctgggcaatctgattaaaccgctttcttaccgccccgaattcgctgcccgacccgtggtgctgaccacggaagaggccgtaattttctgttgtaacgttctggcgcaacaaatttttggtttgcgctggagatgatgaatgagcagccgctggaaggcgcggtacgcgaaaaagcgttgcacaccatgcgcgagcagacccagcggatggaaggactggtgaagcaattgtgacgctgtcgaaaatagaagccgcaccgacgcatttgctcaatgaaaaggttgatgtgccgatgatctgcgcgttgttgagcgcgaggctcagactctggtctataacgccgtgaatcatacgccggaaggcacgcatatcaccgtacgctggcagcgagtgccgcacggtgccgaatttagcgttgaagagtaaagcgagggctggccagtcccagtgcccaaaccacacagagccgttgttggtgcaaatgcccacatttctttctgtccccctcaggaactcagcaaaaggttcaccgccatccgcaagaccaaaggggatgggaactgcttctacagggccttgggctattcctacctggagtccctgctcccagatgctttccagcctctgcttccaccacaggcctgggtcagcccaggtgagtcgcagggagcaggtattcgtgacccactctggccagtcccagtgcccaaaccacacagagccgttgttggtgcaaatgcccacatttctttctgtccccctcaggaactcagcaaaaggttcaccgccatccgcaagaccaaaggggatgggaactgcttctacagggccttgggctattcctacctggagtccctgctcccagatgctttccagcctctgcttccaccacaggcctgggtcagcccaggtgagtcgcagggagcaggtactcgtgacccactttggctgtggctgttccggctgtggctccttcggcttctttgtcttcttcttcttctgcttggagagacagctcaaagcagactcgctcttacttggggcagacacaagcaggggcggcttgccagactgagtgggatacttggttttctggctctccgtaaacagtggctgggacagcaggtggcgcagctccttcttcagaaccttcatctgcttttgctccgatgggcaggtttgggtgttatcgtatttcaggtatctaatcagcctgcctgggagagaacaggtgtctaggagttttatacggtatttcccaatggcctttcgaacccgcagtcggcaaaggtgagccagaggtcttggaggttcctggatggcggccacggccaacaaatgctctgctaacagctgtaacgattgatggttgaggttgagggtggataatgttttggggggttggggtaaacgcaggtggttaggggatcgggggaaagcgctttccaccagcgtttttggttgggccaaaacccaggaaggcaaattgccgcaaaaaaagggaatcaagggcgaccacgaaatggttgaatccccatactctcgggactcaaggcgcagcgcgtgcgggctgagcagcgcggttcgtgcagacagcccagcctcggagcgaacgacgtacagcgcacctgaggtacctacagcgtgaggcttcacagttctatggtgcgatgttgtcgcgtcgcgggctgtttttgcgtgctgttgtgctcgccgtctgtctggcttgccttgcgtgcgctccgtgtctcccgtgggggttgcttgtgtgtggtgctccgtgtgcttttgtgcatgccggtgtgctggtgcttccctttccctccgtgcgcgggggttgtcctgtgccgctcctcggcggcgctgtttttcctgtggtggtttcggcgtttgtttgccgtcgtgtgtgtttctctggggttccgcgtttggggccgcgcttttgttcctggggcatgtcctctcccgtgtgtgctctcgtgtgctcttggctgccgcttcttgtgccggcgtggtctggcctttccgtcgtgacttctgtcgtctgttcgtgtccagctcgtgtctcgctgggacttctttcggcgcgtcttgcggttccgttccgtgtcgttcgggtgtcgcgccgttcctgttgctgtttggtcgctgtgttcttcgctgcacactcttctctgtcgtgttcttgtgcggcgtcggctggcgtgcatctttttgttggcttttggttgccgccctggtcggtgccgcgtgagggttcttttgccgtgttgttcccccgtggtttacgctgggtggttgcttgcctttgcgctgcgcctggttggggatggctgttggttcggccggtaatacggcctggccccaggttttggctggctttccctgttggcgtgtccggttggcctgccgttgtgttggttgggaatcggcgtgttgctgcgttttggttcgcccgttgggtcttgcgggctgcgcggcgcgcgtggtgtttggcgcgtgtgcgttcgcctttctgcgcgcctgtgctgggtcggtgccccggtttggctcctgggctgggtgtccgttgtctcgggtgatgcgtctgtgtgggcacgtgttggacgtcgattcgcgtgcggctgactctatgctccctgtcgcgtgataatgtgtctgtgcctttcctggacttggccgtgtacgcgttggccgcttgtcagtgtctgctctgcgcatacgctgctgtgctgtgttgtgactgcgcgtggctgtgctgctgtcacctactggatgcgtatcgtgtcgcggcgaggtcttgtcgtgtgcactagtgagactcgatgcagactggaccgtgttcgtcgtcgtgagcgtgtcgtccgttcggccggcacagcgtccacaatgctgtgtgtctcctccgtctgcgcctgcagccaccttgtccatgctgcatggttggatctccagagggcgatagtcgtagagtcgatagtcacaaagattgtgactgggcgacgcatacacatgaggacgaatcatgaccaccatgcgcacaaacatcatcagcgctgatgacgacacagatgagccgcacacaatgacgctgacagcgatgataactgttctcacgtcgatgacgagactgacaactacaatgccgatgctgctacgcgcagactgagacacgatgatcttgagacacactgagcctgtaatatgcacacataagatgatacgatctacgatgagaacacaagcggttccagcattgatgacttcatgggatgcactccgtctgggacgtcggcggctgatggagcgtaaagtgagatcgacaacgcgtcgtgatgctagcttggtgtcgtagtcgagtcgtccattccctcttgatttcacgccctcggccgaaggacacgcgatcgcgacactcgtcagtcccagggcaagttgctgtacttcattgtaatgcat

SEQ ID NO: 22134 - DNA, 2492 bp, Homo sapiens
  SIMILAR (1)..(2181): 851254mologous to Homo sapiens ATP-dependent RNA helicase,accession number AF214731,Smith-Waterman Score=3020.
atgacatcagaaaacctggtccaaactgctccaaaaaagaagaaaaataaagggaaaaaagggttggagccttctcagagcactgctgccaaggtgcccaaaaaagcgaagacatggattcctgaagttcatgatcagaaagcagatgtgtcagcttggaaggacctgtttgttcccaggccggttctccgagcactcagctttctaggcttctctgcacccacaccaatccaagccctgaccttggcacctgccatccgtgacaaactggacatccttggggctgctgagacaggaagtgggaaaactcttgcctttgccatcccaatgattcatgcggtgttgcagtggcagaagaggaatgctgcccctcctccaagtaacaccgaagcaccacctggagagaccagaactgaggccggagctgagactagatcaccaggcaaggctgaagctgagtctgatgcattgcctgacgatactgtaattgagagtgaagcactgcccagtgatattgcagccgaggccagagccaagactggaggcactgtctcagaccaggcgttgctctttggtgacgatgatgctggtgaagggccttcttccctgatcagggagaaacctgttcccaaacagaatgagaatgaggaggaaaatcttgataaagagcagactggaaatctaaaacaggagttggatgacaaaagcgccacctgtaaggcatatccaaagcgtcctctgcttggactggttctgactcccactcgagagctggccgtccaggtcaaacagcacattgatgctgtggccaggtttacaggaattaaaactgctattttggttggtggaatgtccacgcagaaacagcagaggatgctgaaccgtcgtcctgagattgtggttgctactccaggccggctgtgggaattaattaaagaaaagcattatcatttgaggaaccttcggcagctcaggtgcctggtagtggatgaggctgaccggatggttgagaaaggccattttgctgagctctcacagctgctagagatgctcaatgactcccaatacaacccaaagagacaaacgcttgttttttctgccacactcaccctggtgcatcaggctcctgctcgaatccttcataagaagcacaccaagaaaatggataaaacagccaaacttgacctccttatgcagaaaattggcatgaggggcaagcccaaggtcattgacctcacaaggaatgaggccacggtggagacgctaacagagaccaagatccattgtgagactgatgagaaagacttctacttgtactacttcctgatgcagtatccaggccgcagcttagtgtttgccaacagtatctcctgcatcaaacgcctctctgggctcctcaaagtccttgatatcatgcccttgaccctgcatgcctgtatgcaccagaagcagaggctcagaaacctggagcagtttgcccgtctggaagactgtgttctcttggcaacagatgtggcagctcggggtctggatattcctaaagtccagcatgtcatccattaccaggtcccacgtacctcggagatttatgtccaccgaagtggtcgaactgctcgggttaccaatgaggccttcagtctgatgctcattgggcctgaggatgtgatcaactttaagaagatttccaaaccgctcaagaaagatgaggatatcccactgttcccccgtgcagacataaatacatggatgtggtcaaggagcgaatccgtttagcccgacagattgagaaatgtgagtatcggaactttcaggggcttgcctgcacaactcttggattgagcagggcagcagctgccctggagattgagctggaagaagccatgtataagggaggaaaagctgacccagccaagaagaacgtcggagacaaaaggcaggatgaaggttctgaagaaggagttgcgccaccttgctgtcccagccacttgtttaccggagagccggaaaacccaagtatccccactcagtcttggcaagccgccccctgctttgtgtctgccccccaagttaagagcgagtcctgcctttgagcttttctctccaaagcagaagaagaagaagacaaagaagcccgaaggaggccacagccgggaacagcccacagcccaagttacaagtgcaatttaactgccgtggttcaagtgtgtcagtgactgcacattggtttctgttctctggctaatttgcaaaacctttccccacccttgtgtttcactcccccaccaaccccaggtaaaaaagtctcctttttttccactcacacccatagcgggagagacctcatgcaaatttgcattgttttggagtaagaattcaatgcagcagcttaatttttttgtattgcagtgtttataggcttcttgtgtgttaaacttgatttcataaattaaaaacaatggtcagagccattgtgtcatcctgaaaaaaaaaaa

SEQ ID NO: 22135 - DNA, 470 bp, Homo sapiens; identical to SEQ ID NO: 22042
  SIMILAR (206)..(3): 1001254mologous to Homo sapiens adrenal gland protein AD- 004,accession number AF110777,Smith-Waterman Score=378.

SEQ ID NO: 22136 - DNA, 477 bp, Homo sapiens
  SIMILAR (214)..(474): 1001254mologous to Homo sapiens RAD17 isoform 3,accession number AF098533,Smith-Waterman Score=452.
atggcagttaaacataatgtcatgattttacagtttgacaaacagcagcagctgggaaggttttttaaggtagttgatgagttagataaccaaatgagagaaggtggagttattgttgattaccatggttgtgatttcttccctgaacgctggtttcatatagtttttgtgctgagaacagataccaatgtattgtacgaaagacttgaaacaagattgaaaatggaagccctgactgacagggaacatggaatgatagaccctgacagcggagatgaagcccagcttaatggaggacattctgcagaggaatctctgggtgaacccactcaagccactgtgccggaaacctggtctcttcctttgagtcagaatagtgccagtgaactgcctgctagccagccccagcccttttcagcccaaggagacatggaagaaaacataataatagaagactacgagagtgatgggacatag

SEQ ID NO: 22137 - DNA, 1495 bp, Homo sapiens
  SIMILAR (959)..(1123): 851254mologous to Homo sapiens adrenal gland protein AD- 004,accession number AF110777,Smith-Waterman Score=232.
gtaaaataccatgaattcacttgctcctttaaaaagcagataactgtccctgaagatgcgaggttactgaaatgagatgtcagaggtagaccttcaagactattcctagccgacccaccaccaccccacacagtgaacagggaatactaagctcaaatattcgtccaacgtaatcctgtaatcagtggggtgccgggttgagctcgcaaatccccgctgcaggacagggctctgcaccctcaatcttctcatccccagatgggatgggcgggtcgggaggaggagcgacgagagcccaggaaagcttgaaggcagagatagactcgcgtctctaagacatatacataatatagccgcaaccgcggcggccttactttcccggagctgcatccccttttgggcgaagagcggaggcgaccaggaactaccctaggtgaaagggcagccacctggccctacccgggctcaacgccgagcctctcggaggtacggcctcccgggggaccttccagactggtcggcgcaagcgaagggcggggaccaccgaaggagtgtgtgacttacgcatccagcgcactgcctgacccgaagtaccgacccgagttatgcccaccctccaacttttgcgacggaaaatgggtattgaaaaggcaggacccccagggggtgggaaaaaccccccttaggccaagaacttgcgtcaaaatcaggactgaaatacagttaatgtgggtgatttagctcgagaagagcaattgtatgatggctatgatgaagagtatgactgtcccattttagatgaagacagagtagttgatgagttagataaccaaatgagagaaggtggagttattgttgattaccatggttgtgatttcttccgtgaacgctggtttcatatagtttttgtgctgagaacagataccaatgtattgtaccgaaagactttaaaccagggggttataatgagaagaaactaacagacaatattcagtgtgagatttttcaagttctttatgaagaagccacagcatcctacaaggaagaaatccgtgcatcagctgccccagtaataaacccagaagagctagaaaataatgtagatcagatcttgaaatggattggagccagtgggatccaaagatcataactcttgacttataaggctagctacttaataatcgactcttgttgatatctctgccgacatcatagaaattgttcaagtgtcagtaacactttattaaaatcatgttgcagaaccagcaggtggatagtatataggtttatgcctgtgtttctttttctccatgagaaagctaaacatgaaatataatgaatatagtattattaaggattgagacaaaaactgtgattttaatacttaaattgctaaagaataaataaatctgacaaaatgggtggatatcttttaagtttattacagaaaaaaatgcagatgatctcttaaaataaaactaaagataaagcaaca

SEQ ID NO: 22138 - DNA, 3118 bp, Homo sapiens
  SIMILAR (545)..(799): 681254mologous to Homo sapiens RF-C/activator 1 homolog,accession number AF085736,Smith-Waterman Score=283.
  misc_feature (1)...(3118): n = a,t,c or g
ggaggccgtacctccgagaggctcggcgttgagccgggtagggccaggtggctgccctttcacctagggtagtccctggtcgcctccgctcttcgcccaaaaggggatgcagctccgggaaacaagtgaattcatggtattttacttttttgggaaatactggaaatgaagacctgcaactgtaatttgaaataaggaaaactttaattttcagtataaaaattgctcaaatagaattgcctgattttaatgacaaaaggtgaattatagtttaatgtactgcaagtcctaaactacggatgggaactattacagtttataatgtcaaaaacttttcttagaccaaaggtatcttccacaaagtatatgggagtccacatttatgtaagaaatgaaactataaaatgtataaataatttgcaaatcagaattgctgtcgaaagttttactataatgaaagatattttcatactctcaaaaatatagaggaaaggggccaagattatagtaccagtcacaatcttttgatgaggacgaaatgaatcaggtaacagactgggttgacccatcatttgatgattttctagagtgtagtggcgtctctactattacctgccacatcattaggtgtgaataactcaagtcatagaagaaaaaatgggccttctacattaagaaagcagcagatttccagcgagaaaaaagaggaaatctatcttccttagaacagatttatggtttagaaaattcaaaagaatatctgtctgaaaatgaaccatgggtggataaatataaacccagaaactcagcatgaacttgctgtgcataaaaagaaaattgaaggaagtcgaaacctggttaaaagctcaagttttaggaaggcaaccaaaacagggtggatctattttattaataacaggtcctcctggatgtggaaagacaacgaccttaaaaatactatcaaaggagcatggtattcaagtacaagagtggattaatccagttttaccagacttccaaaaagatgatttcaaggggatgtttaatactgaatcaagcttccatatgtttccctatcagtctcagatagcagttttcaaagagtttctactaagagcgacaaagtataacaagttacaaatgcttggagatgatctgagaactgataagaagataattctggttgaagatttacctaaccagttttatcgggattctcatactttacatgaagttctaaggaagtatgtgaggattggtcgatgtcctcttatatttataatctcggacagtctcagtggagataataatcaaaggttattggttcccaaagaaattcaggaagagtggtctatctcaaatattaggtttaacccttgggcaccaacaattatgatgaaatttcttaatcgaatagtgactatagaagctaacaagaatggaggaaaaattactgtccctgacaaaacttctctagagttgctctgtcagggatgttctggtgatatcagaagtgcaataaacagcctccagttttcttcttcaaaaggagaaaacaacttacggccaaggaaaaaaggaatgtctttaaaatcagatgctgtgctgtcaaaatcaaaacgaagaaaaaaacctgatagggtttttgaaaatcaagaggtccaagctattggtggcaaagatgtttctctgtttctcttcagagctttggggaaaattctatattgtaaaagagcatctttaacagaattagactcacctcggttgccctctcatttatcagaatatgaacgggatacattacttgttgaacctgaggaggtagtagaaatgtcacacatgcctggagacttatttaatttatatcttcaccaaaactacatagatttcttcatggaaattgatgatattgtgagagccagtgaatttctgagttttgcagatatcctcagtggtgactggaatacacgctctttactcagggaatatagcacatctatagctacgagaggtgtgatgcattccaacaaagcccgaggatatgctcattgccaaggaggaggatcaagttttcgacccttgcacaaacctcagtggtttctaataaataaaaagtatcgggaaaattgcctggcagcaaaagcactttttcctgacttctgcctaccagctttatgccgccaaactcagctattgccataccttgctctactaaccattccaatgaggaaatcaagcttcagattttctttttattccaaggatattggggaagggctcccttntggaaggcggacactttggggaaggattggaaaatgggaaggccctggactggacaggggaacatgggatgattagacccctgacagcggagatgaagccccagcttaatgggaggacattctgcagaggaatctctgggtgaacccactcaagccactgtgccggaaacctggtctcttcctttgagtcagaatagtgccagtgaactgcctgctagccagccccagcccttttcagcccaaggagacatggaagaaaacataataatacgaagactacgagagtgatggggacatagaagccagcctgctaatcagattgctacttcacagctttcatttttgttttcatttcagtggtacttcagcagagttaatatgcttttctgatgaattacacaacagtttgttaattcttcattcttgtagtatttcatcacaagaaacctactcttctgtcatcttgaagtaaatagaagatcaagccctccaaacccccttaaattttttcgggtatttattaaacccggtgagtggtttaaggagcggtcagtgtgtataaagtgtgtttgaacattatgcccaaatatcaagatgtgaaggactaattcaggatgcaaaaacgttattggggggttgtaaatatcaactattcaacagtttaggatgcaattacgagtgtaaactgtgtgccttatttacactttattgtctcccgcttctcagatagttttgatgtgttgtacagtggaatatcttagatactttttggaaagtatttacataagttatatcacaattaaaatgttgaatttaaaaaaaaaaaaaaaaaa

SEQ ID NO: 22139 - DNA, 412 bp, Homo sapiens
  SIMILAR (20)..(160): 1001254mologous to Homo sapiens ribosomal protein S10,accession number U14972,Smith-Waterman Score=250.
  misc_feature (1)...(412): n = a,t,c or g
gctgcgagaagacgacagaagaggggaagctgacagagatacctacagacggagtgctgtgccacctggtgccgacaagaaagccgaggctggggctgggtcagcaaccgaattccagtttagaggcggatttggtcgtggacgtggtcagccacctcagtaaaattggagaggattcttttgcattgaataaacttacagcccnnnnnnnnnnnnnngaaaacnnnnnnnnnncnnnnnnnnnnnnngggnnnnnnnnnnnnncgggggcgcttttaaaaaaaaacattttttttnnnnnnnnnnnnnnnagaggnnnnnnnnnnnnngggcccacaaatattttttttggtgggcggtttaaaaaaacgggggaggggaaaaacccttgggctaaccaattatattgtgn

SEQ ID NO: 22140 - DNA, 833 bp, Homo sapiens
  SIMILAR (52)..(543): 361254mologous to Homo sapiens ribosomal protein S10,accession number U14972,Smith-Waterman Score=158.
  misc_feature (1)...(833): n = a,t,c or g
gtcacgaggctttttttccagcccgggtacgggaccctgcagccgcagagactgttgatgcctaagaagaaccgctattgccatttatgaaactcctttttaagggagggagtcatggtgcccaagaaggaatgtccccatccctaagcacccggagctggcagaacagaaatgtgcccaaccttcatgtcatgaagcccatgcaagtctctcaagtccccgaggctacgtgaaaggaacagtttgcctgggagacatttctactggtaccttaccaaatgagggtaccaaggggtttnaatttcctnccgtgattaccttgcatctgcccccaggagattgtgccttgccacccctacggccgtagcccgtccagaagactggcaaggccttcgggctaaaaggttttggaggggtgagcgaacctgcgaggacttcacaagaacggggaagctgacaagagattacctaccagacgggagtgcctgtgccaccctggtgcctgacaagaaagccgaggctgggggcttgggtcaagcaacccgaatttccagtttagaggcggatttggtcgtggacgtggtcaagccacctcagtaaaatttggagaggattctttttgcattggaataaacttacagccnnnnnnnnnnnnngggggggggcccgttttaaagattccttggggggcccaaacttaacccgggctggaaaggtaatatttttttccttatggggggccaattaaaaacctagttggggatttttgggagggaccttaattttgggggggggacatattggcccaacctccttacaaaaattaaagcttt

SEQ ID NO: 22141 - DNA, 396 bp, Homo sapiens
  SIMILAR (157)..(345): 981254mologous to Homo sapiens ribosomal protein S10,accession number U14972,Smith-Waterman Score=331.
aagcacccggagctggcagacaagaatgtgcccaaccttcatgtcatgaaggccatgcagtctctcaagtcccgaggctacgtgaaggaacgattaccttcatctgcccccggagattgtgcctgccaccctacgccgtagccgtccagagactggcagcctcggcctaaaggtctggagggtgagcgacctgcgagactcacaagaggggaagctgacagagatacctacagacggagtgctgtgccacctggtgccgacaagaaagccgaggctggggctgggtcagcaaccgaattccagtttagaggcggatttggtcgtggacgtggtcagccacctcagtaaaattggagaggattcttttgcattgaataaacttacagccaaaaaaca

SEQ ID NO: 22142 - DNA, 412 bp, Homo sapiens; identical to SEQ ID NO: 22139
  SIMILAR (20)..(160): 1001254mologous to Homo sapiens ribosomal protein S10,accession number U14972,Smith-Waterman Score=250.
  misc_feature (1)...(412): n = a,t,c or g

SEQ ID NO: 22143 - DNA, 875 bp, Homo sapiens
  SIMILAR (74)..(319): 511254mologous to Homo sapiens ribosomal protein S10,accession number U14972,Smith-Waterman Score=135.
  misc_feature (1)...(875): n = a,t,c or g
gcgtcgaccgcagcaccgcgcatgctccttctttttcagccccggtaccggaccctgcagccgcagaagatgtttgatgcctaagaagaaccgctattgccatttatgaaactcctttttaaggaagggagtcatggtggccaagaaggatgtccacatgccctaagcacccggagcatggcagaccaagaatggtgccccaacctttcatgtcatgaaaggccatgcaggtctctcaaagtccccgagggctaccgtgaaaggaaccagttttgcctggggagacattttttactgggtacctttaccaattgagggtaccaaggggtttnaatttcctnccgtgattacctttcatcttgcccccgggagatttgttgccttgccaccgctaccgcccgtagcccgtccaagagacttggcaaggccttcgggctaaaaaggtcttgggaggggttgaggcgacctggcgaggatttcacaagaggggggaagtttgacagaggttaccttacaggacggattgctgttgccaccctggtggccgacaagaaagccgaggctgggggcttgggtcaagcaacccgaatttccagtttagaggcggatttggtcgtggacgtggtcaagccacctcagtaaaatttggagaggattctttttgcattggaataaacttacagccnnnnnnnnnnnnngggggggggcccgttttaaagattccttggggggcccaaacttaacccgggctggaaaggtaatatttttttccttatggggggccaattaaaaacctagttggggatttttgggagggaccttaattttgggggggggacatattggcccaacctccttacaaaaattaaagcttt

SEQ ID NO: 22144 - DNA, 2622 bp, Homo sapiens
  SIMILAR (7)..(927): 461254mologous to Bacteriophage N15 gp21,accession number AF064539,Smith-Waterman Score=779.
atgtttaactcagtcccggtgcaaaacgaggatggatcgttcaacttcgaaggggtaaaggctgaattcaggccgggaactcagacgcaggaatacatcaagggaatggaagatagcgctagtgaggtaactgtaaatcgtgaggttactaccgataacccatacacgatctcagtaaccaacaaaacgctgtcggcaatccgtatcaaaatgttcatgcctcgcggcgtacgaattgaaagtaacggtgataaaaatggcgttcgagttgagtacgaggtgcagcaagcggttgatggcggttcgtttgagactgttcttactgacgtaatcgaaggtaaaacaatgtcaggttatgatcgaagccgtcgcgtaaacctgcctaacttcaacaatcaggtaatattcagagttgttcgaaagacgcctgattccaatgactcgaatgtcgttgatgcaatccaggtaagaagctatgctgaggtcattgatgccaagttccgatatcctctgactggtcttcttttcgtagagttcgattcgaagatgttccccaaccagttacctacgatctcaattcgtaagcgctggaagattgtaaacgttccgtcgaactacgatccagaatcgcgaacatacaacggcaattgggatggcactttcaaaaaagcatggactaataatccggcatgggttctttatgacctgatgattaatcagcgttatggtctggatcagaaagagcttggaatctccgtagacaaatgggcgctctatgaggcggcgcaatattgcgaccagatggtccctgacggcaaaggcggcacggaacctcgctacctttgtgacgtgataatccagtctcagactgatgcgccgcgtgaacctgcgtacatcttcactaacgacaacgtagttaatggtgacttctcatatactttcgcaagcgagaagagcatgtacacgacgtgcaacgtgatgtttgatgatgagcaaaacatgtatcaacaggacgttgagccagtattcgatcgtgaggccactctacggttcgggaacaacgtaacgagcattacagcgatcgggtgcacacgtcgaagcgaggccaaccgacgcgggagatggattctgaaaaccaacctccgcagcactacggtaaacttcgctaccggactggaagggatgattccgacaatcggagacgtggtggcaatatctgataacttctggtcaagtaacttgacgatgaacctgtcagggcgattgctcgaagtgtcaggtagtcagattttcctgccgttccgcgttgatgcgcgcgcaggtgactttattatcgtaaataagccagatggcaagcccgtgaagcgcacaatctcaagtgttagtgcggatggtaagaccatagagattaacatcggctttggctttcctgtgaagcctaacacggtattcgcaatcgaccgcaccgaccttgcgttgcagcagtacgtagttacaaaaatcgacaagggcgatgatgatgaggaatttacctacaaaatcacggcggtggagtacgatcctaataagtacgatgaaattgattacggggttaacatcgacgaccgaccgacaagcatcgttgagccagatcagatccctaagcctgaaaacgtgaaagtgtcctcagagtcgagaatcgtccaggggatgagcgtagaaacgatgattgttagctgggataaagtgccgtacgcagttttctatgacgtacagtggagaaaggataacggcaactggcaaaacgttccgcagacagcaaacaaagaggtttatgttgaagggatttacgctggcaactatcagggtgaaccgggccgaccgattaacctcacagctacggatgatgttgtttttggtatccgtacaaaatgggggttctctgatggttctggagatacagcctatacagagttgcaacagtcaccggatggaacagtggataacgcaagtttgctttcattgattccgtatccgcagcatgagtattatcactcaccgatgccgggaggtaatattgtgtggtatcgggtaaggacggttgacaggatcggtaacgtatctcagtggactgattttgtcagaggcatggcatcaacaaacgttgacgatatcatcggggagatttctgtcgatatcgaaaactcgccgggttacgagtggcttgttgataacgcaaccgacaacgcgtcgcagaacgcagctaatgcagaggcagcaattgagaacgcactagctaatgacaaagacgcgatctacatgaagaaggagaacggaaaacgaaaagcagacacctacatgcaaccaaatggctaccttatgaattttgttcccaccgcaacttctcaatatcacatcatatcacccttgcagaatagttctttgggcctaatggtggaaccatctactttcacaacaaaatattttgaggtgttagtcaataagtctccttattctaacctgctacaagaaagcaacctgtggtgccaagagcctgtgatagctgatacatcagctgcctcttattccaggtcagctcatcaacaatcttcactagggaaacatcaccctaattacaactga

SEQ ID NO: 22145 - DNA, 2763 bp, Homo sapiens
  SIMILAR (199)..(1809): 741254mologous to Loligo forbesi neurofilament-like protein,accession number X66695,Smith-Waterman Score=1899.
atggaggacaatctaatctcaatcaacaaaatcaagatcctgttatctgtatctgatggtgaaattgacgaaacattcagcctaaagcagttgatgtttaactcagtcccggtgcaaaacgaggatggatcgttcaacttcgaaggggtaaaggctgaattcaggccgggaactcagacgcaggaatacatcaagggaatggaagatagctctagtgaggtaactgtaaatcgtgaggttactaccgataacccatacacgatctcagtaaccaacaaaacgctgtcggcaatccgtatcaaaatgttcatgcctcgcggcgtacgaattgaaagtaacggtgataaaaatggcgttcgagttgagtacgaggtgcagcaagcggttgatggcggttcgtttgagactgttcttactgacgtaatcgaaggtaaaacaatgtcaggttatgatcgaagccgtcgcgtaaacctgcctaacttcaacaatcaggtaatattcagagttgttcgaaagacgcctgattccaatgactcgaatgtcgttgatgcaatccaggtaagaagctatgctgaggtcattgatgccaagttccgatatcctctgactgttcttcttttcgtagagttcgattcgaagatgttccccaaccagttacctacgatctcaattcgtaagcgctggaagattgtaaacgttccgtcgaactacgatccagaatcgcgaacatacaacggcaattgggatggcactttcaaaaaagcatggactaataatccggcatgggttctttatgacctgatgattaatcagcgttatggtctggatcagaaagagcttggaatctccgtagacaaatgggcgctctatgaggcggcgcaatattgcgaccagatggtccctgacggcaaaggcggcacggaacctcgctacctttgtgacgtgataatccagtctcagactgatgcgtacaaggtggttcgagatatttgctcaatcttccgtggaatgagtttttggaatgggccgcgtgaacctgcgtacatcttcactaacgacaacgtagttaatggtgacttctcatatactttcgcaagcgagaagagcatgtacacgacgtgcaacgtgatgtttgatgatgagcaaaacatgtatcaacaggacgttgagccagtattcgatcgtgaggccactctacggttcgggaacaacgtaacgagcattacagcgatcgggtgcacacgtcgaagcgaggccaaccgacgcgggagatggattctgaaaaccaacctccgcagcactacggtaaacttcgctaccggactggaagggatgattccgacaatcggagacgtggtggcaatatctgataacttctggtcaagtaacttgacgatgaacctgtcagggcgattgctcgaagtgtcaggtagtcagattttcctgccgttccgcgttgatgcgcgcgcaggtgactttattatcgtaaataagccagatggcaagcccgtgaagcgcacaatctcaagtgttagtgcggatggtaagaccatagagattaacatcggctttggctttcctgtgaagcctaacacggtattcgcaatcgaccgcaccgaccttgcgttgcagcagtacgtagttacaaaaatcgacaagggcgatgatgatgaggaatttacctacaaaatcacggcggtggagtacgatcctaataagtacgatgaaattgattacggggttaacatcgacgaccgaccgacaagcatcgttgagccagatcagatccctaagcctgaaaacgtgaaagtgtcctcagagtcgagaatcgtccaggggatgagcgtagaaacgatgattgttagctgggataaagtgccgtacgcagttttctatgacgtacagtggagaaaggataacggcaactggcaaaacgttccgcagacagcaaacaaagaggtttatgttgaagggatttacgctggcaactatcaggttcgcgtgcgctccgtcgctggttcgggcacgacttcaggctggtcaaatatcgtcgcggcaacgttgacgggtaaacagggtgaaccgggccgaccgattaacctcacagctacggatgatgttgtttttggtatccgtacaaaatgggggttctctgatggttctggagatacagcctatacagagttgcaacagtcaccggatggaacagtggataacgcaagtttgctttcattgattccgtatccgcagcatcgctattaccctcaggttatgccgctcgaaccctttaagatcaacgttcttgagcagatcacgaagcatatcgaaaaactgcagtgcggaggtgtagtcaaacaactcagcaggcgtgggaacaatcagcacatcagcagcacatacgacattaatcgtgccgatacccaggttaggcgcgctgtcaataactatgacatcatagtcatgagcaacagtttcaatggccagtcggagcatcaggtgtggatcgatagaaaggcaggagagtgtcttctgcatgaatatgaagatctggtacccatccgtgatacattgaggctgttccctgggggtcgttaccttccacgagcaaaacacgtagccccttcagagccagatcctgagcaagatgaacagaaactgaggttttgtaaacgccacctttatgggcagcaaccccgatcaccggtggaaatacgtcttcagcacgtcgcaatcgcgtaccaaacacatcacgcatatgattaa

SEQ ID NO: 22146 - DNA, 1452 bp, Homo sapiens
  SIMILAR (199)..(1176): 751254mologous to Loligo forbesi neurofilament-like protein,accession number X66695,Smith-Waterman Score=1214.
atggaggacaatctaatctcaatcaacaaaatcaagatcctgttagctgtatctgatggtgaaattgacgaaacattcagcctaaagcagttgatgtttaactcagtcccggtgcaaaacgaggatggatcgttcaacttcgaaggggtaaaggctgaattcaggccgggaactcagacgcaggaatacatcaagggaatggaagatagctctagtgaggtaactgtaaatcgtgaggttactaccgataacccatacacgatctcagtaaccaacaaaacgctgtcggcaatccgtatcaaaatgttcatgcctcgcggcgtacgaattgaaagtaacggtgataaaaatggcgttcgagttgagtacgaggtgcagcaagcggttgatggcggttcgtttgagactgttcttactgacgtaatcgaaggtaaaacaatgtcaggttatgatcgaagccgtcgcgtaaacctgcctaacttcaacaatcaggtaatattcagagttgttcgaaagacgcctgattccaatgactcgaatgtcgttgatgcaatccaggtaagaagctatgctgaggtcattgatgccaagttccgatatcctctgactggtcttcttttcgtagagttcgattcgaagatgttccccaaccagttacctacgatctcaattcgtaagcgctggaagattgtaaacgttccgtcgaactacgatccagaatcgcgaacatacaacggcaattgggatggcactttcaaaaaagcatggactaataatccggcatgggttctttatgacctgatgattaatcagcgttatggtctggatcagaaagagcttggaatctccgtagacaaatgggcgctctatgaggcggcgcaatattgcgaccagatggtccctgacggcaaaggcggcacggaacctcgctacctttgtgacgtgataatccagtctcagactgatgcgtacaaggtggttcgagatatttgctcaatcttccgtggaatgagttttttgcaatggccgcgtgaacctgcgtacatcttcactaacgacaacgtagttaatggtgacttctcatatacttttcgcagcgagaagagcatgtacacgacgtgccacgtgatgtttgatgatgagcaaacatgtattcacaagacgttgagccattttcgatccgatggtggaaagccaggtcttgctgactggtatcgcgaagcgtttcaggttggtcgggtaatttcagtatcttgcgaaacgttgaagatctcatcccgtgagcataacggaacgacttataattcattgcaggctgctgatttccctaagttggtatttagtcagcgaggacaaagcaatcaacaacgagcaccgcagcaacaacagcgaacgcaatcacagccacagccaaatcctcaatcaactttcgatgatgatatcccgttctaa

SEQ ID NO: 22147 - DNA, 1902 bp, Homo sapiens
  SIMILAR (16)..(1083): 451254mologous to Bacteriophage N15 gp21,accession number AF064539,Smith-Waterman Score=853.
  misc_feature (1)...(1902): n = a,t,c or g
atgattcaaaaagtgataagcggatctaaaggtgggtcacagaagcctcataacccggttgagatggaggacaatctaatctcattcaacaaaatcaagatcctgttagctgtatctgatggtgaaattgacgaaacattcagcctaaagcagttgatgtttaactcagtcccggtgcaaaacgaggatggatcgttcaacttcgaaggggtaaaggctgaattcaggccgggaactcagacgcaggaatacatcaagggaatggaagatagctctagtgaggtaactgtaaatcgtgaggttactaccgataacccatacacgatctcagtaaccaacaaaacgctgtcggcaatccgtatcaaaatgttcatgcctcgcggcgtacgaattgaaagtaacggtgataaaaatggcgttcgagttgagtacgaggtgcagcaagcggttgatggcggttcgtttgagactgttcttactgacgtaatcgaaggtaaaacaatgtcaggttatgatcgaagccgtcgcgtaaacctgcctaacttcaacaatcaggtaatattcagagttgttcgaaagacgcctgattccaatgactcgaatgtcgttgatgcaatccaggtaagaagctatgctgaggtcattgatgccaagttccgatatcctctgactggtcttcttttcgtagagttcgattcgaagatgttccccaaccagttacctacgatctcaattcgtaagcgctggaagaatgtaaacgntccgtcgaactacgatccagaatcgcgaacatacaacggcaattgggatggcactttcaaaaaagcatggactaataatccggcatgggttctttatgacctgatgattaatcagcgttatggtctggatcagaaagagcttggattctccgtagacaaatgggcgctctatgaggcggcgcaatattgcgaccagatggtccctgacggcaaaggcggcacggaacctcgctacctttgtgacgtgataatccagtctcagactgatgcgccgcgtgaacctgcgtacatcttcactaacgacaacgtagttaatggtgacttctcatatactttcgcaagcgagaagagcatgtacacgacgtgcaacgtgatgtttgatgatgagcaaaacatgtatcaacaggacgttgagccagtattcgatcgtgaggccactctacggttcgggaacaacgtaacgagcattacagcgatcgggtgcacacgtcgaagcgaggccaaccgacgcgggagatggattctgaaaaccaacctccgcagcactacggtaaacttcgctaccggactggaagggatgattccgacaatcggagacgtggtggcaatatctgataacttctggtcaagtaacttgacgatgaacctgtcagggcgattgctcgaagtgtcaggtagtcagattttcctgccgttccgcgttgatgcgcgcgcaggtgactttattatcgtaaataagccagatggcaagcccgtgaagcgcacaatctcaagtgttagtgcggatggtaagaccatagagattaacatcggctttggctttcctgtgaagcctaacacggtattcgcaatcgaccgcaccgaccttgcgttgcagcagtacgtagttacaaaaatcgacaagggcgatgatgatgaggaatttacctacaaaatcacggcggtggagtacgatcctaataagtacgatgaaattgattacggggttaacatcgacgaccgaccgacaagcatcggaagtgaagcctgtgaattttaccagcagcagacaccaggcacagccagaagtgggactaatcccacctcctctgtggccacaaggcaagggaataatagctcagaccagcaagtcatcagctga

SEQ ID NO: 22148 - DNA, 678 bp, Homo sapiens
  SIMILAR (1)..(324): 831254mologous to Loligo forbesi neurofilament-like protein,accession number X66695,Smith-Waterman Score=435.
atggaagatagctctagtgaggtaactgtaaatcgtgaggttactaccgataacccatacacgatctcagtaaccaacaaaacgctgtcggcaatccgtatcaaaatgttcatcgtcgcggcgtacgaattgaaagtaacggtgataaaaatggcgttcgagttgagtacgaggtgcagcaagcggttgatggcggtaaaaacatgtccaggttatgatcgaagccgtcgcgtaaacctgcctaacttcaacaatcaggtaatattcagagttgttcgaaagacgcctgattccaatgactcgaatgtcgttgatgcaatccagggaaagaaaattggagaccgtgtccattttgagcacgtctcccagaataattgtgccgtgacacacggggagcgcaaacggaaaacaggaagccaagctgcaagggctcgtttgaaactggcaaactttgcagtcaagtcttcagccagaaaatccacagatggcagccatttcccacaccacttccctccacatctggttccaaatggaggctgccataggtctgatctgtctcctgtggtgggggtgatgaccttccccatcagccccaagaccaagttcaatgcatttgctgctggcttcacatgggcaatgctggaagcagcagcccctgaccaccctcaactgctgtga

SEQ ID NO: 22149 - DNA, 1806 bp, Homo sapiens
  SIMILAR (230)..(325): 501254mologous to Bacteriophage HK97 tail fiber,accession number AF069529,Smith-Waterman Score=77.
atgcgcgccaacgtcgacagcgcgagggcccggcggcgcacactgggtttgggggaatcggggctcggtgacatctttcctgctcggggtctccgacgaagacggctcctaggcaatgctcggccgggcgcgtccgacggcaaggtgctgatagtcaggggtcctcgtggggcacgcgctgactgcgcgtcagccatcgtccggcagacgccttgtggtcgaccactcggccaaccgacgcgggagatggattctgaaaaccaacctctgcagcactacggtaaacttcgctaccggactggaagggatgattccgacaatcggagacgtgactttattatcgtaaataagccagatggcaagcccgtgaagcgcacaatctcaagtgttagtgcggatggtaagaccatagagattaacatcggctttggctttcctgtgaagcctaacacggtattcgcaatcgaccgcaccgaccttgcgttgcagcagtacgtagttacaaaaatcgacaagggcgatgatgatgaggaatttacctacaaaatcacggcggtggagtacgatcctaataagtacgatgaaattgattacggggttaacatcgacgaccgaccgacaagcatcgttgagccagatcagatccctaagcctgaaaacgtgaaagtgtcctcagagtcgagaatcgtccaggggatgagcgtagaaacgatgattgttagctgggataaagtgccgtacgcagttttctatgacgtacagtggagaaaggataacggcaactggcaaaacgttccgcagacagcaaacaaagaggtttatgttgaagggatttacgctggcaactatcaggtgcgcgtgcgctccgtcgctggttcgggcacgacttcaggctggtcaaatatcgtcgcggcaacgttgacgggtaaacagggtgaaccgggccgaccgattaacctcacagctacggatgatgttgtttttggtatccgtacaaaatgggggttctctgatggttctggagatacagcctatacagagttgcaacagtcaccggatggaacagtggataacgcaagtttgctttcattgattccgtatccgcagcatgagtattatcactcaccgatgccgggagataatattgtgtggtatcggagcatggcatcaacaaacgttgacgatatcatcggggagatctctgtcgatttcgaaaactcgccgggttacgagtggcttgttgataacgcaaccgacaacgcgtcgcagaacgcagctaatgcagaggcagcaattgagaacgcactagctaatgacaaagacgcgatctacatgaagaaggagaacggaaaacgaaaagcagagtacaccaaatcactgaagctaattgctgatgagactgaggcgcgagtaacagcagttgagcagttaagggcaagttttggtgatcagattagcgcaagcaatagcgaattgcgtgaagttatcgcaactgaaaccggagcgctatcgcgtgaaattgaccaactcaaggcagagattggtgatgatattcaggcaagtttgactgatatcagagaggctatagcaaacgagactgaggcgagaacgcaagctgacttgtcattaagcgcgaggcttgggaataatgaggcagcactttctcaaaaacttgattcgtggagcaatgcggattcgactggtgcaatgtacggcgtcaagctgggtctgaagtataacggccaagaatacaatgccggtatggctatgtctctgattggttcaggcgcagcagaatccttttaa

SEQ ID NO: 22150 - DNA, 6250 bp, Homo sapiens
  SIMILAR (1120)..(1839): 721254mologous to Loligo forbesi neurofilament-like protein,accession number X66695,Smith-Waterman Score=792.
atggaggacaatctaatctcaatcaacaaaatcaagatcctgttagctgtatctgatggtgaaattgacgaaacattcagcctaaagcagttgatgtttaactcagtcccggtgcaaaacgaggatggatcgttcaacttcgaaggggtaaaggctgaattcaggccgggaactcagacgcaggaatacatcaagggaatggaagatagctctagtgaggtaactgtaaatcgtgaggttactaccgataacccatacacgatctcagtaaccaacaaaacgctgtcggcaatccgtatcaaaatgttcatgcctcgcggcgtacgaattgaaagtaacggtgataaaaatggcgttcgagttgagtacgaggtgcagcaagcggttgatggcggttcgtttgagactgttcttactgacgtaatcgaaggtaaaacaatgtcaggttatgatcgaagccgtcgcgtaaacctgcctaacttcaacaatcaggtaatattcagagttgttcgaaagacgcctgattccaatgactcgaatgtcgttgatgcaatccaggtaagaagctatgctgaggtcattgatgccaagttccgatatcctctgactggtcttcttttcgtagagttcgattcgaagatgttccccaaccagttacctacgatctcacattcgtaagcgctggaagattgtaaacgttccgtcgaactacgatccagaatcgcgaacatacaacggcaattgggatggcactttcaaaaaagcatggactaataatccggcatgggttctttatgacctgatgattaatcagcgttatggtctggatcagaaagagcttggaatctccgtagacaaatgggcgctctatgaggcggcgcaatattgcgaccagatggtccctgacggcaaaggcggcacggaacctcgctacctttgtgacgtgataatccagtctcagactgatgcgtacaaggtggttctgagatatttgctcaatcttccgtggaatgagtttttggaatggtgaaagcatttctgtaatcatcgacaggccgcgtgaacctgcgtacatcttcactaacgacaacgtagttaatggtgacttctcatatactttcgcaagcgagaagagcatgtacacgacgtgcaacgtgatgtttgatgatgagcaaaacatgtatcaacaggacgttgagccagtattcgatcgtgaggccactctacggttcgggaacaacgtaacgagcattacagcgatcgggtgcacacgtcgaagcgaggccaaccgactgcgggagatggattctgaaaaccaacctccgcagcactacggtaaacttcgctaccggactggaagggatgattccgacaatcggagacgtggtggcaatatctgataacttctggtcaagtaacttgacgatgaacctgtcagggcgattgcaagaagtgtcaggtagtcagattttcctgccgttccgcgttgatgcgcgcgcaggtgactttaatatcgtaaataagccagatgcaaagcccgtgaagcgcacaatctcaagtgttagtgcggatggtaagaccatagagattaacatcggctttggctttcctgtgaagcctaacacggtattcgcaatcgaccgcaccgaccttgcgttgcagcagtacgtagttacaaaaatcgacaagggcgatgatgatgaggaatttacctacaaaatcacggcggtggagtacgatcctaataagtacgatgaaattgattacggggttaacatcgacgaccgaccgacaagcatcgttgagccagatcagatccctaagcctgaaaacgtgaaagtgtcctcagagtcgagaatcgtccaggggatgagcgtagaaacgatgattgttagctgggataaagtgccgtacgcagttttctatgacgtacagtggagaaaggataacggcaactggcaaaacgttccgcagacagcaaacaaagaggtttatgttgaagggatttacgctggcaactatcaggttcgcgtgcgctccgtcgctggttcgggcacgacttcaggctggtcaaatatcgtcgcggcaacgttgacgggtaaacagggtgaaccgggccgaccgattaacctcacagctacggatgatgttgtttttggtatccgtacaaaatgggggttctctgatggttctggagatacagcctatacagagttgcaacagtcaccggatggaacagtggataacgcaagtttgctttcattgattccgtatccgcagcatgagtattatcactcacagatgacgggaggtaatattgtgtggtatcgggtaaggacggttgacaggatcggtaacgtatctcagtggactgattttgtcagaggcatggcatcaacaaacgttgacgatatcatcggggagatttctgtcgatatcgaaaactcgccgggttacgagtggcttgttgataacgcaaccgacaacgcgtcgcagaacgcagctaatgcagaggcagcaattgagaacgcactagctaatgacaaagacgcgatctacatgaagaaggagaacggaaaacgaaaagcagagtacaccaaatcactgaagctaattgctgatgagactgaggcgcgagtaacagcagttgagcagttaagggcaagttttggtgatcagattagcgcaagcaatagcgaattgcgtgaagttatcgcaactgaaaccggagcgctatcgcgtgaaattgaccaactcaaggcagagattggtgatgatattcaggcaagtttgactgatatcagagaggctatagcaaacgagactgaggcgagaacgcaagctgacttgtcattaagcgcgaggcttgggaataatgaggcagcactttctcaaaaacttgattcgtggagcaatgcggattcgactggtgcaattccagggtggtaatttcaaagagctatacaagaaaaaattcggcactgtactagcgaaaaaccgcgcgatgacgccagaacaactattcgatctgtcggtgaagtatttcgaatgggccgaggacaacgcgataaaggcgtcagaatcagccagctttcagggtggcgtttatgaatcgcttgttcataagccgcgcgtcttcacctggaccggataccgactatttatcggtgcaagcgaggccgcaatcattaagtggaagcgtgaggaagaatacagtgaggttatggagttcgtggaatccgtaatcaacgagcaaaaatttcagcttgccgcaaacggcgttattaacgcctcatttatcggcaaggatctcggaatcgacaagccagcttcaataaacatcgaaaactcggcagcttcagcgtcgaccgctgtcgccactactgaggaagcaatgaaagaggctaagttggcgatcaagaaaatgagcgaggccaatttcgaaaaaatgattcggatctggtttcagcttatgcaggctcagcagttccagcctaactggcatcacctttacctatgtcacgaagtggaggaaattattgcaggccgacgcggtaacactatctttaacgtcacgccaggctccggtaaaactgaagtgttctcaattcaccttccggtgtacgcaatgctcaagtgtaaaaaggtgcgaaaccttaacgtatcgtttgccgacagcttagttaagcgcaacagtaagcgcgtccgtgagattatcagcagcaacgaatttcaagagctatggccctgcaaatttggcacatcgaaagacgaagagatgcaggttcttaacgaagacggaaaggtttggtttgagctaatctccgcagcggctggtggtcgtattactggttcgcgtggtggctacatgactccgggattctccggcatggtaatgctcgacgatatcgacaagcctgatgatatgttctcaaaggttaagcgtgagcgtacgcacatgctattgaaaaacaccattcgatcccgtcgtatgcataacgagacgcctattattgcaattcagcaacgactacatgctcaggattcaacatggttcatgatgaatggcggcatgggtatcgagttcgaccaaatatcaatcccggcgcttgttactgaagaatacggaaagacgcttcctgactggttgcagccttactttgagcgagacgttttgtcgtctgagtatgttgaattggacggtgttaagcattattccttttggcccagcaaggaaagtgtgcacgacctgctagctttacgagaagcagatcagtatacctttgattctcagtatcagcagaagccgatcgcgctgggtggctccgtgtttaactcagagtggtggacttattacggcaacagccttgacgctgatgagccagatcctggtaaatatgattaccgattcatcactgccgataccgctcagaagacaggcgagctaaacgactacacggtattttgtttgtggggcaagaagaatgataaggtttactttatcgacggcattcgcggtaagtgggaagcgccggatatggagaggcaatttacagctttcgtcaatcaggcatggaggcacaataaatcaatgggggtacttcgtaaaatctatgtggaagataaggcgagcggtacgggcttaatccagaacctaaggaaaaagactccgatatccatcactccattgcagcgtaacaaagataaagttacccgagctatggatgctcagccagttattaaagccgggcgtgtggttctgccagaagagcaccctatgcttgctgaaattatcgctgagcacagcgcctttacttacgatgacacccatccgcatgatgatatcgtcgataacttcatggatgcggcgaacatagaattgctgaccattgatgatcctatcgagagaatgaagcgactcgccgggatgggctgtcaattgacggccctttttattggaggaaacatgaaaattgttaagcatgatggatataacgatatttttaacggcggtgcagacggatcgcctaagccattctttatgtctgatgcatcatatcacgtcggatctttctacaacgacaacgcaaccgcgaagcgaattgtggatgttatcccggaagagatggtgacggctggatttaaaatgtcaggcgtcaaggatgaaaaagagttcaagtctctgtgggatagttacaaaattgattctagcttggttgacgttctttgctggtcgagactatacggtggggctgctattgtggcaatcatcaaagacaacagaatgctaaccagccccgttaaacctggagctaaacttgagggcgtgcgtgtttacgatcgatttgcaatcaccgttgaaaagagagtaaccaatgctcgatcgcctcgctatggtgagcctgagatatacaatgtatctcctggcgataatcttcaaccttacttaatccaccacacaagaatttttattgctgatggtgagcgagtaacccctcagattcgcaaacagaatcaaggatggggagcgtcggtattgaacaaatcactgattgatgcaatctgtgactatgattactgtgaatctctggccactcagatcttgcgacgtaagcaacaggctgtatggaaggtcaaaggtcttgccgaaatgtgtgatgatgatgatgctcagtatgccgcgcgcctgcgacttgctcaggttgatgataactccggcgtaggtcgtgcgatcggtatcgatgctgagactgaggaatatgacgttctcaactctgatatcagcggagttcctgagttcttatcaagcaagatggaccgcattgtctccctatccgggattcatgagattatcatcaagaataagaacgtaggcggcgtatcagcgagccaaaacacagcgcttgagactttctataagctagtcgatcgcaagcgcgaggaagattacaggccacttcttgagttcttgttgccgttcattgttgatgaggaggagtggtcgatcgagtttgagcctttgtctgttcctagtaagaaagaggaatcagagatcacgaagaataacgttgagtcagtcacgaaggctatcactgagcaaatcatcgatctggaagaagctcgagacacgctgcgatccattgcccctgagttcaaactcaaggatggtaataacatcaacattcgcgaaccggaagaaacaaccgaaccggaaccgggattaggggagaagttagaagatgaaaattaa

SEQ ID NO: 22151 - DNA, 6303 bp, Homo sapiens
  SIMILAR (5147)..(5296): 761254mologous to Loligo forbesi neurofilament-like protein,accession number X66695,Smith-Waterman Score=176.
gctggtggagtctgcagtgggccagctgccctggaggaagatcaaggacaaggaacaggtagggaatgatcaaggaaaagaatagggacgagtgtctacttaagcacatgcggtcagagttacacctcttaatggacctcattgacagcctgggttacttctccaaggccgactaccagttgatcatgtcagtgtttgagaacagcatgaaggagaggggcattgccgagaatgaggcctttgactgggagaaggcaggcaccgatgccctcctgtccacgagcacctctaccccgccccagcagaacacccggcagacggcagccatgtttggggtggtcaatgtgacgccagtgcctggggacctgctccgggagaacaccgaggatgtgctacagggagagcacctgagtgaccaggagaatgcacccccaattctgcccgggaggccctctgaggggctgggccccagtccccaccttgtcccccaccccgggggtcctgaggctgaagtctgggaggagacagatgtcaaccggaacaaactccggatcaacatcggcaaagtaactgccgccagggcgaagggcagcccctgtgtggaggaggaacagagccgaggcatgggggtccccagctccccagtgcgtgcccccccagactcccccacaaccccagtccgttctctgcgctaccggagggtgaacagccctgagtcagaaaggctgtccacggcggacgggcgagtggagctacctgagaggaggtcacggatggatctgcctggctcgccctcgcgccaggcctgctcctctcagccagcccagatgctgtcagtggacacaggccacgctgaccgacaggccagtggccgcatggacgtgtcagcctctgtggagcaggaggccctgagcaacgccttccgctcggtgccgctggctgaggaggaggatttcgacagcaaagagtgggtcatcatcgacaaggagacggagctcaaggacttccctccaggggctgagcccagcacatcgggcaccacggatgaggagcccgaggagctgcggccactgcccgaggagggcgaagagcggcggcggctgggggcagagcccaccgtccggccccggggacgcagcatgcaggcgctggcggaggaggacctgcagcatttgccgccccagcccctgccaccccagctgagccagggcgatggccgttccgagacgtcacagccccccacgcctggcagcccttcccactcacccctgcactcgggaccccgccctcgacggagagagtcggaccccacaggcccacagagacagttggaggaggacagactctcggggcactccctcccgcggtacagccccctgcgacgactggcgtcctccgtgttctcctcctccacgctggagacggagcattaccctcaccccggcggcggcggctcctcgggctcctccggttccctcattcagcgcagccgctcggctgagagcagccctgtgcgggcgccccaccggcgccacgcgcccctcgctgctggcaaccacagactcatgccctcggtgctccgcatctcgcggtcccagctgcagcaggtgtggcatccaggcttttctggggttggggagggggccaatgacctccaaaccaaggtgttctccgtggcgcccccatttgaggtgaatggcctcccacgagctgtgcctctgagtctgccctaccaggacttcaaaagagacctctccgattaccgagaacgggcgcggttgctcaacagggtccggagggtgggcttctcgcacatgctgctcaccaccccccaggtcccactggctcctgttcagcctcaggctaatgggaaggaggaagaggaggaggaggaggaagatgaggaagaggaagaagaggatgaggaagaagaagaggaggaagaggaagaggaggaggaagaagaggaggaggaggaagaggaggaggaggctgcagcggcagttgccttgggggaggtgctggggcctcgtagtggctccagcagtgaggggagtgagaggagcactgaccggagccaggagggtgccccgtccacgctgctggcagacgatcagaaggagtccaggggccgggcctccatggccgatggggacctggagcctgaggagggctccaaaacgctggtgcttgtctctcctggcgacatgaagaagtcgcccgtcactgccgaactggcccccgaccccgacctgggcaccctggctgccctcactcctcagcatgagcggccccagcccacgggcagccagctggacgtatctgagccaggcaccctgtcctctgtcctcaagtctgagcccaagcccccggggcctggggcagggctgggggccgggacagtgaccacaggggtcgggggcgtggcagtcacctcctcacccttcaccaaagttgagaggacctttgtgcacattgcggagaaaacccacctcaacgtcatgtcttccggtggacaagccttgcggtctgaggagttcagcgctgggggcgagctgggtctggagctggcctctgatgggggcgctgtggaggagggggcccgagcgcccctggagaacggcctcgccctgtcagggctgaatggggctgagatagagggctctgccctgtctggggccccccgggaaaccccctcagagatggccacaaactcactgcccaatggcccggcccttgcagacgggccagccccggtgtccccgctggagccaagccctgagaaagtggccaccatctcccccagacgccatgctatgccaggctctcgccccaggagccgtatccctgtcctgctctctgaggaggacacgggctcggagccctcaggctcactgtcggccaaagagcggtggagcaagcgggctcggccgcagcaggacctggcgcggctggtgatggagaagaggcagggccgcctgctgttgcggctggcctcaggggcctcgtcctcctccagtgaggagcagcgccgtgcctctgagaccctctcaggcacgggctctgaggaggacacgcccgcctctgagccggcagcggccttgcccaggaagagcgggagggcagccgccaccaggagccggattccccgccccattggcctccgcatgcccatgcctgttgcagcccagcagcccgccagcagatcccatggcgcggccccagcattggacacagccatcaccagcagaccagctgaggggaggactcctgggtggacagcctttgacgtccaccccacgctgatgcagaagctcccagaacactcaggaaacttctccggacagagccctccttgtcaacttgaggccctcccaaggccctctacttgccctctgggttccagcagagggagtgggagggaagggccactgcctcccacctaggagctttttccgaatggacaatcagctcgtgccagctgtatctgatggtgaaattgacgaaacattcagcctaaagcagttgatgtttaactcagtcccggtgcaaaacgaggatggatcgttcaacttcgaaggggtaaaggctgaattcaggccgggaactcagacgcaggaatacatcaagggaatggaagatagctctagtgaggtaactgtaaatcgtgaggttactaccgataacccatacacgatctcagtaaccaacaaaacgctgtcggcaatccgtatcaaaatgttcatgcctcgcggcgtacgaattgaaagtaacggtgataaaaatggcgttcgagttgagtacgaggtgcagcaagcggttgatggcggttcgtttgagactgttcttactgacgtaatcgaaggtaaaacaatgtcaggttatgatcgaagccgtcgcgtaaacctgcctaacttcaacaatcaggtaatattcagagttgttcgaaagacgcctgattccaatgactcgaatgtcgttgatgcaatccaggtaagaagctatgctgaggtcattgatgccaagttccgatatcctctgactggtcttcttttcgtagagttcgattcgaagatgttccccaaccagttacctacgatctcaattcgtaagcgctggaagattgtaaacgttccgtcgaactacgatccagaatcgcgaacatacaacggcaattgggatggcactttcaaaaaagcatggactaataatccggcatgggttctttatgacctcatgattaatcagcgttatggtctggatcagaaagagcttggaatctccgtagacaaatgggcgctctatgaggcggcgcaatattgcgaccagatggtccctgacggcaaaggcggcacggaacctcgctacctttgtgacgtgataatccagtctcagactgatgcgtacaaggtggttcgagatatttgctcaatcttccgtggaatgagtttttggaatggtgaaagcatttctgtaatcatcgacaggccgcgtgaacctgcgtacatcttcactaacgacaacgtagttaatggtgacttctcatatactttcgcaagcgagaagagcatgtacacgacgtgcaacgtgatgtttgatgatgagcaaaacatgtatcaacaggacgttgagccagtattcgatcgtgaggccactctacggttcgggaacaacgtaacgagcattacagcgatcgggtgcacacgtcgaagcgaggccaaccgacgcgggagatggattctgaaaaccaacctccgcagcactacggtaaacttcgctaccggactggaagggatgattccgacaatcggagacgtggtggcaatatctgataacttctggtcaagtaacttgacgatgaacctgtcagggcgattgctcgaagtgtcaggtagtcagattttcctgccgttccgcgttgatgcgcgcgcaggtgactttattatcgtaaataagccagatggcaagcccgtgaagcgcacaatctcaagtgttagtgcggatggtaagaccatagagattaacatcggctttggctttcctgtgaagcctaacacggtattcgcaatcgaccgcaccgaccttgcgttgcagcagtacgtagttacaaaaatcgacaagggcgatgatgatgaggaatttacctacaaaatcacggcggtggagtacgatcctaataagtacgatgaaattgattacggggttaacatcgacgaccgaccgacaagcatcgttgagccagatcagatccctaagcctgaaaacgtgaaagtgtcctcagagtcgagaatcgtccaggggatgagcgtagaaacgatgattgttagctgggataaagtgccgtacgcagttttctatgacgtacagtggagaaaggataacggcaactggcaaaacgttccgcagacagcaaacaaagagctgaaaaagatcgggggcgggggctttggtgagatctacgaggccatggacctgctgaccagggagaatgtggccctcaaggtggagtcagcccagcagcccaagcaggtcctcaagatggaggtggccgtgctcaagaagttgcaaggttcgggcctcgggcagggggatgggaaggaagagatgatgaagccaggggctaagagagggaaggaccatgtgtgcaggttcattggctgtggcaggaacgagaagtttaactatgtagtgatgcagctccagggccggaacctggccgacctgcgccgtagccagccgcgaggcaccttcacgctgagcaccacattgcggctgggcaagcagatcttggagtccatcgaggccatccactctgtgggcttcctgcaccgtgacatcaagccttcaaactttgccatgggcaggctgccctccacctacaggaagtgctatatgctggacttcgggctggcccggcagtacaccaacaccacgggggatgtgcggccccctcggaatgtggccgggtttcgaggaacggttcgctatgcctcagtcaatgcccacaagaaccgggagatgggccgccacgacgacctgtggtccctcttctacatgctggtggagtttgcagtgggccagctgccctggaggaagatcaaggacaaggaacaggtagggatgatcaaggagaagtatgagcaccggatgctgctgaagcacatgccgtcagagttccacctcttcctggaccacattgccagcctcgactacttcaccaagcccgactaccaggaaccctcaggctacacagagctcctctgcccacaccaccctaccagccagcacttctgtctggagtaa

SEQ ID NO: 22152 - DNA, 412 bp, Homo sapiens
  SIMILAR (76)..(282): 291254mologous to Drosophila virilis homeobox protein,accession number M95826,Smith-Waterman Score=64.
ctccagcagctgttgcataagtgaagactgaaccagaaacacctggaccgagttgcctctctcaggagggtcagacagcgagtgaaaacagaagaaagttctgagctgggaaactatgtcattaagatagaccatttagaaactatccagcaactcctaactgcagtagtaaagaagattccattaatcactgcaaaaatggcaaagagcaatgacaatgcgaaaagtcttacaagaaatcctggagaagaatccgagatttcaccacctgactcccctcaaaaccaagcacatcgctcactggtgccgctgtcatggctacaccccaccggaccctgagagcctgaggaatgacggggactccatcgaggacgtgctgacccagatcgacagcgagcccgagtgcccatca

SEQ ID NO: 22153 - DNA, 516 bp, Homo sapiens
  SIMILAR (53)..(235): 851254mologous to Cloning vector pCMVLacI lac repressor,accession number U64448,Smith-Waterman Score=249.
gattttcgcctgctggggcaaacaagcgtggcccgcttgctgcaactctctcaggggccaggcggtgaagggcaatcagctgttgccggtctcactggtgaaaagaaaaaccaccctggcgcccaatacgcaaaccgcctctccccgcgcgttggccgattcattaatgcagctggcacgacaggtttcccgactggaaagcgggcaaaaagggaacccgagaatgaggaggaggtggacatcctcagcctctccgagccagtgaagataaacatcaagaaggagcaggaagagaaacaagaggaagtcaagttctacctgccaccaaccccagggtctgaatttattggggatgtcacacagaagaggttggaagaagtggattccaccttcggggatgacttagttcaaggcttcagcggaggaattagccgcaggtatggtgaaaaaccaggagtccaagatttagaagtagagcctgacagtgtgactgaaatgctgcagttttatgattaa

SEQ ID NO: 22154 - DNA, 1197 bp, Homo sapiens
  SIMILAR (1)..(183): 481254mologous to Gallus gallus putative microtubule associated protein; cNau,accession number AF038560,Smith-Waterman Score=151.
atggcgtggccctgtatcagccgcctgtgctgcctggcgcggcgttggaaccagctggaccgctccgacgtggcggtgccgctcactctgcacggctactcggacctcgacagcgaggagccgggcacgggcggcgccgcctcgcgcaggggccagcctcccgcgggcgcccgggattccggccgggacgtgccgctcactcagtaccagcgggacttcggcttgtggaccacgcccgccgggcccaaggatccgccgccggggcgcggaccgggggcgggcggccgcaggggcaaatcctccgcgcagtcctccgcgccacctgcgcccggcgcccgcggggtctacgtgctgcccatcggcgacgcggacgcggctgcagcagtgaccacgtcgtacaggtatgggctgggtagggaccgcaacgagtccccaccctgtggtgggaggacgcggaggcccggagccagagggatggggtgggcggcagagcggaggcgcctggagcccggatcccacgcgacctcggagctgccggcggcctcagaggtcacccccgtttggtccgtgggcactgcaggcggcgccttcgctgctccatgcccggaaacagtgctcgagcacccccgtgccgggagcgcaccgctgccctcgcagccgccctcctgggggcagccgtcagaatggcctgccttcagccgagttggaaccggcctccctttaactcccaccgccgggcctagccgtgcgaggggtgcgcgcaggccatgtcccccagctctccccggtcactgcctactggatagaacttatactggcttgcagactcttggagcagagacgcttttggctgttgttaatagtgctgctatgaacgtaggtgtacaggtagtggatgttgaactccatcgccattctctcggagaagactgtatctatcctcagtcctcggagtctgacatctctgatgcccctccatctttgcctttgaccattccagccccagtgaaagcttcttcaccaataaagcagtcacatgagccagtacccgatacctctgtggagaaaggcagtcaccgggtcctgcccattccatctttaaggtcccctctcccatctgggctccagccccgggttcctcctctggcggccgccaggattgctgtcgtctgtggctctggtggcttcctgctctga

SEQ ID NO: 22155 - DNA, 831 bp, Homo sapiens
  SIMILAR (127)..(435): 301254mologous to Pinus taeda putative arabinogalactan protein,accession number AF101791,Smith-Waterman Score=94.
atggataaggatgcagagcatgaaacatacatcctctgcctcctttgtacctctgttgctgctcagtaccgggagcacgcagtatccattttattttcccaatttgttacctttgtcctggtggcactgaccttcttccttgtcctcgacatcttcttacgttccccaatatcaactccaagcccatcaccattgcctcgaaccccgacttccactccagtccacgtgaagcaaggcactgccggctctgttattaataatccttatgttatcatggacaagcagccggggcaggtgattggagccaccactcccagtacaggaagtcctacaaacaagatctccacggcttctcagatctcccaaggaacaggttcccctgttcctaaaattcatggaagtagttttgtaacatctactgtcaaggtgatcatcaaacaggaacctggtgaagcccctcacgtgcccgcaacaggagctgccagccagtcaccactcccgcagtatgtgactgtgaaagggggtcacatgatagctgtgtcccctcaaaaacaggtcataactcctggagaagggattgcccagtcagcaaaggttcagccctccaaggtccttgacagattggatgatgtctgcccacgttggcgagggcggatcttctttactctgtctgctaatccaaatgctggtctcttgcagaaatattttaccaggtatctgggcatccctcagcccactcaagttgacataaaattaaccatcacaacagtacttgatattaaaacctatggaaacaacccaaaccaggctcaagaaaattcaaagctttaa

SEQ ID NO: 22156 - DNA, 5752 bp, Homo sapiens
  SIMILAR (3832)..(5127): 991254mologous to Homo sapiens KIAA1197 protein,accession number AB033023,Smith-Waterman Score=2201.
gactgttaaagattcactccagtcagtccagtccgcagcaggccgtcctgacgattcccagccagctcaaaccactcagcgtaaacacatctggaggggtgcagacgatcctgatgcctgtgaataaagtggttcagtcattttctaccagcaagccacctgccattctgcctgtagctgccccaactccagttgtccccagctctgctccagcagctgttgcaaaaggtgaagatgccagctgcttttctgcaaagtctgtggagcagtactatggctggaacattggaaaaaggagagccgctgagtggcaaagagcaatgacaatgcgaaaagtcttacaagaaatcctggagaagaatccgagatttcaccacctgactcccctcaaaaccaagcacatcgctcactggtgccgctgtcatggctacaccccaccggaccctgagagcctgaggaatgacggggactccatcgaggacgtgctgacccagatcgacagcgagcccgaccatgggtctcttggagacggaaagtcctcttccgttggccccacagctgttgtaacactgcttgcctgtcatttagagtgcccatcatcattctcctctgctgacaacctctgccgcaaactggaggacctgcaacagttccagaaaagggaacccgagaatgaggaggaggtggacatcctcagcctctccgagccagtgaagataaacatcaagaaggagcaggaagagaaacaagaggaagtcaagttctacctgccaccaaccccagggtctgaatttattggggatgtcacacagaagggaggtatgcttgtttggagagaggctgtttctaaagcagcgatacgaacaaacggctttcttctgcttttccagattgggatcaccctgcagcccgtggcactccacaggaacgtgtatgcgtccgtggtggaggacatgatcctgaaggctacagaacagctggtgaatgatatcctgagacaggctttggcagttggataccagacagcttctcacaacaggtattactatctctgcagtctgtggtgtgaggcttacacctctttcctaacagttgaattgcccatgaaggtgttttatacttacatcaatccagtaggagatggaggatcaaagacatgtgatacaatggtttttaatcatcctgctatcaagaaatttttggaatcaccatctaggtcatcatctcctgccaatcagagagcagaaacaccatcagccaatcattcagaaagtgattctttatctcagcacaatgacttcttatctgacaaagataataacagcaatatggatatagaggaaagactctcaaacaacatggagcagagaccaagccgaaatactggaagggatacttctagaattactggctcccataaaacagaacagcggaatgctgatctcacagatgagacttcacgactttttgtaaagaaaacaatagtagtgggcaatgtgtccaagtatatacctccggataagagggaagaaaatgaccagtcaactcataagtggatggtatatgtccgagggtcccgtagagaacccagcattaatcattttgtcaagaaggtttggttcttccttcatcctagctataaaccaaatgaccttgtggaagttagagagcctccttttcacctgaccagaagaggctggggtgagtttcccgtcagagttcaagttcattttaaggacagccagaacaagcggatagatatcatacataatctgaagctggatagaacttatactggcttgcagactcttggagcagagacggtagtggatgttgaactccatcgccattctctcggagaagactgtatctatcctcagtcctcggagtctgacatctctgatgcccctccatctttgcctttgaccattccagccccagtgaaagcttcttcaccaataaagcagtcacatgagccagtacccgatacctctgtggagaaaggattcccagctagcactgaagctgaacgacacactccgttttatgctttgccatcttcattggaaagaacacccaccaaaatgactacatcccagaaagttaccttttgttcccatggcaattcagctttccagccaatagcatcaagctgcaaaattgttccacaaagtcaggttcctaatcctgagtcacctggaaaatccttccagcccatcaccatgagctgcaagattgtgtcaggttccccaatatcaactccaagcccatcaccattgcctcgaaccccgacttccactccagtccacgtgaagcaaggcactgccggctctgttattaataatccttatgttatcatggacaagcagccggggcaggtgattggagccaccactcccagtacaggaagtcctacaaacaagatctccacggcttctcatgatctcccaaggaacaggttcccctgttcctaaaattcatggaagtagttttgtaacatctactgtcaagcaggaggattctttgtttgcatctatgccacctctttgcccaattgggagtcaccctaaggttcaaagccccaaacctataacaggaggacttggagctttcacaaaagtgatcatcaaacaggaacctggtgaagcccctcacgtgcccgcaacaggagctgccagccagtcaccactcccgcagtatgtgactgtgaaagggggtcacatgatagctgtgtcccctcaaaaacaggtcataactcctggagaagggattgcccagtcagcaaaggttcagccctccaaggttgccggggtaccagttgggtctgctttaccttcaacagtgaagcaggctgtggcgatcagtggtggccagatcctggtagccaaggccagctcttctgtctccaaagcagttgggccaaagcaagttgtaacccaaggagttgccaaagcaattgtgagtggaggtggaggaaccattgttgctcagccagtgcagaccttaaccaaggcccaggttactgccgctggtcctcagaagagtggatcccagggttcagtaatggcaacgttgcagctaccagccactaatttggccaacttggcaaatttgcctcctggcactaaactctacctaactacaaacagcaagaaccccttcaggaaaaggaaacctgctgttgttccctcaagaacccatcatgtgagttacgagcaatgctaatttccagtatggctcacctaccagtggtggaagtggtctcggagcagcaggaggagaaggaggaggaggcggcagtggcagcggtggaggcgtcagcacaggaggaggaggaggaacagcaggaggaggaactcaaagtattgctggccctggagggatatctcagcacctgacttacacatcttacatcttcaagcaaactccccagggcacttttttagttggccagccatcaccccagacttctggaaaacaactcacctctgggtcagtggtccaaggaacactgggagtatactcatcttctgcacaaggacaacaaacgctaaaagtcatctctggacagaaaaccacattgtttacacaggcagcccatggaggacaggcatctctaatgaaaatatccgatagcaccttgaagactgtgccagccacctcacagctctcgaagcctggaaccacaatgctgagagtagcaggaggggttatcacaactgccacttcccctgccgtggccctctcagcaaacggtcctgcacaacagtctgaaggagtggctcccgtggtcttcatcttacggttcagttctgtaacgaaaacttcttgggcagcagcaagtgttgtgtgagccaggccaccgtgggaacctgcaaggctgccacccccaccgtcgtcagcgccacgtccctcgtgcctacaccaaaccccatctctgggaaagccacagtatccggactgttaaagattcactccagtcagtccagtccgcagcaggccgtcctgacgattcccagccagctcaaaccactcagcgtaaacacatctggaggggtgcagacgatcctgatgcctgtgaataaagtggttcagtcattttctaccagcaagccacctgccattctgcctgtagctgccccaactccagttgtccccagctctgctccagcagctgttgcaaaagtgaagactgaaccagaaacacctggaccgagttgcctctctcaggagggtcagacagcagtgaaaacagaagaaagttctgagctgggaaactatgtcattaagatagaccatttagaaactatccagcaactcctaactgcagtagtaaagaagattccattaatcactgcaaaaagtgaagatgccagctgcttttctgcaaagtctgtggagcagtactatggctggaacattggaaaaaggagagccgctgagtggcaaagagcaatgacaatgcgaaaagtcttacaagaaatcctggagaagaatccgagatttcaccacctgactcccctcaaaaccaagcacatcgctcactggtgccgctgtcatggctacaccccaccggaccctgagagcctgaggaatgacggggactctatcgaggacgtgctgacccagatcgacagcgagcccgagtgcccatcatcattctcctctgctgacaacctctgccgcaaactggaggacctgcaacagttccagaaaagggaacccgagaatgaggaggaggtggacatcctcagcctctccgagccagtgaagataaacatcaagaaggagcaggaagagaaacaagaggaagtcaagttctacctgccaccaaccccagggtctgaatttattggggatgtcacacagaagattgggatcaccctgcagcccgtggcactccacaggaacgtgtatgcgtccgtggtggaggacatgatcctgaaggctacagaacagctggtgaatgatatcctgagacaggctttggcagttggataccagacagcttctcacaacaggattcccaaagaaattacagtgagtaatattcaccaggccatttgcaacattccttttctggacttcctcacaaacaaacacatgggaatattgaatgaggaccagtgagcggagtgaggtgccctggagaagcaggctttgaaggcacagcgaagctgtaactgaggaccctgctgcttgggaaggaggtggtttccagtgtgactcggcatgtcatggctacccaacctttgccgctgcctgttcccacgtgtcaccagcacgctgcactccagatgaaatcctcctaggacaggagtttgtttcctgagtgtggagtgaggctggcagtggatccgtgctttgtcggccagcgtttctgcagtctttgtaaaggccccacgagagcgggccaggccgtgtgcctcaggcccttctccctgggtgtgcttaagggggctccttgggcccgcctccccaggaggtagaaaatgagtggcaggctagagatttcacccattttgtgggctggagttaccagtagctccagcagttaccctgaagagagattgggcttcagccttcagcaggtggttctctcccatgcctggccttggtgtggaggggctgtactctgagcccaagtgagtcagctataggaagaggccatacctagagccaagaaccatgaaggcctgagagacggcagactgagcaaaattccttttttgagcacgagagcattactaga

SEQ ID NO: 22157 - DNA, 1100 bp, Homo sapiens
  SIMILAR (127)..(420): 411254mologous to Paracentrotus lividus H3.3 histone,accession number X76081,Smith-Waterman Score=94.
  misc_feature (1)...(1100): n = a,t,c or g
tctagtgtggtggaattcgccgccgccgcgcgcgcgntacgctctccaacgccagcccagcgccgcctctcgctcgccgagctccagccgaaggagaaggggggtaagtaaggaggtctctgtaccatggctcgtacaaaagcagactggcccgcaaatcggaccggtggtaaagccccccaggaagcaactggcttacaaaaagccggcttcgcaagagtgcggccctctaactggaggggtgaagaaacctcatcgttacagggcctggtactgtcggcggctccgtgaaatttagacggttatcagaagtccactcgaacttctgattcgcaaacttcccttccaagccgtctggtgcgagaaattgctcaaggactttaaaacaagatcttgcgcttccagagcgcagctatcgggtgctttgcaggaaggcaagtggaggcctaatctggtttggccttttttgaaggacaccaacctggtgtgctaatccatggccaaacgtgtaacaattattgccaaaaagacattccagctagcaccgccgcataccgtggagaaccgtgctttaaggatccactcatggatggggaaacatttcatttctcaaaaaaaaaaaaaaaatttctcttcttcctgttattggtagttctgaacgttagatattttttttccatggggtcaaaaggtacctaagtatatgattgcgagtggaaaaataggggacagaaatcaggtattggcagtttttccattttcatttgtgtgtgaatttttaatataaatgcggagacgtaaagcattaatgcaagttaaaatgtttcagtgaacaagtttcagcggttcaactttataataattataaataaacctgttaaatttttctggacaatgccagcatttggatttctttaaaacaagtaaatttcttattgatggcaactaaatggtgtttgtagcatttttatcatacagtagattccatccattcactatacttttctaactgagttgtcctacatgcaagtacatgtttttaatgttgtctgtcttctgtgctgttcctgtaagtttgctattaaaatacattaaactat

SEQ ID NO: 22158 - DNA, 570 bp, Homo sapiens
  SIMILAR (82)..(264): 951254mologous to Homo sapiens KUP protein,accession number X16576,Smith-Waterman Score=299.
attaaaattggcattctttctctagagactcaagtcctggcagagctggtgatcctatcacacgattctgtcataaccacaatggacactgccagccatagccttgttcttctccagcagctgaacatgcagcgagaatttggttttctgtgtgattgcacagttgcaattggagatgtttacttcaaagcccacagagcagtgcttgctgctttttctaactatttcaagatgatatttattcaccaaacaagacagcaaatcacccaccttgaggtcataaaggagctggaagctgctgggtgcttgtgctgctctctggacggcctgagccagggctaaggcacccttgcccccttttgcccagtgagtgcacttcacggcatcaaaagccccatgttctctggaaaggcggctgatgaggtccagctcagactctgtatccgtcctataaaggaagcatttcatatcaaagcatggaaaatggctggagagacagaattgtcttctttttgccattaaacctcatgtgaattacccactgataaacgaacactaaccaagaaaaaa

SEQ ID NO: 22159 - DNA, 1460 bp, Homo sapiens
  SIMILAR (81)..(1367): 961254mologous to Homo sapiens KUP protein,accession number X16576,Smith-Waterman Score=2169.
tgagcccgcccctcctgcacggaggagtctgtctgccgccgcggcggcatctggaaccactgtggacactgccagccatagccttgttttttctcagcagtttgaacatgcagcgagaaattggttttcgtgtgaattgcacggttgcaatgtgagatgtttacttcaaagcccacagagcagtgcttgctgctttttccaactatttcaagatgatatttattcaccaaacaagtgaatgcataaaaatacaaccaactgacatccaacctgacatattcagctatttgttgcacattatgtacacggggaaagggccaaaacagattgtggatcatagtcgtttggaggaagggattcgatttcttcacgccgactacctttctcacattgcaactgaaatgaatcaagtgttctcaccagagactgtgcagtcctcaaatttatatggcattcagatctcaacaacccaaaaaacagttgtcaaacaaggactggaggtcaaagaagctccttccagtaacagtggaaacagagctgctgtccagggtgacctcccccagttgcagttgtctcttgctattggtctggatgatggcactgcagaccagcagagggcctgtcctgccacccaggccctggaggagcaccagaagcccccagtttccatcaagcaggagagatgtgacccagaatctgtgatctcccagagccacccctcaccctcatcagaagtgacaggccccacttttactgaaaacagtgtcaaaatacacttatgccattactgtggggaacgttttgattcccgtagtaacctaaggcaacatctccatacacatgtgtctggatccctgccattcggtgtccctgcttccattctggaaagtaatgaccttggtgaagtgcatccccttaatgaaaacagcgaggcccttgaatgccgcaggctcagctccttcattgttaaggagaatgaacagcagccagaccacaccaaccggggtaccacagagcctttgcagatcagtcaagtatctttgatctccaaagacacagagccagtagaattaaactgtaatttttctttttcaaggaaaagaaaaatgagctgtaccatctgtggtcataaattccctcgaaagagccaattgttggaacacatgtatacacacaaaggtaaatcttacagatataaccgatgccaaaggtttggtaatgcattggcccagagatttcagccatactgtgacagctggtctgatgtctccctgaaaagttctcgcttgtcacaagaacacttagacttgccttgtgccttagagtcagagctcacacaagaaaatgtggatactatcctagttgagtagcagcttctctttcagaatttttataccaattctgaaaaagaaaatttgcgtggcatttttaattcataaattattttcctcctcaagttt

SEQ ID NO: 22160 - DNA, 1675 bp, Homo sapiens
  SIMILAR (492)..(938): 421254mologous to Homo sapiens H3.3 histone,accession number M11354,Smith-Waterman Score=162.
  misc_feature (1)...(1675): n = a,t,c or g
atgaggcctgcagccatcataccagctgctgtgggtctgggaatggcctctgagaacaaggtctgcagatggagatggtatctcagtttggacatgaagagaagaccgctcctgtgtccacgcatggagaagaaccgctggccctccctggtcgtctgtccactagggcatctgcctctgcgttcttgtgccctggtttctgagtgcagaaccactaaaatcctggcttctttcctcagcatcctggcgaggtcaaacacaaactccttcaatttaggatttatggtccttaacaatcgccagctggagcccttgggctttggacagtttttcagaattaagacagggaaacctttctctagtccacagcaaggcgggggaaaagccgcagccgtcctgccgtcgctctccaacgccagcccagcgccgcctctcgctcgccgagctccagccgaaggagaaggggggtaagtaaggaggtctctgtaccattggctcgtacaaagcagactgcccgcaaatcgaccaattggtaaagtcacccaggaagcaacttgcctacaaaaagcctgctcgcaagagtgcgcacgtctactggaggggtgaagaaacctcatcgttacaggcctgggtactgtgggcgctccgtgaaatttagacggttatcagaagtcccactgagacttctgatttcgcaaacttcccttccaagccgtctgggtgcgagaaaatttgctcaaggacttttaaaaacagatcttgcggtttccagagccgcagctatcgggtggctttgcagggagggcaagttgaggccctatctggggttggccttttttgaaagacaaccaacctgttgtgctaatccatgcccaaacgtgttaacaattattgccaaaaagacattccagctaagcacgcccgcataccgtggagaaccgtgctttaagcaatccactcatggatggggaaacattttcatttctcaaaaaaaaaaaaaaaaaatttctcttcttcctgtttattggggagttctgaacgtaggatatttttttccccatggggtccaaaaggttaccctaagtattatggatttgccgaagtggaaaaaatagggggaccagaaaatcagggtattggcaggttttccccattttccattggtgtgtgaatttttaatattaaatgcgggagaccgtaaagcattaatgcaagttcaaaatgtttcaggggaacaagttttcagcgggttcaacttttataataattataaataaacctgttaaatttttctgggacaatgccgagcatttgggattttttttaaaacaagtaaatttcttaattgatggcgaactaaatggtgtttgtagcatttttatcatacagtagattccatccattcactatacttttctaactgagttgtcctacatgcaagtacatgtttttaatgttgtctgtcttctgtgctgttcctgtaagtttgctattaaaatacgattaaactataaaaaaaaaaaaaaaaaaaaaaaaaaaaaaaaaaaaaaaaaaaaaaaagaaaaaaaaaaaaaaaaaaaaaaaaaaaaattaanaaggggggcccccttaaaaaaaaaaaaaaaaaaaacacggggggggggaaaattttttttttttttaggggccccccatt

SEQ ID NO: 22161 - DNA, 281 bp, Homo sapiens
  SIMILAR (10)..(72): 951254mologous to Homo sapiens putative novel receptor kinase,accession number U00686,Smith-Waterman Score=105.
cggcacgaggacattgaacagttctctacggtcaagggcgtggagctggagcctaccgaccaggacttccactgccccggccggcccagataggtctgcctctgccttccagctcccacagcctggtccctgatactgggctctgtcctgcagacacctctttcagaaacgcccaagcccagcccctaggagggggtggggcatccctggtcaaccctcaaacattccggactcccctcataacaatagacacatgtgcccagcaaaaaaaaaaaaaaaaa

SEQ ID NO: 22162 - DNA, 221 bp, Homo sapiens
  SIMILAR (106)..(14): 591254mologous to Homo sapiens putative novel receptor kinase,accession number U00686,Smith-Waterman Score=105.
ctgtacacgatgcgtcccggtgcaggtcctccaggccacagcagatctcggcggcgtagaagaggcccgcgcttcggggaagccagcctggcccatgtggtagatgtggaactgaggtcgcccccgttcatcagtgtcagcaccaggcacagcgcgtcctccccaaagccacctttgccaggactcggtattgcctgaaggtgtttttggtcactggctgc

SEQ ID NO: 22163 - DNA, 261 bp, Homo sapiens
  SIMILAR (47)..(232): 421254mologous to Homo sapiens putative novel receptor kinase,accession number U00686,Smith-Waterman Score=85.
ggacctgaagcccgagaacatcttgctggatgaccacgtgtgtaagggtgcctgggctccggaggtggtgaagatgaacggtacacgttcagccctgactggtgggcgctcggctgcctccttacgagatgatcgcaggccagtcgcccttccagcagaggaagaagaagacaagcgggaggaggtggagcggctggtgaaggaggtccccgaggagtatccgagcgcttttccccgcaggcccgctcactttgctcacag

SEQ ID NO: 22164 - DNA, 2947 bp, Homo sapiens
  SIMILAR (122)..(1318): 601254mologous to Mus musculus G protein-coupled receptor kinase 6,accession number AF040754,Smith-Waterman Score=1034.
  misc_feature (1)...(2947): n = a,t,c or g
gcgcggtcactgcgagccgagccgagccgcgccgagccgcgccgatcgccatccggcctcggcactcgcgcgcgatcccggccggcggcgcggcccggcgggccaggcggcgccacagcccatggagcccgagaacatcgtagcgaacacggtgctactcaaggcccgggaaggtggcggtggaaatcgcaaaggcaaaagcaagaaatggcggcagatgctccagttccctcacatcagccagtgcgaagagctgcggctcagcctcgagcgtgactatcacagcctgtgcgagcggcagcccattgggcgcctgcatgttctgagagttctgtgccaccaggccggagctgagccgttgcatcgccttccaggatgggatggccgagtatgaagcgaccccggatgagaagcggaaggcatgtgggcggcggctaatgcagaattttcttgagccacacgggtcctgacctcatccctgaggtccccccggcagctggtgacgaactgcacccagcggctggagcaggggccctgcaaagaactctcccaggaactcacccgggtgacccacgagtacctgagcgtggccccttttgccgactacctcgacagcatctacttcaaccgtttcctgtcagggaaaggggttggaaagggaagcaattgaccaaaaacacccttaggcaataccgagtcctgggcaaaggtggctttggggaggtgtgcgcctgccaggtgcgggccacaggtaagatgtatgcctgcaagaagctagagaaaaagcggatcaagaagcggaaaggggaggctcatgtcgctgaacgagaagcagatcctggagaaagtgaacaagtaggtttgtagtgagcttggcctacggctagtgagaccaaggaccgcgctgtgcctggtgctgacactgatgaacgggggcgacctcaagttccacatctaccacatgggccaggctggcttccccgaagcgcgggccgtcttctacgccgccgagatctgctgtggcctgggaggacctgcaccgggagcgcatcgtgtacagggacctgaagcccgagaacatcttgctggatgaccacggccacatccgcatctctgacctggggattagctgtgcatgtgcccgagggccagaccatcaaagggcgtgtggggcaccgtgggttacatggctccggagtgtttgaagaatgaacggtacacgttcagccctgactggtgggcgctcggctgcctcctgtacgagatgatcgcaggccagtcgcccttccagcagaggaagaagaagatcaagcgggaggcaggtggagcggctggtgaaggaggtccccgaggagtattccgagcgcttttccccgcaggcccgctcactttgctcacagctcctctgcaaggaccctgccgaacgcctggggtgtcgtgggggcagtgcccgcgaggtgaaggagcaccccctctttaagaagctgaacttcaagcggctgggagctggcatgctggagccgccgtttcaagcctgacccccaggccatttactgcaaggatgttctggacattgaacagttctctacggtcaagggcgtggagctggagcctaccgaccagactttctaccagaagtttgccacaaggcagtgtccccatccctggcaagaacgagcagatggtggagaccgagtgcttccaggagctgaatgtctttgggctggatggctcagttcccccagacctggactggaagggccagccacctgcacctcctaaaaagggactgctgcagagactcttcagctcgccaaaggattgctgtggaaacctgcagcgacagcgaggaagagctcccctacccgcctctagcccccagcccgaggcccccaccagcagttgggcggtagcagctactccgagcgccgtttacagttttgcacagtgatcttccccattgtccactcaagtcgtggcctggggaacacagacggagctgtccccagtgtcctccgtccctcagcccctggcctggctgagtttggcagggcctgggccatccctgggacaaaggtgcgtcccttcagctcttctccgtggagctcggggctttctgtatttatgtatttgtacgaatgtatataagcgacaagagaattcttaattcccgccgcagacctggcgcccccgccttggctcctgggggcaagccagccctggctgggagagcgggagctgggcagaggagccactgccaaactcaaggctcctctggcccagcttggatggctgagggtggtcacacccctgagccttcagcactgtgctggccaccccggcctctgagtaagactcgtgcctccccctgctgccctgggctaaaggctgctaccctctggggcccaaagctgtcccttctcagtgcttgtcagcgctgggtctggggcctctgtatgccctaggcctgtgccaaagtggccagagattgggctgcctgtgatacccaatcagcccaactgccccggccggcccagataggtctgcctctgccttccagctcccacagcctggtccctgatactgggctctgtcctgcagacacctctttcagaaacgcccaagcccagcccctaggagggggtggggcaaatcncctggtcaaccctcaaacattccggactcccctcataacaatagacacatgtgcccagcaataatccgccccttcctgtgtgcgcctgtggggtgcgtgcgcgcgcgtgtgtacctgtgtgggtgaaggggatagggcgaggctgtgcctgtgccccaggtcccagccctggcccttcccagactgtgatggccatcctggtcccagtgttagggtagcatgggattacagggccctgttttttccatatttaaagccaatttttattactcgttttgtccaacgtaaaag

SEQ ID NO: 22165 - DNA, 403 bp, Homo sapiens
  SIMILAR (249)..(401): 1001254mologous to Homo sapiens Similar to G beta-like protein,accession number BC001313,Smith-Waterman Score=285.
tttcgtgcccgtaagatgctctgacctttgatcctgccgttcagctctagggcccgtgcaggccacaccatgaacacctccccaggcgcggtgggcagtgacccggtcatcctggccactgcaggctacgaccacaccgtgcgcttctggcaggcccacagcggcatctgcacccggacggtgcagcaccaggactcccaggtgaatgccttggaggtcacaccggaccgcagcatgattgctgctgcagctacgacggcgtcaacaagaacatcgcgtctgtgggcttccacgaagacggccgctggatgtacacgggcggcgaggactgcacagccaggatctgggacctcaggtcccggaacctgcagtgccagcggatcttccaggtgaacgcacccat

SEQ ID NO: 22166 - DNA, 1560 bp, Homo sapiens
  SIMILAR (1137)..(820): 501254mologous to Homo sapiens dJ37E16.5 (novel protein similar to nitrophenylphosphatases from various organisms),accession number Z83844,Smith-Waterman Score=267.
tcagtctgggaggtaataaaagcagaccgacacgcagatgttgctcgggaagcagatgtcgatgcagagataaatcagccgctgtctccggggccctgtggcgagggtgccgtgaatctccaagggctccgcccccagctcctcaaaccatcccgagggcctggccttcccccacagcggtcctgactcaccctctgctcgccgggcccagtagatgggggtcctcatgcacaggcgctgcaccaaagcccccgcctgggcggggtccacttcgaggctcccctgcactgccagcagctcctgggtgtggtgggtgtcctggctggggacccaagcctcttggaccttggaggtatccaccagcagccgcagggtctcccgatcactgtcctccatcaggcggaggaagcagacctggtgctcctcagggcggtaacagatgcagccgctctgcccgtcgaacagcaccgcccagctgtggttgctctgaggtggggtcactgtgatggtcgccgcgttccgggccacgtccaccaggatggtttggttgggccggggcatgtgggggctcgggagggtcattcgcagcgtctgcagccttggcttgggagggccctgagcagagccaagaagccctccagccacaatccccacagcggccagcaccagcagcagcagcagcaggagcaggcccacggctctccagcccccgcaggagggcttggtcttcacctggatgacaggcattccttggccaacacatgcttcagccgcgctgccggctgcagggcacagaggctccttcagtggaattttgccttgaagggcaggcaaaaggtcggctatgctgtcaacatagaagtcagggaccattttcttcttagacacgcagtcactttcctgattattcttcacatcccctagagtggagactccggtgagggtcaggatggtcttcaggccacaggtggcgcctaggaggatgtctgtgtccaggcggtctcccaccatgacggtgcgctcggggttgatgccgtattcctgggacacgcagtcgaaaatgaagcggctgggcttcccgatgatgtcggcctggcgctgggcggccatctccacggctcggaccagacacccggtacgtcgggctccagcggcgcgtgcagccagtcgccgggaccctcgcccctgcagtggctcgggccccacgcccacgctggcgacgcccacggcctccagctccgcggccagggctgggctgcccagcacgtaggccttgggcgcgggggcgccggccaggcgctggcgcaggtagagcgcggtgcagtaggccgtgccgaagacctccaggctggcgccgggccccgcggggccgccgaagcccaggcgccgcagcttctcggcgtaggcagcgcgggtcttgctgctgttgttggtgatgaagcccaggcggccgtcgcagtcgaacagcagcgtgtccacgtcggccagcagcgcctgtgcccgctcggcgctcagccgcacgcagcgggcgtcgtcgccaccggcctccgccgccgccat

SEQ ID NO: 22167 - DNA, 2205 bp, Homo sapiens
  SIMILAR (457)..(1386): 461254mologous to Homo sapiens dJ37E16.5 (novel protein similar to nitrophenylphosphatases from various organisms),accession number Z83844,Smith-Waterman Score=651.
atggctggttcgtgttacctccaaggaaccgggaacgcgtttttgcaaaggactgaggcgcgtactcacgcctgccggggaaggagccccgggctggctcgcgggactggccggctgaccactcgcttccaatgggtgagcggcccgcggcagcccgggaacagcggccttgcgcctgcgctgctctcccctctgccgcatttccgcagcgagcgcttcactccgaatgccggttggagccctgccagccaatcaccggggcgtcccaaggccgcccgcgggaggcgggggcggattggcgaaggtgcaggccaatgggcggcgggcgcgaggcgctgggccaatgagcgcgccgggggcggggagggcgccgcggcgggcggctgcgaggagcggccggcgggcggcggcggccggcgggcggcgatggcggcggcggaggccggtggcgacgacgcccgctgcgtgcggctgagcgccgagcgggcacaggcgctgctggccgacgtggacacgctgctgttcgactgcgacggcgtgctgtggcgcggggagaccgccgtgcctggcgcgcccgaggccctgcgggcgctgcgagcccgcggcaagcgcctgggcttcatcaccaacaacagcagcaagacccgcgctgcctacgccgagaagctgcggcgcctgggcttcggcggccccgcggggcccggcgccagcctggaggtcttcggcacggcctactgcaccgcgctctacctgcgccagcgcctggccggcgcccccgcgcccaaggcctacgtgctgggcagcccagccctggccgcggagctggaggccgtgggcgtcgccagcgtgggcgtggggcccgagccactgcagggcgagggtcccggcgactggctgcacgcgccgctggagcccgacgtgcgcgcggtggtggtgggctttgacccgcacttcagctacatgaagctcaccaaggccctgcgctacctgcagcagcccggctgcctgctcgtgggcaccaacatggacaaccggcttccgcttgagaacggccgcttcatcgcgggtaccgggtgtctggtccgagccgtggagatggccgcccagcgccaggccgacatcatcgggaagcccagccgcttcattttcgactgcgtgtcccaggaatacggcatcaaccccgagcgcaccgtcatggtgggagaccgcctggacacagacatcctcctaggcgccacctgtggcctgaagaccatcctgaccctcaccggagtctccactctaggggatgtgaagaataatcaggaaagtgactgcgtgtctaagaagaaaatggtccctgacttctatgttgacagcatagccgaccttttgcctgcccttcaaggcaaaattccactgaaggagcctctgtgccctgcagccggcagcgcggctgaagcatgtgttggccaaggaatgcctgtcatccaggtgaagaccaagccctcctgcgggggctggagagccgtgggcctgctcctgctgctgctgctgctggtgctggccgctgtgggggttgtggctggagggcttcttggctctgctcagggccctcccaagccaaggctgcagacgctgcgaatgaccctcccgagcccccacatgccccggcccaaccaaaccatcctggtggacgtggcccggaacgcggcgaccatcacagtgaccccacctcagagcaaccacagctgggcggtgctgttcgacgggcagagcggctgcatctgttaccgccctgaggagcaccaggtctgcttcctccgcctgatggaggacagtgatcgggagaccctgcggctgctggtggatacctccaaggtccaagaggcttgggtccccagccaggacacccaccacacccaggagctgctggcagtgcaggggagcctcgaagtggaccccgcccaggcgggggctttggtgcagcgcctgtgcatgaggacccccatctactgggcccggcgagcagagggtgagtcaggaccgctgtgggggaaggccaggccctcgggatggtttgaggagctgggggcggagcccttggagattcacggcaccctcgccacagggccccggagacagcggctgatttatctctgcatcgacatctgcttcccgagcaacatctgcgtgtcggtctgcttttattacctcccagactga

SEQ ID NO: 22168 - DNA, 3121 bp, Homo sapiens
  SIMILAR (1759)..(2214): 491254mologous to Mus musculus G beta-like protein GBL,accession number AF237676,Smith-Waterman Score=325.
atgcggaaaaatccacgacgtcggagtctcctaggagtgcctaacagtgagaccggcgaacccggacaacgaccaagaatagaacggaggacaggaagaggagaaaagacacgaacaagagagcaaggaaggaagacagacgaacagctaaaggcagaaagggaaagagagcacagaaacagcaagaagaagcgcaagaacaaagaagggaacagagaaaagaggcaaaaaacaagccaaaaccgagaaacccgcacagcgcacccgaaagaagaggaaaaagacagacgacgaaggagagagccagacacagcgccagaaaaagaagaagcaaagggcgaagaacaggcaaagaagacaagaaaagcacagaaacaacagagagacaagaaaacgagcgcacgacacaaaaaaaaaagaaagagacgagaagaacaaaaaaaaaacaaaggacagagaaacggagacaagaagaacgagagcggagaacgcaggaaaagaggaaaaaaggaagaagagagacgagagaaaacgaaacaagggaggagcaagaaaaacaaacaacgaaggaaaaaaagaaaaagagaaaaaggaacaaggaaaagacacagagagaaacgacagaaacgaagcgaagcaaagacgaaaaagaacaacaaaaggaaccacaacaccacacaaagaaaagacagcagaaaccaacagaagaagaaaaaaggaaacaccagaaaaggacacaccgaagagcgcggcgcgcacgaggagaaagggcgacccagagcgagcacggagagagcaggaccacgggcccgggcgcgcggcgggcgcggggcgggggcgcggcacctggcgccgcctcccggacgccggggtccgctcccgggccgccgacctccgggctccctggtggtcccccaagcccccaaagctctgggagccatcgataactctacgctcggcctcgatcgactcgctccggctcccctcgccgtcctggacacggcggagtgcggagccgcccgtaagggcctgccgctggcctgctacgcatgcgcagccgcagcgctcggctttccccggcccatccgccgccttgcgcacgcgcagcccgcccctgcggcagagtggcgcccgcgcgtgactcccccctgccggctgcggagggcccgtgcaggccacaccatgaacacctccccaggcacggtgggcagtgacccggtcatcctggccactgcaggctacgaccacaccgtgcgcttctggcaggcccacagcggcatctgcacccggacggtgcagcaccagggactcccaggtgaatgccttggaggtcacaccgggaccgcagcatgattgctgcttgcagttcagcctgtgtccctaggttaccagcacatccgcatgtattgatcttcaactccaattaaccctaaaccccatcattcagcttacggacgggcgtcaacaaggaacattgggttttgttggggttttccacggaagacggccgctgggatgtttacacggggcggcgaggaattgcacagccaggatctgggacctcaggtcccggaacctgcagtgccagcggatcttccaggtgaacgcacccattaactgcgtgtgcctgcaccccaacccaggcagagctcatcgtgggtgaccagagcggggctatccacatctgggacttgaaaacagaccacaacgagcagctgatccctgagcccgaggtctccatcacgtccgcccacatcgatcccgacgccagcttacatgggcagctgttcaatagcaccggaaactgctatgtctgggattttgacgggggggcattggtgacgaggtgacccagttcatccccaagactaagatccctgcccacacgcgctacgccctgcagtgtcgcttcagccccgactccacgctcctcgccacctgctcggcctgattaagacggtgaagatctggaggacgtccaacttctccctgatgacggagctgaagcatcaagagcggcaaccccggggaagtcctcccgcggcttggatgtggggctgcgctctcatcgggggaactcccagtaacatcgtcactgcttcctcgaacaacctggcccgtctctggtgtgtgaagactggagagatcaagagagagtatggcggccaccagaaggctgttgtctgcctgcccttcaatgacagtgtgctgggctagcctgtgacccctcgggacctgcctggtgcaggtggtggcagcttggagggacccatgcagcacccaggtcagagcagacccttccccctgcccggcttgcgccaagctggacctgatggccccctgtggcgccttgacttgctgggccaggctgcccctgggactctcagcccccaagttgcttatccagatgtgacagagctcgacaccaagccaggctgcacactccctggactgggctaaacctgcactgccctgggaaaaagtcggccgagggcccaaagctgctgaaggggtctgaagctggtgcccaccccccagctaagtgtgttctctgcccctccctgcccgcgtttcagggcctcggtccatagagaacacccaccaccatggccaaggtggaagggtttattagtccctgccagcagctgtcctccctggtgcaggtggcctggccagcccactggattggggacgggccagggtgtggccaggtcgggggcttcagtctgggaggtaataaaagcagaccgacacgcagatgttgctcgggaagcagatgtcgatgcagagataaatcagccgctgtctccggggcccctctgctcgccgggcccagtagatgggggtcctcatgcacaggcgctgcaccaaagcccccgcctgggcggtagccacttacgaggctcccctgcactgccagcagctcctgggtgtggtgggtgtcctggctggggacccaagcctcttggaccttggaggtatccaccagcagccgcagggtctcccgatcactgtcctccatcaggcggaggaagcagacctggtgctcctcagggcggtaacagatgcagccgctctgcccgtcgaacagcaccgcccagctgtggttgctctgaggtgg

SEQ ID NO: 22169 - DNA, 445 bp, Homo sapiens
  SIMILAR (89)..(385): 901254mologous to Homo sapiens translational initiation factor beta subunit,accession number M29536,Smith-Waterman Score= 459.
  misc_feature (1)...(445): n = a,t,c or g
atttcgtggcaggggcagcgctgccgccggggcctggggctgacccgtctgacttcccgtccgtgccgagcccactcgagccgcagccatgtctggggacgagatgatttttgatcctactatgagcnnnnnnnnnnnnnnnnnnnnnnnnccttttatgttagatgagggaggggatacccaaacagaggaaacccagccttcagaaacaaaagaagtggagccagagccaactgaggacaaggatttggaagctgatgaagaggacactaggaaaaaagatgcttctgatgatctagatgacttgaacttctttaatcaaaagaaaaagaagaaaaaaactaaaaagatatttgatattgatgaagctgaagaaggtgtaaaggtagtattgctttcttgttgaaggtaaaatttgacctcttgcaaggttgctaatggctgn

SEQ ID NO: 22170 - DNA, 2007 bp, Homo sapiens
  SIMILAR (415)..(1215): 381254mologous to Homo sapiens eukaryotic translation initiation factor 2, subunit 2 (beta, 38kD ),accession number BC000934,Smith-Waterman Score=260.
taacggccctgaattcccgggtcgacgatttcgtgagagggcggggtgtcgtttcctttcgctgatgcaagagcctagtgcggtggtgggagaggtatcggcaggggcagcgctgccgccggggcctggggctgacccgtctgacttcccgtccgtgccgagcccactcgagccgcagccatgtctggggacgagatgatttttgatcctactatgagcaagacatgaaaaagaagaagaagaagccttttatgttagatgaggaaggggatacccaaacagaggaaacccagccttcagaaacaaaagaagtggagccagagccaactgaggacaaggatttggaagctgatgaagaggacactaggaaaaaagatgcttctgatgatctagatgacttgaacttctttaatcaaaagaaaaagaagaaaaaaaactaaaaagatatttgatattgatgaagcttgagaaaggtgtaaaggatctttaagatctgaagtgatgttcaagaaccaactgaaccagaggatgaccttgacattatgcttgggcataaaaagaagaaaaagaagaatgttaagttcccagatgaggatgaaatactagagaaagatgaagctctagaagatgaagacaacaaaaaagatgatggtatctcattcagtaatcagacaggccctgcttgggcaggtctcagaaagagactacacatacgaggagctgctgaatcggagtgttcaacatcatgagggaaaaagaatccaggatattggttgcctgggggacgaaaaaggaaatttggtccatggaaacctccacaagtccgtccgagtaggaaccaagaaaactttcttttgtccacttttacaggatatctgtaaactattacatcgttcagcccaaagcatctcctttgcatttttgttgggctgaattggggtaccaagtggttctatagatgggtaataacccaacttgtaatcaaagggaaggtttccaacagaaacagatagaaaatgtcttgagaagatatatccaaggaatatgtcacttgtacacacatgcccgatcaccggacacaaatcctgccagaaggacacacgactcctattcccctacagtgcggaaacttgttcattcttagatgtttctgttggccagtattcaaaaccggccttccccaggctgtccacgggcaaagccgaggcacagctcccgtgcccaaagcctaacctaatttgcctaatcactgatttctgcaaagctttgttgtggagatggtggctgggacagggtttgcccatcaagacgtggatataccggttggtattaaaaaacaagataaaaaaagctgcccaagatttttgggcgagttggttgggtctgaagtccttgcaagaccgctgatggctcaagctgtttgacatacttcattggcctacttttaacacctggtccagagaaacgtggtttggggggtaaggatggtgctttctcaaaatcgttcatagacttctctaaaatccaagataaattaacgctactctaacacgtgattctttcaatttggtttgcccttcagttttcttttctataaaggcgcttggtgaaatcagcaagaaaccaaccatataaaacagtgtgtgccgggctctgactgagaaactgaacaatggcaggcgctttatctgggcagccatttttcttctctgcttctcttgagacacatagttaaaggagacacggcctcccacgcgagtgtggtgggaccttgagacttaggaggattgcctgttttcagtgtccagggaatgactccatagatttgaattcttttccgtatgtggggatggttgctactacctcaccgccaagtcctcccccaagctgttaccacatgaagggaatacaaggtgctaggtaccctccttcctccgtttggccactaaagaggtcttagaaacatagcctgtaaatggtgtcttgtaactggcacactaaaaaagg

SEQ ID NO: 22171 - DNA, 439 bp, Homo sapiens
  SIMILAR (3)..(35): 1001254mologous to Homo sapiens E1B-55kDa-associated protein,accession number AJ007509,Smith-Waterman Score=54.
gtaccaatgccatcatggataagatgcgggtgatggcctacgccggcagcggaactatgctggccgctgggatgtcctgatccagcaggccacccagtgcctcaaccgcctcatccagattgctgcccgcaagaaacgcaactatatcctagatcagacaaatgtttatgggtcagcccagagacgaaaaatgagaccatttgaaggcttccagcgcaaagctattgtaatttgtcccactgacgaggacctaaaagaccgaacaataaagcgaaccgacgaggaagggaaggatgtcccagatcatgcggtctcccaggtgccagacccaaaagcttttcctacagtgataccctttatttttacttccccttgactcatatgttttaacatgattttaacaaactgcacttattaagaaatgtgtttgccctgttta

SEQ ID NO: 22172 - DNA, 419 bp, Homo sapiens
  SIMILAR (379)..(305): 1001254mologous to Homo sapiens E1B-55kDa-associated protein,accession number AJ007509,Smith-Waterman Score=133.
cattgctcctatatccattgaggagtctccctgaaaatcctctgaggttagtacagcagatttactccttcctgaagggaagctcagagaagtagaatgacttgcccagggtcccactgctagagttgggagtaggtcttttgcctccaaaccagtactcttgctccagagctaagccgtgtctcacatgtggactaacaatgtctttggacggtgcccagcagggattctggtgaaggtcaagaccacaatttccccatactgactgtaaggcagaattagatgcacactccaaagacttacaggtgtcaatagcaacaagggtatcatcaaagtcatcttcatcctcttcagcaggaggctgaggagagcggcccctgtactagaaccaggggttaagtcatacaagaacaatggat

SEQ ID NO: 22173 - DNA, 3247 bp, Homo sapiens
  SIMILAR (173)..(2848): 931254mologous to Homo sapiens putative tyrosine kinase receptor=UFO,accession number S65125,Smith-Waterman Score=4332.
gctgggcaaagccggtggcaagggcctcccctgccgctgtgccaggcaggcagtgccaaatccggggagcctggagctggggggagggccggggacagcccggccctgccccctcccccgctgggagcccagcaacttctgaggaaagtttggcacccatggcgtggcggtgccccaggatgggcagggtcccgctggcctggtgcttggcgctgtgcggctgggcgtgcatggcccccaagggcacgcaaggctgaagaaagtcccttcgtgggcaacccaagggaatatcacaggtgcccggggactcacgggcacccttcggtgtcagctccaggttcagggagagccccccgaggtacattggcttcgggatggacagatcctggagctcgcggacagcacccagacccaggtgcccctgggtgaggatgaacaggatgactggatagtggtcagccagctcagaatcacctccctgcagctttccgacacgggacagtaccagtgtttggtgtttctgggacatcagaccttcgtgtcccagcctggctatgttgggctggagggcttgccttacttcctggaggagcccgaagacaggactgtggccgccaacacccccttcaacctgagctgccaagctcagggacccccagagcccgtggacctactctggctccaggatgctgtccccctggccacggctccaggtcacggcccccagcgcagcctgcatgttccagggctgaacaagacatcctctttctcctgcgaagcccataacgccaagggggtcaccacatcccgcacagccaccatcacagtgctcccccagcagccccgtaacctccacctggtctcccgccaacccacggagctggaggtggcttggactccaggcctgagcggcatctaccccctgacccactgcaccctgcaggctgtgctgtcagacgatgggatgggcatccaggcgggagaaccagaccccccagaggagcccctcacctcgcaagcatccgtgcccccccatcagcttcggctaggcagcctccatcctcacaccccttatcacatccgcgtggcatgcaccagcagccagggcccctcatcctggacccactggcttcctgtggagacgccggagggagtgcccctgggcccccctaagaacattagtgctacgcggaatgggagccaggccttcgtgcattggcaagagccccgggcgcccctgcagggtaccctgttagggtaccggctggcgtatcaaggccaggacaccccagaggtgctaatggacatagggctaaggcaagaggtgaccctggagctgcagggggacgggtctgtgtccaatctgacagtgtgtgtggcagcctacactgctgctggggatggaccctggagcctcccagtacccctggaggcctggcgcccaggggaagcacagccagtccaccagctggtgaaggaaccttcaactcctgccttctcgtggccctggtggtatgtactgctaggagcagtcgtggccgctgcctgtgtcctcatcttggctctcttccttgtccaccggcgaaagaaggagacccgttatggagaagtgtttgaaccaacagtggaaagaggtgaactggtagtcaggtaccgcgtgcgcaagtcctacagtcgtcggaccactgaagctaccttgaacagcctgggcatcagtgaagagctgaaggagaagctgcgggatgtgatggtggaccggcacaaggtggccctggggaagactctgggagagggagagtttggagctgtgatggaaggccagctcaaccaggacgactccatcctcaaggtggctgtgaagacgatgaagattgccatctgcacgaggtcagagctggaggatttcctgagtgaagcggtctgcatgaaggaatttgaccatcccaacgtcatgaggctcatcggtgtctgtttccagggttctgaacgagagagcttcccagcacctgtggtcatcttacctttcatgaaacatggagacctacacagcttcctcctctattcccggctcgggggccagccagtgtacctgcccactcagatgctagtgaagttcatggcagacatcgccagtggcatggagtatctgagtaccaagagattcatacaccgggacctggcggccaggaactgcatgctgaatgagaacatgtccgtgtgtgtggcggacttcgggctctccaagaagatctacaatggggactactaccgccagggacgtatcgccaagatgccagtcaagtggattgccattgagagtctagctgaccgtgtctacaccagcaagagcgatgtgtggtccttcggggtgacaatgtgggagattgccacaagaggccaaaccccatatccgggcgtggagaacagcgagatttatgactatctgcgccagggaaatcgcctgaagcagcctgcggactgtctggatggactgtatgccttgatgtcgcggtgctgggagctaaatccccaggaccggccaagttttacagagctgcgggaagatttggagaacacactgaaggccttgcctcctgcccagggagcctgacgaaatcctctatgtcaacatggatgagggtggaggttatcctgaaccccctgggagctgcaggaggagcttgaccccccaacccagccagaccctaaggattcctgttagctgccttcacttgcggctgaggtccatcctgctggacgctatgtcctctgcccttccacaacccctagccccgctcagcctgctgataggggctccccagcagccccagggcaggaggatggtgcctgagacaaccctccacctggtactccctctcaggatccaagctaagcactgccactggggaaaactccaccttcccacttttccaccccacgccttatccccacttgcagccctgtcttcctacctatcccacctccatcccagacaggtccctccccttctctgtgcagtagcatcaccttgaaagcagtagcatcaccatctgtaaaaggaaggggttggattgcaatatctgaagccctcccaggtgttaacattccaagactctagagtccaaggtttaaagagtctagattcaaaggttctaggtttcaaagatgctgtgagtctttggttctaaggacctgaaattccaaagtctctaattctattaaagtgctaaggttctaaggcctaaaa

SEQ ID NO: 22174 - DNA, 3899 bp, Homo sapiens
  SIMILAR (1549)..(1920): 331254mologous to Homo sapiens E1B-55kDa-associated protein,accession number AJ007509,Smith-Waterman Score=97.
aaccctgcttccttcctgctaggaggtgccatgtcatttattcaaagaaaacaaaacgaaaccaaacaaaacagggcaaacacatttcttaataagtgcagtttgttaaaatcatgttatgggcattttagtcatggggaagtgaaaataaccggcatcactgtaggaaaagcttttgggtctggcacctgggagaccactggagaggaggcagtgggagaaacttcaagttctgaagggaaggagccccccaacctccccttcttccctctcacccactgaatcccaccagaaactaccaagacgcccggaataaaaggtttcaagttcaatagtcactctctccaaatacaaaaagcagttacaattcaactgaacacagaagcttgtgtgcaaagttatggggaactggggcatcgtataaaaagttgggttaaagatgattctgtggtttggttttgttgtgttttgttttgtggctcttcctcagtcacctgaactccgggaaagaaatgccttatcttgatgaaatatcaacagccccaccccacagtaaaaagacaaattctaaaaattaaaaaaaagcgcataattaccaaaaaaaagtcactgcttcctccccctccccattttgctttttaaacttttttttttttaagttttgattttttttttaatcctgaaaagtagacagtaaaacagctcctgggagaatttacaaccaactgcatgagggtctgggaagctgaggggctggagcagggttgggagagtgaacaggaggggattctcccctcagtcactgtagcctcactgtatgatcaagggaggtggggattatttagtcaaaaaggaagaaggtaggaagaacaggaggtggaaggctggggaggtggggacaaacagaaaataaaaggtcattgttgcctgtttgaatccagaaaaaaatgcctggccctatggaggggaaggaaagcccctcagaggggaggcagtgggcttggagggaggcagccctgggatgacccccatcccccagcacccacgggatctggcgggggcccgaagaaggggccgaggcaggcgctggtggaggaatgccggccaggggcctcccgggaagcctctgggtccacactggcctactgtgtacttgtgcccacccttgtgtgttccccggagtagctcccgtagtcgtagttcccgtagtatggcggccactggccctggttctgatagtactggttccactgctgggcatactgctgatactggttatagctgggctgagggtaggtctgtacaatagggggctggcggtggggtatagggggccgggttgtaaccgccgtagctcccatagttgtaggcaggtggtggtggaggtggaggcggtggggctgtgtagccctggctgtaacctcccctggttgtagggtggctggctgtaactcggctgtggaagggctgtagctgctgacggtgggggtgctggtattggcgcttgagccagggatgttgctgttcttattggaagagctggcccctggggggttccgagcaaggctgtagctgggtggtggcggtggctgctggggtggtggctgtggtggcggaggctgctgtggtggcggctgttgctggggagcccggttgtagctgcctctgttgttggagttgttgttatcccggttgttgctaccccagcggttctggctataaccaccacctccgctgcagatgaaaactcctcggtagttgcctcctccaccgctgcctcccccttggttttggaagccgacacggctgcctccagggggtcctcaggtttcatagcgctggaagccaacaccaccccccggggcccggaaagccaccaccacctcggttgtcaaagcgcttttcagggggtggcccagccttgcggccttcctcgttgtactgcctcactagcttgtccgcttcctcccgctgcagctcaatgaacagaacctcatccaggaagtccccaacatctggcaacgtgaagttggctttcatttctaagaccgcatgatctgggacatccttcccttcctcgtcggttcgctttattgttcggtcttttaggtcctcgtccagtgggacaaattacaatagctttgcgctggaagccttcaaatggtctcatttttcgtctctgggctgacccataaacatttgtctgatctaggatatagttgcgtttcttgcgggcagcaatctggatgaggcggttgaggcactgggtggccctgctggatcaggacatcccagcggccagcatagttaccgctgccggcgtaggcccatcacccgcatcttatccatgatggcattggtacccaggatgttgtacttcttggaagggttggaggctgcatgtttgatggcccatgtggtcttgccagcagcaaggcatggcccaccatcatcagaatctcacattctgccttgctctttggtcccaacggtgccccggatacgctcactaaggggaaggtgctggatgaaggtaaaccccgggaggacagaacagtagggctctgctctctgtccgaagttgaactccactgcgcaattcttcaccaggacatgaggatagagggcctgaccccccaaggcttccttctggattcggaaagcaatgcccatccactttccattcttggtaaaagacagttccacgtcatttccacattcaaaatccgcaaagcagccaatcacatcgttctctgcaaacttgtctccgtagttttcaaaccggctattggtggacttcttcccagtgcctccatagccataggagaaaggctcttcgcctagctgggtgctgcaggagtccagggaccagccgatacggaccacgtgggggtcaggctctgtagacggaaggtgcttcacggagatttcctcattgatcttcatctcgaagcatacacggccccttctgaccccatagctggcacgggctcctgaccacaggtatgcaaagccctcaattgtgagcggatagccactactccgatctcgggccaccttgaagtggaggtcgcagttataggtgtcaatagcaacaagggtatcatcaaagtcatcttcatcctcttcagcaggaggctgaggagagcggcccctcctatcctctcggtgctcaaagtacccccgtccccggttttcttcataaggcctctttcgactctggaattgctgcctgtctggcttgagttgagaagcttcaggcgggaggaagctggtgggtgctccttgcttcatctctgtcttcatttctggacgataggcctgctgctgctccatttccagtggtctcctctcgtagcctgactcgttttcttgtttgatgacttgggtatcgtagaattggttctgcctggtaatattgtccatggcataatgtccgtccggccccgagtagccgccgggctccgcgtgcggctgcagcccgggcggcggtggctgcgcggtcccctccagctcggagcccccctcggtctcgacctcctcgttgatgtgcccgggtcgccccggttcgtcgtcggcgtcgagctcccgctcgtcgtcaggctcctcggcctccaacgccgcctgcagccgctcagcaagctcggtcttgaggcctcgagtgtccaggccgcggcgctgcagctcctcgcgaagttcgttcaccttcagacggcgcacatccatggcccgggcccccggggtggcccccgagcccggcccggcctcccagggctctgtcccccttaaacctttcctgtcaggaggcgaagggggaaagggggggggcccactccaatggcggcagcggctcaaaatggccgccgccaccgcctcccccctcactcgtgcctcgtccg

SEQ ID NO: 22175 - DNA, 6306 bp, Homo sapiens
  SIMILAR (3806)..(4450): 651254mologous to Homo sapiens Human axl receptor,accession number R85753,Smith-Waterman Score=626.
atggaggcgaccggcacctgggcgctgctgctggcgctggcgctgctcctgctgctgacgctggcgctgtccgggaccagggcccgaggccacctgccccccgggcccacgccgctaccactgctgggaaacctcctgcagctacggcccggggcgctgtattcagggctcatgcggctgagtaagaagtacggaccggtgttcaccatctacctgggaccgtggcggcctgtggtggtcctggttgggcaggaggctgtgcgggaggccctgggaggtcaggctgaggagttcagcggccggggaaccgtagcgatgctggaagggacttttgatggccatggggttttcttctccaacggggagcggtggaggcagctgaggaagtttaccatgcttgctctgcgggacctgggcatggggaagcgagaaggcgaggagctgatccaggcggaggcccggtgtctggtggagacattccaggggacagaaggacgcccattcgatccctccctgctgctggcccaggccacctccaacgtagtctgctccctcctctttggcctccgcttctcctatgaggataaggagttccaggccgtggtccgggcagctggtggtaccctgctgggagtcagctcccaggggggtcagacctacgagatgttctcctggttcctgcggcccctgccaggcccccacaagcagctcctccaccacgtcagcaccttggctgccttcacagtccggcaggtgcagcagcaccaggggaacctggatgcttcgggccccgcacgtgaccttgtcgatgccttcctgctgaagatggcacaggaggaacaaaacccaggcacagaattcaccaacaagaacatgctgatgacagtcatttatttgctgtttgctgggacgatgacggtcagcaccacggtcggctataccctcctgctcctgatgaaataccctcatgtccaaaagtgggtacgtgaggagctgaatcgggagctgggggctggccaggcaccaagcctaggggaccgtacccgcctcccttacaccgacgcggttctgcatgaggcgcagcggctgctggcgctggtgcccatgggaataccccgcaccctcatgcggaccacccgcttccgagggtacaccctgccccagggcacggaggtcttccccctccttggctccatcctgcatgaacccaaacatcttcaagcacccagaagagttcaacccagaccgtttcctggatgcagatggacggttcaggaagcatgaggcgtttcctgcccttttccttagggaagcgtgttttgccttgggagagggcctggcaaaagcggagctcttcctcttcttcaccaccatcctacaagccttctccctggagagcccgtgcccgccggacaccctgagcctcaagcccaccctacccacgtacgacatcgtccttggctcccagaagtatcttcccactgagacacgccgcccccacagaggcacagtccccagccacctctgcaactgcagccctcagtcacccctttttaagcaccctgattctaccaaatgcaaacacatctgggtctgcgaattatgcacagggcactttgggacatacgaagggaccctcagaccggagggaacacctgacccaaccccaacacgtgcttatgtaaccacgtggaaagcggcccctgctgcccctccacacacacatacacactcactgatctacagcccctgttcggcgtcagagtccccactagacccagtggaaggggcacgcaggctgaagaaagtcccttcgtgggcaacccagggaatatcacaggtgcccggggactcacgggcacccttcggtgtcagctccaggttcagggagagccccccgaggtacattggcttcgggatggacagatcctggagctcgcggacagcacccagacccaggtgcccctgggtgaggatgaacaggatgactggatagtggtcagccagctcagaatcacctccctgcagctttccgacacgggacagtaccagtgtttggtgtttctgggacatcagaccttcgtgtcccagcctggctatgttgggctggagggcttgccttacttcctggaggagcccgaagacaggactgtggccgccaacacccccttcaacctgagctgccaagctcagggacccccagagcccgtggacctactctggctccaggatgctgtccccctggccacggctccaggtcacggcccccagcgcagcctgcatgttccaggtgcggccgttggggcctgggaagggggatcccggctctggctccgcgcccccgaagccggccggaagcgctggggtggggaggtgcccccggtgactcacgcgggggcaggaatgctgcggtcggaacgggacccggctccagaacccacctccagccccagggcttctccggccggcggcgccagctcccgcgcgctgaccctggcggggccccacgtgccagggctgaacaagacatcctctttctcctgcgaagcccataacgccaagggggtcaccacatcccgcacagccaccatcacagtgctcccccagcagccccgtaacctccacctggtctcccgccaacccacggagctggaggtggcttggactccaggcctgagcggcatctaccccctgacccactgcaccctgcaggctgtgctgtcaaacgatgggatgggcatccaggcgggagaaccagaccccccagaggagcccctcacctcgcaagcatccgtgcccccccatcagcttcggctaggcagcctccatcctcacaccccttatcacatccgcgtggcatgcaccagcagccagggcccctcatcctggacccactggcttcctgtggagacgccggagggagtgcccctgggcccccctgagaacattagtgctacgcggaatgggagccaggccttcgtgcattggcaagagccccgggcgcccctgcagggtaccctgttagggtaccggctggcgtatcaaggccaggacaccccagaggtgctaatggacatagggctaaggcaagaggtgaccctggagctgcagggggacgggtctgtgtccaatctgacagtgtgtgtggcagcctacactgctgctggggatggaccctggagcctcccagtacccctggaggcctggcgcccagggcaagcacagccagtccaccagctggtgaaggaaccttcaactcctgccttctcgtggccctggtggtatgtactgctaggagcagtcgtggccgctgcctgtgtcctcatcttggctctcttccttgtccaccggcgaaagaaggagacccgttatggagaagtgtttgaaccaacagtggaaagaggtgaactggtagtcaggtaccgcgtgcgcaagtcctacagtcgtcggaccactgaagctaccttgaacagcctgggcatcagtgaagagctgaaggagaagctgcgggatgtgatggtggaccggcacaaggtggccctggggaagactctgggagagggagagtttggagctgtgatggaaggccagctcaaccaggacgactccatcctcaaggtggctgtgaagacgatgaagattgccatctgcacgaggtcagagctggaggatttcctgagtgaagcggtctgcatgaaggaatttgaccatcccaacgtcatgaggctcatcggtgtctgtttccagggttctgaacgagagagcttcccagcacctgtggtcatcttacctttcatgaaacatgggagacctacacagcttcctcctctattcccggctcggggaccagccagtgtacctggcccacttcagatgctagtgaagttcatgggcagacatcgccagtggcatgggagtatcttgagtaccaagagatttcatacaccggggacctgggcggccagggaactgcattgctggaatgagaacatgttccgtgtgtgtggccggactttcggggttctccaagaaggttttacaatggggattattaccgccagggaacgttttcgccaagatgccagtcaagtggattgccattgagagtctagctgaccgtgtctacaccagcaagagcgatgtgtggtccttcggggtgacaatgtgggagattgccacaagaggccaaaccccatatccggggcgtggagaacagcgagatttatgactatctgcgccagggaaatcgcctgaagcagcctgcggactgtcttggatggactgttatgccttgatgtcgcggtgctgggagctaaatccccaggaccggccaagttttacagagctgcgggaagatttggagaacacactgaaggccttgcctcctgcccaggagcctgacgaaatcctctatgtcaacatggatgagggtggagacgccagacagcccgatttacgggaacagccgattagaggattcgggagagcggtcggtgaacttctggatgtctttcgggaggggaaggctctatggtcgcgtgcagagcgcccgttccacgtcaggaaaggtttaagggggacagagccctgggaggccgggccgggctcgggggccaccccgggggcccgggccatggatgtgcgccgtctgaaggtgaacgaacttcgcgaggagctgcagcgccgcggcctggacactcgaggcctcaaggccgagcttgctgagcggctgcaggcggcgttggaggccgaggagcctgacgacgagcgggagctcgacgccgacgacgaaccggggcgacccgggcacatcaacgaggaggtcgagaccgaggggggctccgagctggaggggaccgcgcagccaccgccgcccgggctgcagccgcacgcggagcccggcggctactcggggccggacggacattatgccatggacaatattaccaggcagaaccaattctacgatacccaagtcatcaaacaagaaaacgagtcaggctacgagaggagaccactggaaatggagcagcagcaggcctatccgtccagaaatgaagacagagatgaagcagggagcacccaccagcttcctcccgcctgaagcttctcaactcaagccagacaggcagcaattccagagtcgaaagacgccttatgaagaaaaccggggacggggggtactttgagcaccgagaggataggaggggccgctctcctcagcctcctgcttgaagaggatgaagatgacttttgatgatacccttgttgctattgacacctataacttgcgaacctccacttcaaggtggcccgagatcggagtagtgggctatccgcttcacaattgaggggctttgcatacctggggtcaggagcccgtgccagctattgggtcagaaggggccgtgtatgcttggagatgaagatcaatgaggaaatctccgtgaagcaccttccgtctacagagcctgacccccacggtggtccgtatcggctggtccctggactcctgcagcaacccagctaggcgaagaagctttctcctatggctatggagggactgggaagaagtccaccaatagccggtttgaaaactacggagacaagtttggagagaacgatgtgattggctgctttgcggattttgaatgtggaattgaacgtggaaactgtcttgtaccaagaatggaaagtggatgggcattgctttccgaatccagaagggaagccttggggggtcaggccctctatcctcatgtcctggtgaagaattgcgcagtggagttcaacttcggacagagagcagagccctactgttctgtcctcccggggtttaccttcatccagcaccttccccttagtgagcgtatccggggcaccgttggaccaaagagcaaggcagaatgtgaggcactgtgctcagagtctgacaagcctgatctttttgaatcccgataccagtactgtgagattctgatgatggtgggcctgcctgctgctggcaagaccacatgggccatcaaacatgcagcctccaacccttccaagaagtacaacatcctgggtaccaatgccatcatggataagatgcgggtgatgggcctacgccggcagcggaactatgctggccgctgggatgtcctgatccagcaggccacccagtgcctcaaccgcctcatccagattgctgcccgcaagaaacgcaactatatcctagatcagccagagatttttacatctgcaaatgctctccagagccaggacgagggtgatgatccttgtctttcagacgaggaaatttga

SEQ ID NO: 22176 - DNA, 394 bp, Homo sapiens
gtgtgcagtaaactggaatgctctccctcgctcactcctcagtgtaggagtgatctgaagcaggacaagctcagcctgcagctgccgtgggctttgtgtggactggacgcagagcttgggagacgggggagggctattactccaattcactgtcaatggaattacagctatagcggcagtgtatataggattgctttttctcgtcttcctggagatgctcagtcccagtatattttaaggaagagaaatataaaggaaatttagtatgcctccttttctttaaatgaagaatttagtttcctttacttcttaaaagagaatacctgttcttgtataacgtgactgcaccagacattctgaaaaatcagcaagaagcaaaagctggaaatagctt

SEQ ID NO: 22177 - DNA, 2906 bp, Homo sapiens
  SIMILAR (1240)..(2160): 801254mologous to Homo sapiens leucine-rich repeat transmembrane protein FLRT3,accession number AF169677,Smith- Waterman Score=1253.
  misc_feature (1)...(2906): n = a,t,c or g
cgaccctcgctcactcctcagtgcacgagtgatctgaagcatgacaagctcagcctgcagctgccgtgggctttgtgtggactggacgcagagcttgggagacgggggagggctattactccaattcactgtcaatggaattacagctatagcggcagtgtatataggatggctttttctcgtcttcctgggttctgaagtaacggaagctaccttgtataaagacctcaacactgctgaccatgatcagcgcagcctggagcatcttcctcatcgggactaaaattgggctgttccttcaagtagcacctctatcagctatggctaaatcctgtccatctgtgtgtcgctgcgatgcgggtttcatttactgtaatgatcgctttctgacatccattccaacaggaataccagaggatgctacaactctctaccttcagaacaaccaaataaataatgctgggattccttcagatttgaaaaacttgctgaaagtagaaagaatatacctataccacaacagtttagatgaatttcctaccaacctcccaaagtatgtaaaagagttacatttgcaagaaaataacataaggactatcacttatgattcactttcaaaaattccctatctggaagaattacatttagatgacaactctgtctctgcagttagcatagaagagggagcattccgagacagcaactatctccgactgcttttcctgtcccgtaatcaccttagcacaattccctggggtttgcccaggactatagaagaactacgcttggatgataatcgcatatccactatttcatcaccatctcttcaaggtctcactagtctaaaacgcctggttctagatggaaacctgttgaacaatcatggtttaggtgacaaagttttcttcaacctagttaatttgacagagctgtccctggtgcggaattccctgactgctgcaccagtaaaccttccaggcacaaacctgaggaagctttatcttcaagataaccacatcaatcgggtgcccccaaatgctttttcttatctaaggcagctctatcgactggatatgtccaataataacctaagtaatttacctcagggtatctttgatgatttggacaatataacacaactgattcttcgcaacaatccctggtattgcgggtgcaagatgaaatgggtacgtgactggttacaatcactacctgtgaaggtcaacgtgcgtgggctcatgtgccaagccccagaaaaggttcgtgggatggctattaaggatctcaatgcagaactggttgaatgttaaggacagtgggattgtaagcaccattcagataaccactgcaatacccaacacagtgtatcctgcccaaggacagtggccagctccagtgaccaaacagccagatattaagaaccccaagctcactaaggatcaccaaaccacagggagtccctcaagaaaaacaattacaattactgtgaagtctgtcacctctgataccattcatatctcttggaaacttgctctacctatgactgctttgagactcagctggcttaaactgggccatagcccggcatttggatctataacagaaacaattgtaacaggggaacgcagtgagtacttggtcacagccctggagcctgattcaccctataaagtatgcatggttcccatggaaaccagcaacctctacctatttgatgaaactcctgtttgtattgagactgaaactgcaccccttcgaatgtacaaccctacaaccaccctcaatcgagagcaagagagagaaccttacaaaaaccccaatttacctttggctgccatcattggtggggctgtggccctggttaccattgcccttcttgctttagtgtgttggtatgttcataggaatggatcgctcttctcaaggaactgtggcatatagcaaagggaggagaagaaaggatgactatgcagaagctgttcacttaaggaaggacaactcttattcctgggaaatcagggaaacttctttttcagatgttaccaataagcaatgaacccatctccgaaggaggagtttgtaatacacaccatatttcctcctaatggaatgaatctgtacaaaaacaatcacagtgaaagcagtagtaaccgaagctacacgagacagtggtattccagactcagatcactcacactcatggatgctgaaggacctcaccagcagacttgtgttttggggtttttttaaaccctaagggaggtggatgggtaggaaccctggttcttactgccaaaacactggaaaaagagactgaaaaaaagcaatgtactgtacatttgccattataatttatatttaagaactttttattaaaagtctcaaatttcaggttactgctgcgattgatgtagtggagatgcctgaacacaattctatattttagtattttttagtaatttgtactgtattttccttgcaaatattggagttataaaccatttactttgtgttctactgagtaagatgacttgttgactgtgaaagtgaattttcttgctgtgtcgaacaatcaggactgcattcatatgagatccttgtagtataagcacaggccatttttcactttggtattaataaaatgtnnnnnnnnnnncctggctgaagggctgaatgaaataaaatttaattttaaaaaagggttatgaaataatggcccaattattaaatttgtattatcccaggggtattcaataaatcaaaatgtgggaagtaaggggcaataacaaacttcctgcatatctccatttttgctctaggcaaattaattatccttaaaaaagttaagcatatcttctgaactgaatacatcagctggcataaaaggagcatgaagtctgttaaac

SEQ ID NO: 22178 - DNA, 431 bp, Homo sapiens
  SIMILAR (167)..(69): 451254mologous to Synechocystis sp. UDP-N-acetyl-D- mannosaminuronic acid transferase,accession number D90913,Smith- Waterman Score=73.
tttttccatgaaatacagctggtacttgcaatagtacttgggtgttgaacttgttaagagtgcatatcctttttttcagatccatctatcatttcctagttgtatgtggttgtgtgggttatttctcctcttttacattgattttctcaccagtattaataattatcaccaaataactattacagaaaacttcctcagaaagtaaaattagagtgaaggtatcacaggttggcactattttcattcccgaccaagaaactgacacctgagaaagtatctctttgttgcaggtttttggaaatgggctatattttttgaatcataaccgatatgtactgccataaacaagaggatttcaagccagctccatcttaagcttctcagccttttaccctcctctggaataatgagtgtatcccaaaagtaaatcc

SEQ ID NO: 22179 - DNA, 424 bp, Homo sapiens
  SIMILAR (277)..(137): 361254mologous to Coturnix coturnix sonic hedgehog,accession number AF022882,Smith-Waterman Score=63.
cagggttattgcaagtagcaaggagaaaatatatatttaccatttgccaccaatccctggggaagtgcagtcaatacattggaaagggtcctcataagagtttgatgatcattctcagaaagctagccagagaaagtctaaatggtaaaggttccagctcattatcttcttcccttttctcaagttttctctccatctgacatgtgagctcagtatttaccattgccctttctacaaatttaaccaagtttatttaaaaacataatgaccttctatcccaatttacattttctttggtgtagaggacgcctttaccttgatgtgtggagacaagccgttgatttgtaagaaacaccaattatcagcttccacttgtgcttcacaatctgctgagtcgctttaacacttttgatgaactcgtgcc

SEQ ID NO: 22180 - DNA, 480 bp, Homo sapiens
  SIMILAR (223)..(477): 891254mologous to Cloning vector pEH1 lac repressor,accession number AJ007659,Smith-Waterman Score=357.
atggaatactatgtagccatgaaaaaggatgagttcatgtcctttggagggacatggatgaagctggaagccattattctcagcaaactaacacaggaacagaaaaccaaacaccgcatgttctcactcataaggcttcatcaaggaggtgaaattcaggctcaggaaaatctgatgggggaagcagggagaagatgggtgttccaggaaagggaaaaacagaccaaatccagcagggattttgccgatttcggaaccaccatcaaacaggattttcgcctgctggggcaaaccagcgtggaccgcttgctgcaactctctcagggccaggcggtgaagggcaatcagctgttgcccgtctcactggtgaaaagaaaaaccaccctggcgcccaatacgcaaaccgcctctccccgcgcgttggccgattcattaatgcagctggcacgacaggtttcccgactggaaagcgggcagtga

SEQ ID NO: 22181 - DNA, 2556 bp, Homo sapiens
  SIMILAR (1570)..(2553): 851254mologous to Homo sapiens putative p150,accession number U93567,Smith-Waterman Score=1417.
atggtaccagcatctgcttctgatgagggcctcaggaagcttccagtcatggtggaaggtgaagggggagccagcgtatcacatggcaaacaggccctgatgatcactgatttcattgcgaaccaaagcaaagacaggagcctgattgttcgattactttgtgccacattttataaggaaaaactgatcactattcacaatagcaaaggcatggaatcaccccaaatgcacatcagtgacagactggataaagaaaatgtggtacatatataccatggaatactatgcagtcacaagaaggaacaagatcgtgtcctttgcagagacatagatggagctggaagtcattatcgtcagcaaactaacacaggaacagaaaaccaaacactgcatgttctcacttacaagtgggagctgaacgatgagaacacatggacacagggaggggaacaacacacactagagcctgttgagcccactgaagagaagctttttatccagtttgaaagatcacatattgtgtcagcctggactgccttgcagaccttttctacaattaaacttctttgcttactgaaagctttcatccctgaggcttgttttcttgctcagataatggactcaatcacacaagaaggaataatagagattacggaacgcagctcctcaccagcaacggaacaaagctggacggagaatgactttgacgagttgagagaggaaggcttcagaaaatcaaactactccgagctaaaggaggaagttcgaaccaatggcaaaaaagttaaaaactttgaaaaaaaattagacgaatggataactagaataaccaatgcagagaagtccttaaaggacttgatggagcggaaaaccaaggcacgagaactacgtgatgaatgcacaagcctcagtaaccgatgcgatcaactggaagaaaggggatcagcgatggaagacgaaatgaatgaaatgaagcaagaagagaagtttagagataaaagaataaaaagaaatgaacaaagcctccaagaaatatgggactgtgtgaaaagaccaaatctacgtctgattggtgtacatgaaagtgatggggagaatggaaccaagttggaaaacactcttaaggatattatccaggagaacttccccaatctagcaaggcaggtcaacactcaaattcaggaaatacagagaatgccacaaagatactcctcgagaagagcaactccaagacacataattgtcagattcaccaaagttgaaatgaaggagaaagtgttaagggcaaccagagagaaaggtcgggttacccacaaagggaagcccatcagactaacagctgatctctcggtagaaactctacaagccagaagagagtgggggccaatattcaacattctaaaagaaaagaattctcaacccaggatttcgtatccagccaaactaagcttcaaaactgaaggagaaataaaatcctttacagacaagcaaatgctgagagattttgtcaccaccaggcctgccctaaaagagctcctgaaggaagcactaaacatggaaaggaacaaccgagacacatataggctcaaaataaagggatggaggaaaatctaccaagcaaatggaaaacaaaaaaaggcaggggttgcaatcctagtcttggataaaacagacttcaaaccaacaaagatcaaaagagacaaagaaggccattacataatggtaaagggatcaattcaacaagaagaactaactatcctaaatatatatgcacccaatacaggagcactcagattcataaagcaagtccttagtgacctacaaagagactcagactcccacacaataataacgggagactttaacacctcactgtcaacattaggcagatcaacaagacagaaagttaacaaggatatccaggaattgaactcagctctgcgccaagtggacctaatagacatctatagaactccccaccccaaatcaacagaatatacattcttttcagcaccacaccgcacctattccaaaattgaccacatagttggaagtaaaagagtcctcagcaaatgtaaaagaacagaaatgataacaaactgtctctcagaccacagtgcaatcaaaccagaactcaggattaagaaactcactcaaaaccactcaattacatggaaactgaacaacctgctcctgaatgactactgggtacataacgaaatgaaggcagaaataaagatgctctttgaaaccaacgagaacaaagacacaacataccagaatctctgggacacattcaaagcagtgtgtagagggaaatttatagcactaaaggcccacaagagaaagcaggaaagatctaaaattgacaccctaacatcacaattaaaagaactagagaagcaagagcaaacacattcaaaagctagcagaaggcaagaaataactaagaacagagcagaactgaaggaaataagacacaaaaaaccgttcaaaaaatcagtgaatccaggagctggttttttgaaaagatcaacaaaattgacagaccgctag

SEQ ID NO: 22182 - DNA, 617 bp, Homo sapiens
  SIMILAR (309)..(235): 681254mologous to Homo sapiens Human GUS protein fragment,accession number W93828,Smith-Waterman Score=91.
ccatgaaatacagctggtacttgcaatagtacttgggtgttgaacttgttaagagtgcatatcctttttttcagatccatctatcatttcctagttgtatgtggttgtgtgggttatttctcctcttttacattgattttctcaccagtattaataattatcaccaaataactattacagaaaacttcctcagaaagtaaaattagagtgaaggtatcacaggttggcactattttcattcccgaccaagaaactgacacactggttagtcatgaaatcggcaaaattccagatgagctctccaaccaccgtattttctgcgtttttgatccagacccagatggtactgctctagcaggacttttccgggtcctcttcactggaacatcagaggtggatcctggtgaaaccctacaagcgtttccactccatacgcgctctgaataatgggattgtgatggtccttacaccaattctcaaactggggcggccagctgcagctggaatcaactcccaggtggcccgtagttgcgatacccagagtagtagctgttcacacggggtcacatccacatacagagcccccttgtctgctgcgtaggtggagttggtcacaa

SEQ ID NO: 22183 - DNA, 889 bp, Homo sapiens
  SIMILAR (686)..(588): 721254mologous to Homo sapiens Human secreted protein, SEQ ID NO: 7217,accession number G03136,Smith-Waterman Score=128.
gatatttaatttgccacggcaaagccattgctgtgaagaatggataatatatgtcaatggtaatatatgaagaaataacacaggtgaatagcagaggcaataaatctgtttttaccacaggacttgtcttacacttttctcttagtaataaataaaataattttcgacccagatggagctggcttgaaatcctcttgtttatggcagtacatatcggttatgattcaaaaaatatagcccatttccaaaaacctgcaacaaagagatactttctcaggtgtcagtttcttggtcgggaatgaaaatagtgccaacctgtgataccttcactctaattttactttctgaggaagttttctgtaatagttatttggtgataattattaatactgccataacatcctatggccctgaaaatagttctgccaagctgcgtgcagtggacacttcacggctggcacaggagagatcacaaggccttgctcaatttcatcaaaagtgttaaagcgactcagcagattgtgaagcacaagtggaagctgataattggtgtttcttacaaatcaacggcttgtctccacacatcaagggacatggatgaagctggaagccattatccttagcaaagtaacgcaggaacagaaaaccaaacaccacatgttgtctcttagaagtgggagctgaacgaatcacgccgagcggtcaacaaggcccactcgccgacgtcaaacgtagggcactaacacagcacgataccttctacgggacctggcaacgagggagttccgccaagtggggattagcccaatgcaaattcgtggacgtacgatatcactcgaagtggaagcgcaggagcgtctcgaacctcgagggtgtcggatgcccttaa

SEQ ID NO: 22184 - DNA, 298 bp, Homo sapiens
  SIMILAR (2)..(79): 731254mologous to Homo sapiens PRO1546,accession number AF116638,Smith-Waterman Score=120.
atgcccatcaatgatagactggctaaagaaaatgtggcacagatacaccatggaatactatgcagcccataaaaaagaatgagatcatgtccctttgcagggacatggatgaagctggaagccatcatcctcagcaaactaacacaggaacagaaaaatcaaacactgcatgttctcacttataactgggagctgaacaatgagaacacatggacacagggaggggaacaacacaccccacctgtcaggaggggaaaggaatttgtggcagctgaattcatacctcctggtgctaagg

SEQ ID NO: 22185 - DNA, 2065 bp, Homo sapiens
  SIMILAR (422)..(460): 1001254mologous to Homo sapiens bA305P22.2.1 (novel protein, isoform 1),accession number AL121673,Smith-Waterman Score=62.
atggaagaacgggaagaggtgctggcggtcacagcagcccagggttcgtctgtgctcgtttatagatttgtgtgcccatccagtcctcactgggccctcccagttttagaaatgttgaacactagtgcttgtaagattcgaacaatgagtttaccagctctgagaaaaatgaactgctccagaaccttcaagaatgtttctctgtatcacgcccacatcacaccgaatccatttgtcgtcattgcagagttcatctttctggttttgagcaccatctcacacagttctttgtctttttccagtctgctgttgactgggttagctcagcccgaaaggcagggctatgttccccaggccaggggcattgtcctggacagtcaggaggcatacccctcgccaggtggaaccaccctgtgtatgcatgaccctgacaagcaggcgccaggacagtcaggaggccagctgtggagggtgcccctgtgcccacctggccagcaccacctgcccagctcagagaaggggctgtggctgccgcctgccacgcccgagtgccaggcatggacggggacgctgctgctgggcacatgccttctgtactgcgcccgctccagcatgcccatctgcaccgtctccatgagccaggacttcggctggaacaagaaggaggccggcatcgtgctcagcagcttcttctggggctactgcctgacacaggttgtgggcggccacctcggggatcggattgggggtgagaaggtcatcctgctgtcagcctctgcctggggctccatcacggccgtcaccccactgctcgcccacctgagcagtgcccacctggccttcatgaccttctcacgcatcctcatgggcttgctccaaggggtttacttccctgccctgaccagcctgctgtcgcagaaggtgcgggagagtgagcgagccttcacctacagcatcgtgggcgccggctcccagtttgggacgctgctgaccggggcggtgggctccctgctcctggaatggtacggctggcagagcatcttctatttctccggcggcctcaccttgctttgggtgtggtacgtgtacaggtacctgctgagtgaaaaagatctcatcctggccttgggtgtcctggcccaaagccggccggtgtccaggcacaacagagtcccctggagacggctcttccggaagcctgctgtctgggcagccgtcgtctcccagctctctgcagcctgctccttcttcatcctcctctcctggctgcccaccttcttcgaggagaccttccccgacgccaagggctggatcttcaacgtggttccttggttggtggcgattccggccagtctattcagcgggtttctctctgatcatctcatcaatcagggttacagagccatcacggtgcggaagctcatgcagggcatgggccttggcctctccagcgtctttgctctgtgcctgggccacacctccagcttctgtgagtctgtggtctttgcatcagcctccatcggcctccagaccttcaaccacagtggcatttctgttaacatccaggacttggccccgtcctgcgccggctttctgtttggtgaggaccttgccttaccccagctttgcccctccctgggcctccgggtgggtgtggccaacacagccggggccttggcaggtgtcgtgggtgtgtgtctaggcggctacttgatggagaccacgggctcctggacttgcctgttcaaccttgtggccatcatcagcaacctggggctgtgcaccttcctggtgtttggacaggctcagagggtggacctgagctctacccatgaggacctctagctcccaaccccacagcctctccaaggacccaggcgccagcagccccgggacacaggggactcagtgtgtgggacttggtcactccatgtcatacacacgagcagagaggaacacaaaccactgtggagcctgaagctccttaagaagagtccacaacagctggtgggagggtgcgttatactccctactccactcaggtggactcgagacttttgggccg

SEQ ID NO: 22186 - DNA, 1527 bp, Homo sapiens
  SIMILAR (152)..(196): 931254mologous to Homo sapiens bA305P22.2.1 (novel protein, isoform 1),accession number AL121673,Smith-Waterman Score=68.
atgagattccaggaccggacctggcaagtgccctatcccagccagtgttcctggggctcttccaggcagggctatgttccccaggccaggggcattgtcctggacagtcaggaggcatacccctcgccaggtggaaccaccctgtgtatgcatgaccctgacaagcaggcgccaggacagtcaggaggccagcccctggcaaccaccaatcgacttgttgtctccgtggctttgcagtttctgacatttcatgaaagtggaatcacaagtgccctccgtgtccggcctcttccacagagcgttgagttttcaagggcccgggtgcacagaggcttgaaggcgagcgtccatctgtcgccgccgtgtgtcctgacactcaacaaagctggatcttggagcggtggctgctcagcagcaggcctgggtggctgggcgcacgctcaccacaaaggaggtgccatcaatattcatgagctgggcctgcgtggctgggtttacagagaggacgaggcagccacaggccagacacctctccgtggcactggttctgggccttggctggcagggaggaacaagttctgcctccagagtccctgctgccgcaaggactccggggacacatttagctccagggcctggcgcctgaaccagggtccagtctggacctgggagctggctgacatgggcaggctaggggacaccacaggtcatctcttcacaggagctggcgctgtgggagcccctgagaccacagctgtgcccactgtgagcatcgccccaagacgcagtgtagagatgtggcccgagaccaaagagcatctcgtggctgtggctcggagaaaatgggtgtcagcccaggagaaacgcctgagccttcgtggctgtggctcggagaaaatgggtgtcagcccaggagaaacccgggtttacttccctgccctgaccagcctgctgtcgcagaaggtgcgggagagtgagcgagccttcacctacagcatcgtgggcgccggctcccagtttggggtgggcctatcagctggctggagggcggcttgtcctcagggtgggcctatcagctggctggagggcggcttgtcctcagggtgggcctatcagctggctggagggcggcttgtcctcaggggtgggcctatcagctggctggagggcggcttgtcctcagggtgggcctatcagctggctggagggcggcttgtcctcatccacgatgcggcaaccccgtgcccctcagtcctccctccctgcgcccgctccttggggagctccagaccctctagcgatgctggcggcctggatcgaggccaggccaggggtgtggccaacacagccggggccttggcaggtgtcgtgggtgtgtgtctaggcggctacttgatggagaccacgggctcctggacttgcctgttcaaccttgtggccatcatcagcaacctggggctgtgcaccttcctggtgtttggacaggctcagagggtggacctgagctctacccatgaggacctctag

SEQ ID NO: 22187 - DNA, 438 bp, Homo sapiens
  SIMILAR (354)..(428): 641254mologous to Homo sapiens NAP,accession number M86667,Smith-Waterman Score=95.
tcttttttagcgccatctgctcgcggcgccgcctcctgctcctcccgctgctgctgccgctgccgccctgagtcactgcctgcgcagctccggccgcctggctccccatactagtcgccgcctgcctagggtagttaaaagacgagtgaatgctctcaaaaacctgcaagttaaatgtgcacagatagaagccaaattctatgaggaagttcatgatcttgaaaggaagtatgctgttctctatcagcctctatttgataagcgatttgaaattattaatgcaatttatgaacctacggaagaagaatgtgaatggaaaccagatgaagaagatgagatttcggaggaattgaaagaaaaggccaagattgtagatgaaaaaaagggatgaggaaaaagaggaccccaaaggaattcctgaattttggtaactgtttt

SEQ ID NO: 22188 - DNA, 467 bp, Homo sapiens; identical to SEQ ID NO: 16735
  SIMILAR (284)..(466): 981254mologous to Homo sapiens NAP,accession number M86667,Smith-Waterman Score=318.
  misc_feature (1)...(467): n = a,t,c or g

SEQ ID NO: 22189 - DNA, 440 bp, Homo sapiens
  SIMILAR (8)..(175): 961254mologous to Mus musculus nucleosome assembly protein- 1,accession number D12618,Smith-Waterman Score=295.
gcacgagccaagatcagtgttatattttactggagaagctattgaagatgatgatgatgattatgatgaatatggtgaagaagcggatgaggaacgggaagaagaaggagatgaggaaaatgatccagactatgacccaaagaaggatcaaaacccagcagagtgcaagcagcagtgaagcaggatgtatgtggccttgaggataacctgcactgtaatagcctaaacacgactcttatttacttacagccttatgtctttgtattttcttgggagactacgtaatttttttttaaaggacaggaaactgatattttaaagaccaatttgttctacctaggcatttttaactagtttttctgccagctatgttgactgcgcgaattctgacacgcatgttcattcattgctacataagttgggtcttctggaatatgttt

SEQ ID NO: 22190 - DNA, 649 bp, Homo sapiens
  SIMILAR (12)..(377): 521254mologous to Homo sapiens NAP,accession number M86667,Smith-Waterman Score=272.
  misc_feature (1)...(649): n = a,t,c or g
gattccggnccccttttctttggatggaccngaaattatgggttgtaccagggtgcccagataggattggaaaaaaggaaagaatgtcactttgaaatctattaagaagaagcagaaacacaagggacgtgggacagttcgtaccgggactaaaaccagtttccaatgactccttctttaacttttttgccccctcctgaagttcctgagagtggagatctgggatgatgatgctgaagcctatccttgctgcagacttcgaaattggtcactttttacgtgagcgtataatcccaagatcagtgttatattttactggagaagctattgaagatgatgatgatgattatgatgaaaaaagcgaagaagcggatgaggtaatgtttaccatatgagcaaaaaattctctgtggttaacacattgagaagcaaattgaacgacttatgtattcctttgctataatcattctgtgatttgggataaaaacattttggagaacatgattttagaattctacagccaaacgatgtatgtataagggttcaataaataaattgcagaactcagcaacatttttttatttcaaataattttggtctgctgcagggttatcagctctttgaagaagtcaaaagctgcagtaaactt

SEQ ID NO: 22191 - DNA, 996 bp, Homo sapiens
  SIMILAR (344)..(261): 501254mologous to Chlorella vulgaris ORF41c,accession number AB001684,Smith-Waterman Score=66.
atgtccccctggcatttcaaataggcccaaaatttttagctttttacaaaatttagaaaccttttattagattttcctccatatgcccttacccccccctgaggtagttaggtaaacagtactacccattttaattacacagtaaacagaagcacggggaaggtgacatactcatactttaagcaataagaattagaagaaaccatagaagcttggggccttctctctagctctaacccaaagaaaatgaattttatttttttttttttaaaagaaaacagcatcaatcacttaagattttcttcctctttttttttttttttttacacttgcttattagtatagcatctcgttccaaagctggtaccttttcttcaacaatgtgttaaaaactgagtataacccttaattcaaggtaggcctctacttctacctgaattggtacaaaattaagacattatcttgtaagaactaaaattgtatttgaaatttttattttagctgcaaaaacaaaaacaaagccaacaaacaacaaataacttgaaaataggcttgtcaaatgatgtaaattcatcctttccagggaagcagaaggtagaccctaccacaaagaaaagatgcttagttaatggagggttaaatttaaaaatacagttaaaattcaggctaacttctgaaaatcccgttttattcacctcactgtggtaccagtaactatactgagtcaggttactttacagttaactatgtcacctaaaacacaataatccattaacactctaataacagttattgggtgtggtcatactggaaattcttaaccatatagttgtcttgccaattttttttttaaacaataaattgtcttagtataagtcactgcatttctgtaacaaagtaatgaaaggcacagctaatccaagcggacttaaccctattcaacaaccagctgaaaaaatactttggttcttcaagcgaaaaaattacaaaaaaaaa

SEQ ID NO: 22192 - DNA, 1738 bp, Homo sapiens
  SIMILAR (1323)..(1358): 911254mologous to Homo sapiens NAP,accession number M86667,Smith-Waterman Score=64.
actgtctagatcgcgagcgccatctgctcgcggcgccggcgtcctgttcctcccgctgctgctgccgctgccgccctgagtcactgcctgcgcagctccggccgcctggctccccatactagtcgccgatatttggagttcttacaacatggcagacattgacaacaaagaacagtctgaacttgatcaagatttggatgatgttgaagaagtagaagaagaggaaactggtgaagaaacaaaactcaaagcacggtcagcgtaactgttcagaatgatgccaaaatcctcagattcttgcaagcccttcaagaaagacttgatgggtctgggtagaaacaccaacaaggatacattgaaagcctgccttagggtagttaaaagacggagtgaatgctctcaaaaacctgcaagttaaatgtgcacagaaagaaacccaacttctatgagggaagttcacgatcttgaaaggaagtatgctgttctctatcagcctctatttgataagcgatttgaaattattaatgcaatttatgaacctacggaagaagaatgtgaatggaaaccagatgaagaagatgagatttcggaggaattgaaaggaaaagggccagattgaagatgagaaaaaggatgaagaaaaagaagaccccaaaggaattccctgaatttgggttaactgtttttaaagaatgttgacttgctcagtgatatggttcaggaacacgatgaacctattctgaagcacttgaaagatattaaagtgaagttctcagatgctggccagcctatgagttttgtcttagaatttcactttgaacccaatgaaatattttacaaatggaagtgctgacaaagacatacaggatgaggttagaaccagaaccagatgattctgatcacttttcctttgatggacaagaaattatgggttgtacagggtgccagatagattggaaaaaaggaaagaatgtcactttgaaaactattaggaagtaggccgaaaccacaagggacgtgggaccagttcgtactgggcactaaaaccagtttcccaatgactctttctctaactttttttgccccctcctgaagtctcctgagagtggagatttggatgaggatcgctgaagcaatccttgctgcagacttcgaaattggtcagctttttaccgtgagcgtataatcccaagatcagtgttatattttactggagaagctattgaagatgatgatgatgattatgatgaagaaggtgaagaagcggatgaggaaggggaagaagaaggagatgaggaaaatgatccagactattgacccaaagaaaggatcaaaacccagcagagtgcaagcagcagtgaagcaggatgtatgtggccttgaggataacctgcactggtctaccttctgcttccctggaaaggatgaatttacatcatttgacaagcctattttcaagttatttgttgtttgtttgcttgtttttgtttttgcagctaaaataaaaatttcaaatacaattttagttcttacaagataatgtcttaattttgtaccaattcaggtagaagtagaggcctaccttgaattaagggttatactcagtttttaacacattgttgaagaaaaggtaccagctttggaacgagatgctatactaataagcaagtgtaaaaaaaaaaaaaaaaagaggaagaaaatcttaagtgattgatgctgttttcttttaaaaaaaaaa

SEQ ID NO: 22193 - DNA, 849 bp, Homo sapiens
  SIMILAR (1)..(291): 751254mologous to Homo sapiens Human secreted protein encoded by gene 35 clone HFGAK75,accession number W74765,Smith-Waterman Score=385.
atggctgcggctgtggcggggctgctgcgagggggtctcctgccccaggcaggccggctgccagccctccagactgtccgctatggctccaaggctgttacccaccaccgtcgtgtgatgcactttcagcgacagaagctgatggctgtgactgaatatatccccccgacaccagccgagacgggcctcatcaggcttctctgccgggagagagcagcagttttccaggacaaccgaatgatagctatctgccagagcgtggctctgagcgtagcagacaagcttcttatgcgacaccagctgcggaaacacaagatcctgatgaaggtcttccacaaccaggtcctgaagcccttcctggaggactccaagtaccaaaatctgctgcccctttttgtggggcacaacatgctgctggtcagtgaagagcccaaggtcaaggagatgggggagcttgtgggaggcctcaccccactcatggcccagacccactccctgctccagcaccagcccctgaagttgaccaccctattggaccagtacatcagacagcaaagcgagaaggattctgtcgtgtcggccaatgggaagccagatcctcctgaccctgttccggactcgtacccagcctgtttagccagccctgcccataaatacactctgtcctattggctgtgctgtcctccatgggagatgtggaagaacttggggtgggggagtgcatttgtcactgggctttcactaacaatgatattgtcaggaaaatcctcttcccctgtatctgttcccacaaatggcatcccgcacatgcttgctctattaaaggcagctgacagctgtgcccactag

SEQ ID NO: 22194 - DNA, 586 bp, Homo sapiens
  SIMILAR (181)..(585): 991254mologous to Homo sapiens Human secreted protein encoded by gene 12 clone HFTCU19,accession number Y02661,Smith-Waterman Score=691.
ctcccggttcgagccacgcgtccgccccacaggaggagataggcctcatcaggcttctccgccgggagatagcagcagttttccaggacaaccgaatgatagccgtctgccagaatgtggctctgagtgcagaggacaagcttcttatgcgacaccagctgcggaaacacaagatcctgaatgaaggtcttccccaaccaggtcctgaagcccttcctggaggattccaagtaccaaaatctgctgcccctttttgtggggcacaacatgctgctggtcagtgaagagcccaaggtcaaggagatggtacggatcttaaggactgtgccattcctgccgctgctaggtggctgcattgatgacaccatcctcagcaggcagggctttatcaactactccaagctccccagcctgcccctggtgcagggggagcttgtaggaggcctcacctgcctcacagcccagacccactccctgctccagcaccagcccctccagctgaccaccctgttggaccagtacatcagagagcaacgcgagaaagattctgtcatgtcggccaatgggaagccagatcctgacactg

SEQ ID NO: 22195 - DNA, 476 bp, Homo sapiens
  SIMILAR (317)..(406): 331254mologous to Homo sapiens This gene is similar to tre oncogene(X63547),accession number D29956,Smith-Waterman Score=44.
ctgcgctgcaggaattcggcacgaggaaaaaactacttttaaggaaatatagcatctatcgtgaacgtggaaaagtaaagataattcaccatgcctgctgtggctttagttcctaaagaactctacctgagttcttcactaaaagacctcaataagaagacagaagttaaaccagagaaaataagcactaagaggattacgtccattcaatacttggaactgcaaacatcaaaaaagccattgaagaagctgaaagactctctgagagccttaaactaagatataaagaagctgaagtccggaaataacttgaggaaaaggacaggcagaaggaagcacagcaactacaacaaaaaaggcaggaaacaggaagagagggatggtggcacattggctaaagtttctttggagaatgtattggattaccaagacaaaacccaaaagagcaatggtgaaaagagtgaaaaaatgtgaga

SEQ ID NO: 22196 - DNA, 1449 bp, Homo sapiens
  SIMILAR (49)..(1437): 761254mologous to Homo sapiens This gene is similar to tre oncogene(X63547),accession number D29956,Smith-Waterman Score=1767.
atgatgagagctcacatgtttgtttacaaggaacttaaacaaatttacaagaaaaaaacccatccccatcaaaaagtgggcaaaggatataaacagacacttctcagaggaagacatttacgtggccaagaaacatatgaaaaaaagctcacacacgtatatgaaacaactgatttcaagcaacagcagtattacttccattcaatacttggacctgcaaacatcaaaaaagccactggagaaactgaacgactctctgaaagccttaaactaagatatgaagaagttgaaatctggaaaaaacttgaggaaaaggacaggcagggggaagcacagtggctacaacaaaaaaggcaggaaacaggaagagaggatggcagcatgttggctaaaggttctttggagattgtattggattccaaagacaaaacccaaaagagcaatggtgaaaagaatgaaaaatgtgagaccaaagagaaaggagcaatcacagcaaaggaactatacacaatgatgatggataaaaacatcagcttgattataatggatgctcaaagaatgcaggattatcaggattcctgtattttacattctctcagtgttcctgaaaaagccatcagtccaggagtcactgctagctggattgaagcacacctcccagatgattctatagatacatggaagaagagggggaatgtggagtatatggtacttcttgactggtttagttctgcaaaagatttacagattggaacaacactctggcatctgaaagatgcacttttcaagtgggaaaagggaggctataaaaactggttcctttgctattcccagtatacaacaaatgctaaggtcactccacccccacaacaccagaatgaagagttgtctatctcattggattttacttatccctcattggaagaatcaattccttctaaacctgctgccgagatgccacctccacctataaaagtggatgaagacatagaattgataagtgatcaaataagtgataatgatcaaaatgagaggacaggaccactgaatatatcaattccagttgaatcagttgctgcttctaaatctgatgtttcacccatcattcagccagtgcctagcataaagaatgttccacagattgatcatactaaaaaactggcagtcaaattgcctgaagagcatataatcaaatctgaaagtacaaatcatgagcaacagtctcctcagaatgaaaaagttattcctgattgttccaccaagccagtagtttcctctccaactctcatgttaacagatgaagaaaaggctcatattcatgcagaaactgctcttctaatggagaaaaacaaacaagaaaaagaacttcaggaaagacagcaagggaaacagaaagaaactgaggagggaagaacacgagcaaaaagccaaaaagaaacaagaagctga

SEQ ID NO: 22197 - DNA, 2984 bp, Homo sapiens
  SIMILAR (524)..(1627): 691254mologous to Homo sapiens This gene is similar to tre oncogene(X63547),accession number D29956,Smith-Waterman Score=1239.
cggcacgaggggtgtgagctgggctggcttccgtcctggtagccaaggctaattctccctcgagttcttgggagatgggcatttggcgagaaggctggcgttagtcaagcgcgcccggcgtcacggaaagaagcacttgtaaggaaatatagcatccattgtgaaagtggaaaagtaaagataattcatcatgcctgctgtggcttcagttcctaaagaactctacctcagttcttcactaaaagaccttaataagaagacagaagttaaaccagagaaaataagcactaagagttatgtgcacagtgccctgaagatctttaagacagcagaagaatgcagattagatcgtgatgaggaaagggcctatgtactatatatgaaatacgtgactgtttataatcttatcaaaaaaagacctgatttcaagcaacagcaggctgactgtgcttacttcttagggcagacagttcacatactgttccagcatagagcactactagagaagaaatatagagcagtaggagcaatcacagcaaaggaactatacacaatgatgacggataaaaacatcagcttgattataatggatgctcgaagaatgcaggattatcaggattcctgtattttacattctctcagtgttcctgaagaagccatcagtccaggagtcactgctagttggattgaagcacacctgccagatgattctaaagacacatggaagaagagggggaatgtggagtatgtggtacttcttgactggtttagttctgccaaagatttacagattggaacaactctccggagtctgaaagatgcacttttcaagtgggaaagtaaaactgtcctgcgcaatgagcctttggttttagagggaggctatgaaaactggctcctttgttatccccagtatacaacaaatgctaaggtcactccacccccacgacgccagaatgaagaggtgtctatctcattggattttacttatccctcattggaagaatcaattccttctaaacctgctgcccagacgccacctgcatctatagaagtagatgaaaatatagaattgataagtggtcaaaatgagagaatgggaccactgaatatatcaactccagttgaaccagttgctgcttctaaatctgatgtttcacccataattcagccagtgcctagtataaagaatgttccacagaagagatggagggacagatataggaggaaaattaacagcgtgcagaaggatatgggaagaacatatcatgggactcaggtttttgatttgtgcaactattgggagagtgagagtggttacatccatgagagtaaagaggaacagaaagagaaactgaggaaggaagaacaagaacaaaaagccaaaaagaaacaagaagctgaagaaaatgaaattacagagaagcaacaaaaagcaaaagaagaaatggagaagaaagaaagtgaacaggccaagaaagaagataaagaaacctcagcaaagaggggcaaagaaataacaggagtaaaaagacaaagtaaaagtgaacatgaaacttctgatgccaagaaatctgtagaagatagggggaaaaggtgtccaaccccagaaatacagaaaaagtcaacaggagatgtgccccatacatctgtgacaggggattcaggttcaggcaagccatttaagattaaaggacaaccagaaagtggaattctaaggacaggaacttttagagaggatacagacgataccgaaagaaataaagctcaacgagaacctttgacaagagcacgaagtgaagaaatggggaggatcgtaccaggactgccttcaggctgggccaagtttcttgacccaatcactggaacctttccgttattatcattcacccaccaacactgttcatatgtacccaccggaaatggctccttcatctgcacctccttccacccctccaactcataaagccaagccacagattcctgctgagcgggatagggaaccttccaaactgaagcgctcctactcctccccagatataacccaggctattcaagaggaagagaagaggaagccaacagtaactccaacagttaatcgggaaaacaagccaacatgttatcctaaagctgagatctcaagggcttttctgcttctcagatttccggaaccctcaatccctgtttttgggaggttcctggacccagctccttacctggaccctcccgaccctagggaaataccttggttatatgaaccctcaatattgcaagtcccccatgtaaccggcccccacattttggctgattatttccaacccgaaactgttatccaggatgatattaacaggtcaaatttgttggggcataaaggtgaagtggcagaagaatttggtataatcatgaaagccctgtggacaggacagtatagatatatcagcccaaaggactttaaaatcaccattgggaagatcaatgaccagtttgcaggatacagtcagcaagattcacaagaattgcttctgttcctaatggatggtctccatgaagatctaaataaagctgataatcggaagagatataaagaagaaaataatgatcatctcgatgactttaaagctgcagaacatgcctggcagaaacacaagcagctcaatgagtctattattgttgcactttttcagggtcaattcaaatctacagtacagtgcctcacatgtcacaaaaagtctaggacatttgaggccttcatgtatttgtctctaccactagcatccacaagtaaatgtacattacagaatcactacggtgggctggatggaggccactacacagcctattgtaaaaatgcagcaagacaacggtggtttaagtttgatgatcatgaagtttctgatatctccgtttcttctgtgaaatcttcagcagcttatatcctcttttatacttcattgggaccacgagtaactgatgtagccacataa

SEQ ID NO: 22198 - DNA, 4449 bp, Homo sapiens
  SIMILAR (319)..(1962): 581254mologous to Mus musculus putative deubiquitinating enzyme UBPY,accession number AF057146,Smith-Waterman Score=1482.
gtgagctgggctggcttccgtcctggtagccaaggctaattctccctcgagttcttgggagatgggcatttggcgagaaggctggcgttagtgaagcgcgcccggcgtcacggtgagtgcgggtcttgggccctagcacctgttctctgggaagtcgtccgctgtgaacgatgaacgcctttccttccaccagctgttggttaccccggagacaagcgtatgtccgcggagaggagtgggacaactcctaaaggaaagaagcacttgtaaggaaatatagcatccattgtgaaagtggaaaagtaaagataattcatcatgcctgctgtggcttcagttcctaaagaactctacctcagttcttcactaaaagaccttaataagaagaacagaagttaaaccagagaaaataagcactaagagttatgtgcacagtggcctcggaaaatctttaagacagcagaagaatgcagattagatcgtgatgaggaaagggcctatgtactatatatgaaatacgtgactgtttataatcttatcaaaaaaagacctgatttcaagcaacagcaggattatttccattcaatacttggacctggaaacatcaaaaaagctgtcgaagaagctgaaagactctctgaaagccttaaattaagatatgaagaagctgaagtccggaaaaaacttgaggaaaaagacaggcaggaggaagcacagcggctacaacaaaaaaggcaggaaacaggaagagaggatggtggcacattggctaaaggctctttggagaatgttttggattccaaagacaaaacccaaaagagcaatggtgaaaagaatgaaaaatgtgagaccaaagagaaaggagcaatcacagcaaaggaactatacacaatgatgacggataaaaacatcagcttgattataatggatgctcgaagaatgcaggattatcaggattcctgtattttacattctctcagtgttcctgaagaagccatcagtccaggagtcactgctagttggattgaagcacacctgccagatgattctaaagacacatggaagaagagggggaatgtggagtatgtggtacttcttgactggtttagttctgccaaagatttacagattggaacaactctccggagtctgaaagatgcacttttcaagtgggaaagtaaaactgtcctgcgcaatgagcctttggttttagagggaggctatgaaaactggctcctttgttatccccagtatacaacaaatgctaaggtcactccacccccacgacgccagaatgaagaggtgtctatctcattggattttacttatccctcattggaagaatcaatttccttctaaacctgctgcccagacgccacctgcatctatagaagtagatgaaaatatagaattgataagtggtccaaaatgagagaatgggaccactgaatatatcgaactccagttgaaccagttgctgcttctaaatctagatgtttcaccccataattcagccagtgcctagtataaagaatgttccccagattgatcggtactaaaaaaccagcagtcaaattgcctgaagagcatagaataaaatctgaaagtacaaaccatgagcgaacaatctcctcagagtggaaaagttattcctgatcgttccaccaagccagtagttttttctccaactctcatgttaacagatgaagaaaaggctcgtattcatgcagaaactgctcttctaatggaaaaaaacaaacaagaaaaagaacttcgggaaaggcagcaagaggaacagaaagagaaactgaggaaggaagaacaagaacaaaaagccaaaaagaaacaagaagctgaagaaaatgaaattacagagaagcaacaaaaagcaaaagaagaaatggagaagaaagaaagtgaacaggccaagaaagaagataaagaaacctcagcaaagaggggcaaagaaataacaggagtaaaaagacaaagtaaaagtgaacatgaaacttctgatgccaagaaatctgtagaagatagggggaaaaggtgtccaaccccagaaatacagaaaaagtcaacaggagatgtgccccatacatctgtgacaggggattcaggttcaggcaagccatttaagattaaaggacaaccagaaagtggaattctaaggacaggaacttttagagaggatacagacgataccgaaagaaataaagctcaacgagaacctttgacaagagcacgaagtgaagaaatggggaggatcgtaccaggactgccttcaggctgggccaagtttcttgacccaatcactggaacctttcgttattatcattcacccaccaacactgttcatatgtacccaccggaaatggctcctttcatctgcacctcctttccacccctccaaactcataaagccaagccacagattcctgctgagcgggatagggaaccttccaaactgaagcgctcctactcctccccagatataacccaggctattcaagaggaagagaagaggaagccaacagtaactccagcagttaatcgggaaaacaagccaacatgttatcctaaagctgagatctcaaggctttctgcttctcagattcggaacctcaatcctgtttttggaggttctggaccagctcttactggacttcgtaacttaggaaatacttgttatatgaactcaatattgcagtgcctatgtaacgctccacatttggctgattatttcaaccgaaactgttatcaggatgatattaacaggtcaaatttgttggggcataaaggtgaagtggcagaagaatttggtataatcatgaaagccctgtggacaggacagtatagatatatccagcccaaaggactttaaaatcacccattgggaagatcaatgacccagtttgcaggatacagtcagcaagattcacaagaattgcttctgttccctaatggatggtctccatgaagatctaaataaaagctgataatcggaagagatataaagaagaaaataatgatcatctcgatgactttaaagctgcagaacatgcctggcagaaaacacaagcagctcaatgagtctattatttgttgcactttttcagggtcaattcaaatctacagtacagtgcctcacatgtcacaaaaagtctaggacatttgaggccttcatgtatttgtctctaccactagcatccacaagtaaatgtacattacaggattgccttagattattttccaaagaagaaaaactcacagataacaacagattttactgcagtcattgcagagctcgacgggattctctaaaaaagataggaaatctgggaaggttaccacctgtggcttttaggtgcatctggaaacgtttttcctacgatgggcaggtgggaaacaaaaattacaggacatctgtgggacttcccgttaggaaattcttggactttgttcacagtatgttattgggtcccaaagaacaatttgaaggaaattataatttgttttcctgtttccaaatccactacgggtggggctgggatgggagggccactacacagcctattgtaaaaatgcagcaagacaacggtggtttaagtttgatgatcatgaagtttctgatatctccgtttctttctgtgaaatcttcagcagcttatatcctcttttatacttcatttggggccacgggtaactgatgtagccacataaggagacataggttataaactagttatcttttaaaaggctcagcaacacaactcttgaaatgcttatcaggataatggtagctatagctggccatttagaggaattctaggacagtgggagctgtgttactagcactatataattccggtcagtgctgacaaataacatttaacaagtattgcagtaatcatcacttacaggtaccatttatttccaaaacaactttttttagtctgctctcaagttacagaaattaactagctaagcattattattcggactggtctaaaaactattgttatctttttttttttccttttcactgttaatgcccttttcacatttctaaatccccatcttgatatacttatgaatactcttagaatgatgtaaagcagatagataggaatgtatgtgtaccataattttattgcatacttgcaccatcaaaatcggatggtaccatagtttaacacgtggtccttttgtgaaacctcagaactcagaggattgctttttttctttcagcctattttgagttaacttcagtgctttcttagggaaatgacaggggcaaagcaatttttctgttggctttgggctgtatttgtgcactaaatctttattctaaaaaaaaaaatggaaactttaatttttttaaaacgagaatttcatttacagctacattaaaatcttaatgagaaaaataatttataaaaaaaaaaa

SEQ ID NO: 22199 - DNA, 562 bp, Homo sapiens
  SIMILAR (491)..(393): 961254mologous to Homo sapiens Human thyroid protein zsig45,accession number Y06276,Smith-Waterman Score=164.
gtgcatcttcagtccggagtttattgagcgtgagaccaggcctgactcctgcaggggccaggtttttgcggggactccatgcctgtggaggcccgaccgagtgcagcctggcggggtgggcgggcaccaggctggacaccattcagtcctcctgatagggaaacgtggaaaccccaactgcttcccaaggggaaagtgggcaaagaaggttcgggccatgtcctcgatctgggggtaggcccccagggcctggaagtgctgcacatagttccagaagtcagaggtggagaaaggccagtagggcatggccggcagctccgcgtaagggtctccttcctcctgcacaggcttggcccccgacaccagctgcagggctctaaggtttcctagcagcctgcaagaggccccagtaggaggcagagggccagccccggcaccatgcaggcctgcatcttcccggtgcttcctgatctgcgactcaggcccaccttgtctctgctcagccagccgtgctgcctggatgggctctgctgccagctcaagagtcctctttatagaaggg

SEQ ID NO: 22200 - DNA, 493 bp, Homo sapiens
  SIMILAR (148)..(297): 641254mologous to Homo sapiens HES6,accession number AB035179,Smith-Waterman Score=142.
tgggcgccggcactccggtccccgccgctccccgtccccgctgctcctagcccctgccgcgtccccggcggacgggctatggcgccaccgggcgcctgtgccgggaccgtgtgggccgtgagatgaggacggctgggagactcgaggggaccgcaagtgcaggccaagctggagaacgccgaagtgctggagctgacggtgcggcgggtccagggtgtgctgcggggccgggcgcgcgaggcagcagctgcaggcggaacgatgcgagcgcttcgctgccggctacatccagtgcatgcacgaggtgcacacgttcgtgtccacgtgccaggccatcgacgctaccgtcgctgccgagctcctgaaccatctgctcgagtccatgccgctgcgtgagggcagcagcttccaggatctgctgggggacgcctggcgggccacctagagccctggacggatggctggctgcgggggcgctccggatcccaatacc

SEQ ID NO: 22201 - DNA, 366 bp, Homo sapiens
  SIMILAR (338)..(198): 361254mologous to Homo sapiens Homo sapiens adult retina clone BO365_2 encoded protein,accession number W58982,Smith- Waterman Score=60.
aagggtaactaactccaaaattctttatttagtaaaattgtcacatttgatgtcaatggaatacacaaactcaagtgtgctacaaacaagatgtacagagcatcacagctctgggcagtgcagctcagtgcacctgcctctcatctccccgctgaagtggcaagttcaagcttttgtttagcccagggctgcctggaacactagtgcccagcaccattcctgccacctctgcccccagagcccgcacagggctggtgaagcctgggtgggtgaacctgggagagcgctggcagctctacaaaattcttcctcctgactgggctggttaccaggggctgccctgcaagccatccatcagagctgcag

SEQ ID NO: 22202 - DNA, 1332 bp, Homo sapiens
  SIMILAR (187)..(1329): 921254mologous to Homo sapiens Human transcription regulator MOP8,accession number Y06296,Smith-Waterman Score=1828.
atgcaatccggggtcgtcgttcttcaccaagtgagtcttcccacccagagaacgtgtttaaaggtcgctgccggctacatccagtgccatgacgaggtgcacacgttcgtgtccacgtgccaggccatcgacgctaccgtcgctgccgagctcctgaaccatctgctcgagtccatgccgctgcctgcccctggactaagaaatacttccggaatagattcaccttggaaaaaaacaggaaagaacagaaaattgaagtccaagcgggtcaaacctcgagactcatctgagagcaccggatctggggggcccgtgtccgcccggcccccgctggtgggcttgaacgccacagcctggtcaccctcagacacgtcccagtccagctgcccagccgtgccctttcccgccccagtgccagcagcttattcactgcccgtgtttccagcgccagggactgtggcagcacccccggcacctctccacgccagcttcacagtgcctgctgtgcccgtggacctcagcaccagtttgcagtccagcccccacctttccctgccctatggcgcctgtcatggcattcatgctacccagttattccttccctcggggaccccaaacctgccccaggccttcttccccagccagcctcagtttccgagccaccccacactcacatccgagatggcctctgcctcacagcctgagttccccagccggacctcgatccccagacagccatgtgcttgtccagccacccgggccaccccaccatcggccatgggtagggcctccccaccgctctttcagtcccgcagcagctcgcccctgcagctcaacctgctgcagctggaggaagcccctgagggtggcactggagccatggggaccacaggggccacagagacagcagctgtaggggcggactgcaaacctggcacttctcgggaccagcagccgaaggcgcctctgacccgtgatgaaccctcagacacacagaacagtgacgccctttccacgtcaagcggcctcctaaacctcctgctgaatgaggacctctgctcagcctcgggctctgctgcttcggagtctctgggctccggctcactgggctgcgacgcctccccgagtggggcaggcagtagtgacacaagtcataccagcaaatattttggaagcattgactcctcagagaataatcacaaagcaaaaatgaacactggtatggaagaaagtgagcatttcattaagtgcgtcctgcaggatcccatctggctgctgatggcagatgcggacagcagcgtcatgatgacgtaccagctgccttcccggtaa

SEQ ID NO: 22203 - DNA, 1377 bp, Homo sapiens
  SIMILAR (103)..(762): 711254mologous to Homo sapiens HES6,accession number AB035179,Smith-Waterman Score=723.
gcggccgcggggtcagcggagggcgccggcactccggtccccgccgctccccgtccccgctgctcctatcccctgccgcgtccccggcggagcgggctatgggcgccacccgcggcgcctggcacgggaccgtgtgggccgtgaggatgaggacggctgggagacgcgaggggaccgcaaggcccggaagcccctggtggagaagaagcggcgcgcgcggattcaacgagagcctgcaggagctgcgggttgctgctgggcgggcgccgagggtgcaggccaagcttgaaaaacgccgaactgctggagctgacggtgcggcgggtccagtgtgtgctgcggggccgggcgcgcgagcgcgagcagctgcaggcggaagcgaggcgagcgcttcgctgccggctacatccagttgcatgcacgaaggtgcacacgttcgtgtccacgtgccaggccatcgacgctaccgtcgctgccgagctcctgaaccatctgctcgagtccatgccgctgcgtgagggcagcagcttccaggatctgctgggggacgccctggcggggccacctagagcccctggacggagtggctggcctgcggggggcgctccgggatccccaatacccagccccccgggtcctggggacgacctgtgctccgacctggaggaggcccctgaggctgaactgagtcaggctcctgctgaggggcccgacttggtgcccgcagccctgggcagcctgaccacagcccaaattgcccaggagtgtctggaggccttggtgaccaatgccagccagagtcctgcaggggtggggcccggccctccctgggatctcctcccctcctcccaggggttcagatgtggtgggggtagggccctggaagtctcccagggtcttccctccctcctctgatggatggcttgcaggggcagcccctggtaaccagcccagctcagcgccccagccccgtttcttaaaaaaacttttagggaccctgcagctctggaagtgggtggagggagggagctacgggcaggaggaagaattttgtagagctgccagcgctctcccaggtttcacccagcccagccttcaacccacgcctgtgcgggctctgggggcagaggtggcagaaactggtgctgggcactagtgttccaggcagccctgggctaaacaaaagcttgaacttgccacttcagcggggagatgagaggcaggtgcactgagctgcactgcccagagctgtgatgctctgtacatcttgtttgtagcacagcttgagtttgtgtattccattgacatcaaatgtgacaattttactaaataaagaattttggagttagttacccttgaaaaaaaaaaaagtcgacg

SEQ ID NO: 22204 - DNA, 1527 bp, Homo sapiens
  SIMILAR (721)..(1515): 991254mologous to Homo sapiens IgG Fc binding protein,accession number D84239,Smith-Waterman Score=1497.
atggtaccagctcctcctttacccctgggagaattcggccgtgaacccaccggtcccggatctttttggttggtaagcattgattatggcccaatttcagagcccgtaatgggccaatcagagatccacttcttccggtttagcctgggaggtccaatgaaaattagcgatggaaactggttgattcaacctggcctcaatttgattcacccgcttcaggtgttcgaggttgaacagcaggataatgaaatggtggtctatgctgccccccgtgatgtgcgtgaacgtacctggcagcttgatacgcctttatttacgttgcgctttttctccccacaggaaggtattgtcggtgtgcggattgagcattttcagggggcgctgaataacggtcctcattatccgctcaatattttgcaggacgtgaaggtcacaatcgaaaacacagaacgttatgctgagtttaaaagtggcaacttaagcgcgcgtgtcagcaaaggtgagttctggtcactggattttctgcgcaacggcgaacgtattaccggtagtcaggtgaaaaataatggctacgtgcaggacacgaataatcaacgcaattatatgtttgagcggcttgatcttggcgttggcgaaacagtttacggtctgggagagcgctttactgccctggtgcgcaatggccagacggtagagacctggaaccgggacgcggcacaagtgaacggtgtggacatgaagctgcccgtggtgctggccaacggccagatccgtgcctcccagcatggttcagatgttgtgattgagaccgacttcggcctgcgtgtggcctacgaccttgtgtactatgtgcgggtcaccgtccctggaaactactaccagctgatgtgtggcctgtgtgggaactacaatggcgaccccaaggatgacttccagaagcccaatggctcgcaggcaggcaacgccaatgagttcggcaactcctgggaggaggtggtgtccgactctccctgcctgccgccgcccacctgcccgccggggagcgagggctgtatccccagcgaggagtgtcctcccgagctggagaagaagtatcagaaggaggagttctgtgggctcctctccagccccacagggccactgtcctcctgccacaagctggtggatccccagggtcccttgaaagattgcatctttgatctctgcctgggtggtgggaacctgagcattctctgcagcaacatccatgcctacgtgagtgcttgccaggtggctggaggccacgtggagccctggaggaatgaaactttctgtcccatggaatgccctcagaacagtcactacgagctctgtgcggacacctgctccctgggctgctcggctctcagtgcccctctgcagtgcccagatgggtgtgctgagggctgccagtgtgactccggcttcctctacaacggccaagcctgcgtgcccatccagcaatgtggctgctaccacaatggtgcctactatgaggtaggaacctag

SEQ ID NO: 22205 - DNA, 8875 bp, Homo sapiens
  SIMILAR (202)..(4173): 991254mologous to Homo sapiens IgG Fc binding protein,accession number D84239,Smith-Waterman Score=7066.
atgaggatggcagcctcctccaggaagttggcatcatctgcctggcacgtggcccagggtgtggcccagaaactccactatatagccctgccacagggctggccctgcagctccagggacctgcagccatgggtgccctatggagctggtggatactctgggctggagcaaccctcctgtgggagcaaaagtggggaggattggataagtggacccacaactgtattttctcaaccaggattgacccaggaggcttcagtggacctcaagaacactggcagagaggaattcctcacagccttcctgcagaactatcagctggcctacagcaaggcctacccccgcctccttatctccagtctgtcagagagccccgcttcagtctccatcctcagccaggcagacaacacctcaaagaaggtcacagtgaggcccggggagtcggtcatggtcaacatcagtgccaaggctgagatgataggcagcaagatcttccagcatgcggtggtgatccattctgactatgccatctctgtgcaggcactaaatgccaagcctgacacagcggagctgacactgctgcggcccatccaggccctaggcaccgagtattttgtgctcacaccccccggcacctcagccaggaatgtcaaggagtttgccgtggtggccggtgccgcaggtgcctcggtcagtgtcacgctgaaggggtcagtgacattcaatggcaagttctatccagcaggcgatgtcctaagagtgactctacagccctacaatgtggcccagctacagagctcagtggatctctcggggtcaaaggtcacagctagtagccccgtggctgtcctctctggccacagctgtgcgcagaaacatacgacctgcaaccatgtggttgagcagctgctacccacgtctgcctggggcacccactatgtagtacccacgctggcctcccaatctcgctatgatttggccttcgttgtggccagccaggccacaaagctgacctacaaccatgggggtatcactggctcccgtgggctccaggcaggtgatgtggtagagtttgaggtccggccatcctggccactctacctgtctgcaaatgtgggcatccaggtcctgttgtttggcacaggtgccataaggaatgaagtgacttatgacccctacctggtcctgatcccagatgtggcggcctactgcccagcctatgtggtcaagagtgtaccaggctgtgagggcgtggccctggtagtggcacagacgaaggctatcagcgggctgaccatagatgggcatgcagtgggggccaagctcacctgggaggctgtgccaggcagtgagttctcgtatgctgaagtggagctcggcacagctgacatgatccacacggccgaggccaccaccaacttgggactgctcaccttcgggctggccaaggctataggctacgcaacagctgctgattgcggccggactgtactgtccccagtggagccctcctgcgaaggcatgcagtgcgcagccgggcagcgctgccaggtggtaggcgggaaggccgggtgtgtggcggagtccaccgctgtctgccgcgcccagggcgacccccattacaccaccttcgacggccgtcgctacgacatgatgggcacctgttcgtacacgatggtggagctgtgcagcgaggacgacaccctgcccgccttcagcgtggaggccaagaacgagcaccggggcagccgccgcgtctcctacgtgggcctcgtcactgtgcgcgcctacagccactctgtgtcgctgacccgcggtgaagttggcttcgtcctggttgacaaccagcgctcgcgcctgccagtctccctgagtgagggtcgcctgcgtgtgtaccagagcggaccacgggccgtggtggagctggtctttgggctggtggtcacttatgactgggactgccagctggcactcagcctgcctgcacgcttccaagaccaggtgtgcgggctgtgtggcaactataatggtgacccagcagacgacttcctcacgcctgacggggctctggctcctgacgctgtggagttcgcaagtagctggaagctggatgatggggactacctgtgtgaggatggctgccagaacaactgtcccgcctgcaccccaggccaggcccaacactatgagggcgaccgactctgtggcatgctgaccaagctcgatggccccttcgctgtctgccatgacaccctggaccccaggcccttcctggagcagtgtgtatatgacctgtgtgtggtcggtggggagcggctcagcctgtgccgtggcctcagcgcctatgcccaggcctgtctggagcttggcatctcggttggggactggagatcaccagccaactgccccctgtcctgccctgccaacagccgctatgagctctgcggccctgcttgcccgacctcctgcaacggggctgcggcgccgtccaactgctccgggcgcccctgcgtggagggctgcgtgtgcctcccaggcttcgtggccagcggcggcgcctgcgtgccggcctcgtcgtgtggctgcaccttccagggtctccagctcgctccgggccaggaagtgtgggcggacgagttgtgccaaaggcgctgcacctgcaacggcgccacccatcaggtcacctgccgcgacaagcagagctgcccggcgggtgagcgctgcagcgtccagaacggcctcctgggctgctaccccgatcgcttcgggacctgccaggggtccggggacccacactatgtgagcttcgacggccggcgcttcgacttcatgggcacctgcacgtacctgctggtcggctcatgcggccagaacgcagcgctgcctgccttccgggtgctggtggaaaacgagcatcggggcagccagactgtgagctacacgcgcgccgtgcgggtggaggcccgcggggtgaaggtggccgtgcgccgggagtaccccgggcaagtgctggtggatgacgtccttcagtatctgcccttccaagcagcagatgggcaggtgcaggtgttccgacagggcagggatgccgtcgtgcgcacggactttggcctgactgtcacttatgactggaatgcacgagtgactgccaaggtgcccagcagctatgctgaggccctgtgtggactctgtgggaacttcaacggggacccagctgatgacctggctctgcggggtgggggtcaagctgccaatgcactggcctttgggaacagctggcaagaagagacgaggcccggctgtggagcaactgaaccgggtgactgtcccaagctggactccctggtggcccagcagctgcagagcaagaatgagtgtggaatccttgccgaccccaaggggcccttccgggagtgccatagcaagctggacccccagggtgccgtgcgcgactgtgtctatgaccgctgcctgctgccaggccagtctgggccactgtgtgacgcactggccacctatgctgctgcatgccaggctgctggagccacagtgcacccctggaggagtgaagaactttgcccactgagctgcccaccccacagccactatgaggcgtgttcctacggctgcccgctgtcctgtggagacctcccagtgcccgggggctgtggctcagaatgccatgagggctgcgtgtgcgatgagggctttgcgctcagtggtgagtcctgcctgcccctggcctcctgtggctgcgtacaccagggcacctaccacccaccaggccagaccttctaccctggccccggatgtgattccctttgccactgccaggagggcggcctggtgtcctgtgagtcctccagctgcggaccgcacgaggcctgccagccatccggtggcagcttgggctgtgtggccgtgggctctagcacctgccaggcgtcaggagacccccactacaccaccttcgatggccgccgcttcgacttcatgggcacctgcgtgtatgtgctggctcagacctgcggcacccggcctggcctgcatcggtttgccgtcctgcaggagaacgtggcctggggtaatgggcgagtcagtgtgaccagggtgatcacggtccaggtggcaaacttcaccctgcggctggagcagagacagtggaaggtcacgcactttacaaatattaatttatctgatcctgacaacagttccgtggggcaaacaccttattcccgcctgatagatgaggaaacagaaacagggagaggtgactttgtgacccccaaggtcacaaagagggtgaacggtgtggacatgaagctgcccgtggtgctggccaacggccagatccgtgcctcccagcatggttcagatgttgtgattgagaccgacttcggcctgcgtgtggcctacgaccttgtgtactatgtgcgggtcaccgtccccggaaactactaccagcagatgtgtggcctgtgtgggaactacaacggcgaccccaaggatgacttccagaagcccaatggctcacaggcaggcaacgccaatgagttcggcaactcctgggaggaggtggtgcccgactctccctgcctgccgcccaccccttgcccgccggggagcgaggactgtatccccagccacaagtgtcctcccgagctggagaagaagtatcagaaggaggagttctgtgggctcctctccagccccacagggccactgtcctcctgccacaagctggtggatccccagggtcccttgaaagattgcatctttgatctctgcctgggtggtgggaacctgagcattctctgcagcaacatccatgcctacggctctgatcggcaccccctccttgcagccatggagtgccctccgaacagtcactacgagctctgtgcggacacctgctccctgggctgctcagctctcagtgcccctccacagtgccaggatgggtgtgctgagggctgccagtgtgactccggcttcctctacaatggccaagcctgcgtgcccatccagcaatgcggctgctaccacaatggtgtctactatgagccggagcagacagtcctcattgacaactgtcggcagcagtgcacgtgccatgcgggtaaaggcatggtgtgccaggaacacagctgcaagccggggcaggtgtgccagccctccggaggcatcctgagctgcgtcaccaaaggtgctgagctggggttgggcctggggctgatgcgactagggatggaggacaaggactctggggctgagggtggtgtaactggggtgtccatggcgggagacccgtgccacggcgtgacatgccggccacaggagacatgcaaggagcagggtggccagggcgtgtgcctgcccaactatgaggccacgtgctggctgtggggcgacccacactaccactccttcgatggccggaagtttgacttccagggcacctgtaactatgtgctggcaacaactggctgcccgggggtcagcacccagggcctgacacccttcaccgtcaccaccaagaaccagaaccggggcaaccctgctgtgtcctacgtgagagtcgtcaccgtggctgccctcggcaccaacatctccatccacaaggacgagatcggcaaagtccgggtgaacggtgtgctcacagccttgcctgtctctgtggccgacgggcggatttcagtgacccagggtgcatcgaaggcactgctggtggctgactttggactgcaagtcagctatgactggaactggcgggtagacgtgacgctgcccagcagctatcatggcgcagtgtgcgggctctgcggtaacatggaccgcaaccccaacaatgaccaggtcttccctaatggcacactggctccctccatacccatctggggcggcagctggcgagccccaggctgggacccactgtgttgggacgaatgtcgggggtcctgcccaacgtgccctgaggaccggttggagcagtacgagggccctggcttctgcggacccctggcccccggcacagggggccctttcaccacctgccatgctcatgtgccacctgagagcttcttcaagggctgtgttctggacgtctgcatgggtggtggggaccgtgacattctttgcaaggctctggcttcctatgtggccgcctgccaggctgctggggttgtcatcgaagactggcgggcacaggttggctgtgagatcacctgcccagaaaacagccactatgaggtctgtggctcaccctgcccggccagctgtccgtcccctgcaccccttacgacgccagccgtatgtgagggcccctgtgtggagggctgccagtgcgacgcgggtttcgtgttaagtgctgaccgctgtgttcccctcaacaacggctgcggctgctgggccaatggcacctaccacgaggcgggcagtgagttttgggctgatggcacctgctcccagtggtgtcgctgcgggcctgggggtggctcgctggtctgcacacctgccagctgtgggctgggtgaagtgtgtggcctcctgccatccggccagcacggctgccagcccgtcagcacagctgagtgccaggcgtggggtgacccccattacgtcactctggatgggcaccgattcaatttccaaggcacctgcgagtacctgctgagtgcaccctgccacggaccacccttgggggctgagaacttcactgtcactgtagccaatgagcaccggggcagccaggctgtcagctacacccgcagtgtcaccctgcaaatctacaaccacagcctgacactgagtgcccgctggccccggaagctacaggtggacggcgtgttcgtcactctgcccttccagctggactcgctcctgcacgcacacctgagcggcgccgacgtggtggtgaccacaacctcagggctctcgctggctttcgacggggacagcttcgtgcgcctgcgcgtgccggcggcgtacgcgggctctctctgtggcttatgcgggaactacaaccaggaccccgcagacgacctgaaggcggtgggcgggaagcccgccggatggcaggtgggcggcgcccagggctgcggggaatgtgtgtccaagccatgcccgtcgccgtgcaccccagagcagcaagagtccttcggcggcccggacgcctgcggcgtgatctccgccaccgacggcccgctggcgccctgccacggccttgtgccgcccgcgcagtacttccagggctgcttgctggacgcctgccaagttcagggccatcctggaggcctctgtcctgcagtggccacctacgtggcagcctgtcaggccgctggggcccagctccgcgagtggaggcggccggacttctgtcccttccagtgccctgcccacagccactacgagctctgcggtgactcctgtcctgggagctgcccgagcctgtcggcacccgagggctgtgagtcggcctgccgtgaaggctgtgtctgcgatgctggcttcgtgctcagtggtgacacgtgtgtacctgtgggccagtgtggctgcctccacgatgaccgctactacccactgggccagaccttctaccctggccctgggtgtgattccctttgccgctgccgggagggcggtgaggtgtcctgtgagccctccagctgcggcccgcatgagacctgccggccatccggtggcagcttgggctgcgtggccgtgggctctaccacctgccaggcgtcgggagatccccactacaccaccttcgatggccgccgcttcgacttcatgggcacctgcgtgtatgtgctggctcagacctgcggcacccggcctggcctacatcggtttgccgtcctgcaggagaacgtggcctggggtaatgggcgagtcagtgtgaccagggtgatcacggtccaggtggcaaacttcaccctgcggctggagcagagacagtggaaggtcacggtgaacggtgtggacatgaagctgcccgtggtgctggccaacggccagatccgtgcctcccagcatggttcagatgttgtgattgagaccgacttcggcctgcgtgtggcctacgaccttgtgtactatgtgcgggtcaccgtccctggaaactactaccagctgatgtgtggcctgtgtgggaactacaacggcgaccccaaggatgacttccagaagcccaatggctcgcaggcaggcaacgccaatgagttcggcaactcctgggaggaggtggtgcccgactctccctgcctgccgccgcccacctgcccgccggggagcgagggctgtatccccagcgaggagtgtcctcccgagctggagaagaagtatcagaaggaggagttctgtgggctcctctccagccccacagggccactgtcctcttgccacaagctggtggatccccagggtcccttgaaagattgcatctttgatctctgcctgggtggtgggaacctgagcattctctgcagcaacatccatgcctacggctctgatcggcaccccctccttgcagccatggaatgccctcagaacagtcactacgagctctgtgcggacacctgctccctgggctgctcggctctcagtgcccctctgcagtgcccagatgggtgtgctgagggctgccagtgtgactccggcttcctctacaacggccaagcctgcgtgcccatccagcaatgtggctgctaccacaatggtgcctactatgagccggagcagacagtcctcattgacaactgtcggcagcagtgcacgtgccatgtgggtaaagtcgtggtgtgccaggaacacagctgcaagccggggcaggtgtgccagccctccggaggcatcctgagctgcgtcaacaaag

SEQ ID NO: 22206 - DNA, 2373 bp, Homo sapiens
  SIMILAR (2)..(1813): 921254mologous to Homo sapiens IgG Fc binding protein,accession number D84239,Smith-Waterman Score=3080.
gatctccgccaccgacggcccgctggcaccctgccacggccttgtgccgcccgcgcagtacttccagggctgcttgctggacgcctgccaagttcagggccatcctggaggcctctgtcctgcagtggctacctacgtggcagcctgtcaggccgctggggcccagctcggcgagtggaggcggccggacttctgtcccttgcagtgccctgcccacagccactatgagctctgcggtgactcctgccctgtgagctgcccgagcctctcagcacccgagggctgtgagtcggcctgccgtgaaggctgtgtctgcgatgctggcttcgtactcagtggtgacacctgcgtacccgtgggccagtgtggctgcctccatgatggccgctactacccactgggcgaggtcttctacccgggccctgagtgtgagcggcgctgtgagtgtgggccaggtggccatgtcacctgccaggagggcgcagcctgtgggccccatgaggagtgccggttagaggatggtgtccaggcctgtcatgccacaggctgtggccgctgcctggccaacgggggcatccactacatcacccttgatggccgtgtctacgacctgcatggctcctgctcctatgtcttggcccaagtctgccacccaaagcctggggacgaggacttttccatcgtgcttgagaagaatgcagctggagatctccaacgcctcctggttactgtggctggccaggttgtgagcctagctcaggggcagcaggtcaccgtggacggcgaggctgtggccctgcctgtggctgtgggccgcgtgcgggtgaccgccgagggccgaaacatggttctgcagacgaccaaggggctgcggcttctctttgatggcgatgcccacctcctcatgtccatccccagccccttccgtggacggctctgtggcctctgtgggaacttcaatggcaactggagtgacgactttgtcctgcccaatggctcagcagcgtccagtgtggagaccttcggggctgcatggcgggcgcccggctcctccaagggctgtggcgagggctgcgggccccaaggctgcccagtgtgcttggcagaggagactgcaccctatgagagcaacgaggcctgcgggcagctccggaacccccagggccccttcgcgacctgccaggcggtgctgagtccctctgagtacttccgccaatgcgtatacgacctgtgcgcgcaaaagggtgacaaagccttcctgtgccgcagcctggcagcctacacggcggcctgtcaggcagctggcgtggccgtgaagccctggaggacagacagcttctgcccgctccattgccccgcccacagccactactccatctgcactcgcacctgccagggatcctgtgcggctctctccggcctcacgggctgcaccacccgctgttttgagggctgtgagtgcgacgaccgcttcctgctttcccagggtgtctgcatccctgtccaagattgtggctgcacccataatggccgatacttgccggtaaactcctccctgctgacctcagactgcagcgagcgctgttcctgttcctcaagctctggcctgacatgccagggcagctggctgcccaaccagggccgtgtatgtgaggtcaaggctgaagcccgggaactgctggggccacccgtggtcttctgtgtcctgtctgtggggtgccaaccttcaccacctttgatggggcccgtggtgccaccacctctcctggtgtctatgagctctcttcccgctgcccaggactacagaataccatcccctggtaccgtgtagttgccgaagtccagatctgccatggcaaaacggaggctgtgggccaggtccacatcttcttccaggatgggatggtgacgttgactccaaacaagggtgtgtgggtgaatggtctccgagtggatctcccagctgagaagttagcatctgtgtccgtgagtcgtacacctgatggctccctgctagtccgccagaaggcaggggtccaggtgtggcttggagccaatgggaaggtggctgtgattgtcagcaatgaccatgctgggaaactgtgtggggcctgtggaaactttgacggggaccagaccaatgattggcatgactcccaggagaagccagcgatggagaaatggagagcgcaggacttctccccatgttatggctgatcagtcatccaccaggaacgaagatttcctgaagaagacctggtccctctggaggttgcagtggctgaaggatgcatcatgtgctcctaccctgctctaccgcttttctgggtcacagaggccaaatgtgagagcattgaataaatatcttaagct

SEQ ID NO: 22207 - DNA, 7640 bp, Homo sapiens
  SIMILAR (3)..(3833): 991254mologous to Homo sapiens IgG Fc binding protein,accession number D84239,Smith-Waterman Score=7230.
agatcacctgcccagaaaacagccactatgaggtctgtggcccaccctgcccggccagctgtccgtcccctgcaccccttacgacgccagccgtatgtgagggcccctgtgtggagggctgccagtgcgacgcgggtttcgtgttaagtgctgaccgctgtgttcccctcaacaacggctgcggctgctgggccaatggcacctaccacgaggcgggcagtgagttttgggctgatggcacctgctcccagtggtgtcgctgcgggcctgggggtggctcgctggtctgcacacctgccagctgtgggctgggtgaagtgtgtggcctcctgccatccggccagcacggctgccagcccgtcagcacagctgagtgccaggcgtggggtgacccccattacgtcactctggatgggcaccgattcgatttccaaggcacctgcgagtacctgctgagtgcaccctgccacggaccacccttgggggctgagaacttcactgtcactgtagccaatgagcaccggggcagccaggctgtcagctacacccgcagtgtcaccctgcaaatctacaaccacagcctgacactgagtgcccgctggccccggaagctacaggtggacggcgtgttcgtcactctgcccttccagctggactcgctcctgcacgcacacctgagcggcgccgacgtggtggtgaccacaacctcagggctctcgctggctttcgatggggacagcttcgtgcgcctgcgcgtgccggcggcgtacgcgggctctctctgtggcttatgcgggaactacaaccaggaccccgcagacgacctgaaggcggtgggcgggaagcccgccggatggcaggtgggcggcgcccagggctgcggggaatgtgtgtccaagccatgcccgtcgccgtgcaccccagagcagcaagagtccttcggcggcccggacgcctgcggcgtgatctccgccaccgacggcccgctggcgccctgccacggccttgtgccgcccgcgcagtacttccagggctgcttgctggacgcctgccaagttcagggccatcctggaggcctctgtcctgcagtggccacctacgtggcagcctgtcaggccgctggggcccagctccgcgagtggaggcggccggacttctgtcccttccagtgccctgcccacagccactacgagctctgcggtgactcctgtcctgggagctgcccgagcctgtcggcacccgagggctgtgagtcggcctgccgtgaaggctgtgtctgcgatgctggcttcgtgctcagtggtgacacgtgtgtacctgtgggccagtgtggctgcctccacgatgaccgctactacccactgggccagaccttctaccctggccctgggtgtgattccctttgccgctgccgggagggcggtgaggtgtcctgtgagccctccagctgcggcccgcatgagacctgccggccatccggtggcagcttgggctgcgtggccgtgggctctaccacctgccaggcgtcgggagatccccactacaccaccttcgatggccaccgcttcgacttcatgggcacctgcgtgtatgtgctggctcagacctgcggcacccggcctggcctgcatcggtttgccgtcctgcaggagaacgtggcctggggtaatgggcgagtcagtgtgaccagggtgatcacggtccaggtggcaaacttcaccctgcggctggagcagagacagtggaaggtcacggtgaacggtgtggacatgaagctgcccgtggtgctggccaacggccagatccgtgcctcccagcatggttcagatgttgtgattgagaccgacttcggcctgcgtgtggcctacgaccttgtgtactatgtgcgggtcaccgtccctggaaactactaccagctgatgtgtggcctgtgtgggaactacaacggcgaccccaaggatgacttccagaagcccaatggctcgcaggcaggcaacgccaatgagttcggcaactcctgggaggaggtggtgcccgactctccctgcctgccgccgcccacctgcccgccggggagcgcgggctgtatccccagcgacaagtgtcctcccgagctggagaagaagtatcagaaggaggagttctgtgggctcctctccagccccacagggccactgtcctcctgccacaagctggtggatccccagggtcccttgaaagattgcatctttgatctctgcctgggtggtgggaacctgagcattctctgcagcaacatccatgcctacgtgagtgcttgccaggcggctggaggccacgtggagccctggaggaatgaaactttctgtcccatggaatgccctcagaacagtcactacgagctctgtgcggacacctgctccctgggctgctcggctctcagtgcccctctgcagtgcccagatgggtgtgctgagggctgccagtgtgactccggcttcctctacaacggccaagcctgcgtgcccatccagcaatgtggctgctaccacaatggtgtctactatgagccggagcagacagtcctcattgacaactgtcggcagcagtgcacgtgccatgtgggtaaagtcgtggtgtgccaggaacacagctgcaagccggggcaggtgtgccagccctccggaggcatcctgagctgcgtcaccaaagacccgtgccacggcgtgacatgccggccacaggagacatgcaaggagcagggtggccagggcgtgtgcctgcccaactatgaggccacgtgctggctgtggggcgacccacactaccactccttcgatggccggaagtttgacttccagggcacctgtaactatgtgctggcaacaactggctgcccgggggtcagcacccagggcctgacacccttcaccgtcaccaccaagaaccagaaccggggcaaccctgctgtgtcctacgtgagagtcgtcaccgtggctgccctcggcaccaacatctccatccacaaggacgagatcggcaaagtccgggtgaacggtgtgctcacagccttgcctgtctctgtggccgacgggcggatttcagtgacccagggtgcatcgaaggcactgctggtggctgactttggactgcaagtcagctatgactggaactggcgggtagacgtgacgctgcccagcagctatcatggcgcagtgtgcgggctctgcggtaacatggaccgcaaccccaacaatgaccaggtcttccctaatggcacactggctccctccatacccatctggggcggcagctggcgagccccaggctgggacccactgtgttgggacgaatgtcgggggtcctgcccaacgtgccctgaggaccggttggagcagtacgagggccctggcttctgcggacccctggcccccggcacagggggccctttcaccacctgccatgctcatgtgccacctgagagcttcttcaagggctgtgttctggacgtctgcatgggtggtggggaccgtgacattctttgcaaggctctggcttcctatgtggccgcctgccaggctgctggggttgtcatcgaagactggcgggcacaggttggctgtgagatcacctgcccagaaaacagccactatgaggtctgtggcccaccctgcccggccagctgtccgtcccctgcaccccttacgacgccagccgtatgtgagggcccctgtgtggagggctgccagtgcgacgcgggtttcgtgttaagtgctgaccgctgtgttcccctcaacaacggctgcggctgctgggccaatggcacctaccacgaggcgggcactgtgggctgggtgaagtgtgtgcctcctgccatccggccagcacgctgccagcccgtcagcacagctgagtgccaggcgtggggtgacccccattacgtcactctggatgggcaccgattcgatttccaaggcacctgcgagtacctgctgagtgcaccctgccacggaccacccttgggggctgagaacttcactgtcactgtagccaatgagcaccggggcagccaggctgtcagctacacccgcagtgtcaccctgcaaatctacaaccacagcctgacactgagtgcccgctggccccggaagctacaggtcgacggcgtgttcgtggctctgcctttccagctggactcgctcctgcacgcacacctgagcggcgccgacgtggtggtgaccacaacctcagggctctcgctggctttcgatggggacagcttcgtgcgcctgcgcgtgccggcggcgtacgcggcctctctctgtggcttatgcgggaactacaaccaggaccccgcagacgacctcaaggctgtgggcgggaagcccgctggatggcaggtgggcggggcccagggctgcggggaatgtgtgtccaagccatgcccgtcgccgtgcaccccagagcagcaggagtccttcggcggcccggacgcctgcggcgtgatctccgccaccgacggcccgctggcaccctgccacggccttgtgccgcccgcgcagtacttccagggctgcttgctggacgcctgccaagttcagggccatcctggaggcctctgtcctgcagtggctacctacgtggcagcctgtcaggccgctggggcccagctcggcgagtggaggcggccggacttctgtcccttgcagtgccctgcccacagccactatgagctctgcggtgactcctgccctgtgagctgcccgagcctctcagcacccgagggctgtgagtcggcctgccgtgaaggctgtgtctgcgatgctggcttcgtactcagtggtgacacctgcgtacccgtgggccagtgtggctgcctccatgatggccgctactacccactgggcgaggtcttctacccgggccctgagtgtgagcggcgctgtgagtgtgggccaggtggccatgtcacctgccaggagggcgcagcctgtgggccccatgaggagtgccggttagaggatggtgtccaggcctgtcatgccacaggctgtggccgctgcctggccaacgggggcatccactacatcacccttgatggccgtgtctacgacctgcatggctcctgctcctatgtcttggcccaagtctgccacccaaagcctggggacgaggacttttccatcgtgcttgagaagaatgcagctggagatctccaacgcctcctggttactgtggctggccaggttgtgagcctagctcaggggcagcaggtcaccgtggacggcgaggctgtggccctgcctgtggctgtgggccgcgtgcgggtgaccgccgagggccgaaacatggttctgcagacgaccaaggggctgcggcttctctttgatggcgatgcccacctcctcatgtccatccccagccccttccgtggacggctctgtggcctctgtgggaacttcaatggcaactggagtgacgactttgtcctgcccaatggctcagcagcgtccaggtgtggagaccttcggggctgcatggcgggcgcccggctcctccaagggctgtggcgagggctgcgggcccccaaggctgcccagtgtgcttggcagaggagactgcaccctatgagagcaacgaggccctgcgggcagctccgaaaccaccagggccccttcgcgacctgccaggcggtgctgagtccctctgagtacttccgccaatgcgtatacgacctgtgcgcgcaaaagggtgacaaagccttcctgtgccgcagcctgacagcctactcgccggcctgtcaggcagctggcgtgtccgtgaagccctggagcaaagacaaattctgcccgctccattgccccgcccacagccactactccatctgcactcgcacctgccagggatcctgtgcggctctctccggcctcacgggctgcaccacccgctgttttgagggctgtgagtgcgacgaccgcttcctgctttcccagggtgtctgcatccctgtccaagattgtggctgcacccataatggccgatacttgccgaacgccagagatgtgagagtcggctccccacccgtggtgtccctgatgggccgtaccctctctccccacaaccgggagagacaatccttatttacaaactgtgggcgcagtgccagtgccaagggggtaaagtcgtggagtgccatgaaaacaactgtcaaccggggcaggctataccttctggatcacaactactcactctgccactgtggtgtgaaagcagccgtagcctatgtaagtgaagacgacccgtgccacggcgtgacatgccggccacaggagacatgcaaggagcagggtggccagggcgtgtgcctgcccaactatgaggccacgtgctggctgtggggcgacccacactaccactccttcgatggccggaagtttgacttccagggcacctgtaactatgtgctggcaacaactggctgcccgggggtcagcacccagggcctgacacccttcaccgtcaccaccaagaaccagaaccggggcaaccctgctgtgtcctacgtgagagtcgtcaccgtggctgccctcggcaccaacatctccatccacaaggacgagatcggcaaagtccgggtgaacggtgtgctcacagccttgcctgtctccgtggccgacgggcggatttcagtggcccagggtgcatcgaaggcactgctggtggctgactttggactgcaagtcagctatgactggaactggcgggtagacgtgacgctccccagcagctatcatggcgcagtgtgcgggctctgcggtaacatggaccgcaaccccaacaatgaccaggtcttccctaatggcacactggctccctccatacccatctggggcggcagctggcgagccccaggctgggacccactgtgttgggacgaatgtcgggggtcctgcccaacgtgccctgaggaccggttggagcagtacgagggccctggcttctgcggacccctttcatctggcacagggggccccttcaccacctgccatgctcatgtgccacctgagagcttcttcaagggctgtgttctggacgtctgcatgggtggtggggaccgtgacattctttgcaaggctctggcttcctacgtggccgcctgccaggccgctggggttgtcatcgaagactggcgggcacaggttggctgtgagatcacctgcccagaaaacagccactatgaggtctgtggcccaccctgcccagccagctgtccgtcccctgcaccccttacgacgccagccgtatgtgagggcccctgtgtggagggctgccagtgcgacgcgggtttcgtgttaagtgctgaccgctgtgttcccctcaacaacggctgcggctgctgggccaatggcacctaccacgaggcgggcagtgagttttgggctgatggcacctgctcccagtggtgtcgctgcgggcctgggggtggctcgctggtctgcacacctgccagctgtgggctgggtgaagtgtgtggcctcctgccatccggccagcacggctgccagcccgtcagcacagctgagtgccaggcgtggggtgacccccattacgtcactctggatgggcaccgattcgatttccaagggacctgcaggcagtga

SEQ ID NO: 22208 - DNA, 523 bp, Homo sapiens
  SIMILAR (458)..(523): 771254mologous to Homo sapiens Rab GDP dissociation inhibitor beta,accession number AF144713,Smith-Waterman Score=88.
acattgctatatggtagtacaactgtggaaaccaaggagcctgagaaggaaatcagaccagctttggagctcttggaaccaattgaacacaagtgagctgagctcttttatatctgccgagatgcaaactgaggcctttgattgtggctccatggcgggacgaatgtgagggcaaggcaggtacctgctggctgctctgtgggattcatctgtacctctcagttgacctcaggcagagccatggtcaggtgtgggaccagctcacctgactgaattctctctccctccagatttgttagcatcagtgacctcctggcaccaaaagacttgggaacagaaagccaggtgagtatggaagtgtgaaaggatatgggcaggtttcactgggaagacatccctccatgagcttaagtcttcgtaatttttgtttttcagatctttatttcccgcacatattgatgccaccactcattttgagacaacgtgtgatgacattaaaaaccttctttagaggtgacagggt

SEQ ID NO: 22209 - DNA, 370 bp, Homo sapiens
  SIMILAR (5)..(181): 761254mologous to Homo sapiens Rab GDP dissociation inhibitor beta,accession number AF144713,Smith-Waterman Score=242.
cctttcttccagttacttagatcaaccgtgttatgaaaccattaatagaattaaactttacagtgaatctttggcaagatatggcaaaagcccatacctttatccactctatggccttggagaactgccccaaggatttgcaaggtaagagcctgtgtttaaaacctcagtgattcaaaacctcatcttcaacataatgtgtatatgagatatagtctaaataatgagatgagatcagtctatgagtaataagatgctttttatttttattgaaataaaattaacatataatgatatgcacggatcttcagttaaaaaaaatccagttttatacaactgtagctgatgtgctcttgtaagtgccaactcc

SEQ ID NO: 22210 - DNA, 504 bp, Homo sapiens
  SIMILAR (47)..(148): 1001254mologous to Homo sapiens Rab GDP dissociation inhibitor beta,accession number AF144713,Smith-Waterman Score=180.
attgaaacccttgatgacctgtatgacgccagcttggcacgagggaacttttgaaggcattgatcctaagaagaccacgatgcgagatgtgtataagaaatttgatttgggtcaagacgttatagattttactggtcatgctctcgcccagccccactgccgcggggctgggcgagagcatggcatgggcccctgcgggagggcacagcccctctcaaagctgtcaccagggccaaagtgctgggtggagcagatgcaccgatggacttggcacacccagctcagcctcaagcatcctcttgagaagcctgtgggaaggctcctgcgtttcgttaactgccatctggccgtctctcagtttttgaaatctctgaggagcctgaggatcaagtcagttggggaaccgaattggtccatgggaagcttgaggaattttggacaaattccggccctttgaaaggaccagtttatgttccattttttggtggattttcccaggatgcc

SEQ ID NO: 22211 - DNA, 2426 bp, Homo sapiens
  SIMILAR (217)..(1224): 531254mologous to Homo sapiens GDP dissociation inhibitor beta,accession number Y13286,Smith-Waterman Score=731.
  misc_feature (1)...(2426): n = a,t,c or g
tttcgtcttcccgtctgaggtggcggtcggtctcgccttgtcgccagcatccattttcctctctttctcttcccctttccttcgcgcccaagagcgcctcccttctcttttatggtgggcacggagcccctgcgccttttccttgctcgggtcctgcgtccgcgcctgccccgccatgaatgaggagtacgacgtgatcgtgcatgggcaccggccatgacggaatgtatcctgtcaggtataatgtcagtgaatggcaagaaagttcttcatatgggatcgaaacccttactacggaggagagagtgcatctataacagcattggaagatttatacaaaagatttaaaataccaggatcaccaccccgagtcaaatggggagaggaaagagactggaatgttgacttgaatccccaagttccttaaggctaatgggtcagctggttaagatgctgctttatacagaggtaactcgctatctggattttaaagtgactgaagggagctttgtctataagggtggaaaaatctacaaggttccttccactgaagcagaagccctggcatctagcctaatgggattgtttgaaaaaacgtcgcttcaaggaattcctagtgtatgttgccaacttcgattgaaaaagatccaagaactttttgaaggcattgatcctaagaagaccacaatgcgagatgtgtataagaaatttgatttgggtcaagacgttatagattttactggtcatgctcttgcacctttacagaactgatgattaccttagatcaaccgtgttatgaaaccattaatagaattaaactttacagtgaatctttggcaagatatggcaaaagcccatacctttatccactctatggccttggagaactgccccaaggatttgcaaggctaaggtgctatttatgggagggtacctatatgctgaataaacccattgaaggaaatcattgtacaggaatggggaaaggtaattgggtgtaaaatctgaagggaggaaattgctcgttgtatgcagctcatctgtgaccccagctacgtaaaagatcgggtagaaaaagtgggccaggtgatcacagttatttgcatccctcagccacccccatcaaagaacaccaatgatgccaactcctgcacagatcattattccacagaaccaaagtcaatcgaaagtcagatatctacgtctgcaatgatctcctttgcagcacaatgtagcagcacaagggaagtccattgctatagttagtacaactgtggaaaccaacggagcctgagaaggaaatcagaccagctttgggagctcttgggaaccaattggaacagaaattttggttagcatcagtgacctcctgggtacccaaagacttggggaacagaaagccagatctttatttccccgcacatatgatgccaccactcattttgagacaacgagtgatgaacattaaaaacatctataagaggattgacaggatcagagtttgactttgaggaaatgaagcgcaagaagaatggccatctatggggggaagactaacagcagtacatgttattatgtaattaggacacatttaaaatttgggcaaataatgcatataatggaaatccaatattgtaaggcctgcttttggtaatggaaaatgggaggagaatggaagagcgctgtgcccagttaaatactccccttcacctttctaattattaacttgttttcatggagtggctattcagcattggcagttaccacattctgttccaatttaacccaactgggccttttttttttttccaagtggaagttaaaccaaaccatttggggataccggacaccaggacaacttgaggacagtttttttttaatccttttaatccagtgtagcctatgtgctggctgctggcttcaagagctgggatcccatacaggttgtgtgtcatctggtccctcttgagggttcagggagattcctaaattgaaatattcccccgggtttgggggcagcatcccggaaagttttcccctatgacctttatattttgttattatgtccaaatgtttatggcagggccccnaattagcataagcccccaagttttggtttatgtggggcataaaattcctaacccaaaccccagacatagggagtctatttggagaaagcctgtatgtgggtgtttttaaccctataaaagttgaattgagagagaaggggagaggaagcgaacgataaagcgggtcaagtgtagtgcatcttttgtatctcaggcgtggcttcttcagtggaccaatgctgcaatgcagtattgacttgacaaagcctttacctttggttccaaaagggccccaaatgttttcggccccgcaaaataaagccgaaattctggaaactaaaaaaaaaaaaaaaaaaa

SEQ ID NO: 22212 - DNA, 499 bp, Homo sapiens
  SIMILAR (81)..(287): 611254mologous to Homo sapiens slow MyBP-C,accession number X73114,Smith-Waterman Score=198.
  misc_feature (1)...(499): n = a,t,c or g
ctctcgcctgcctgtggggtttctgtcaactagtcgtggagggaaggagactctttaaagaataacatcttattgtggccatgccagaacccactaagaaagaggaaaatgaagtgccagccccagccccacccccggaagaaccaagtaaagagaaggaggccggaactacaccagcaaaagatgaagaggaagtctccccgcctagcgccttgcctccaggtttgggtagtcgggccctggagagaaaagattcagactggacccttgtcgaaactcctcctggggaggaacaagccaagcagaatgccaactcccagctgtccatcttgttcattgaaaaacctcaaggaggagcagaaattgccaacattgcacagccaggtgggaacagcctagggagagcccccatcatgnccaacaaccaatttggnatggcttatcccttantatccctttcaacctcctttgntgctaaanaaatctgaattggtctcca

SEQ ID NO: 22213 - DNA, 347 bp, Homo sapiens
  SIMILAR (220)..(104): 351254mologous to Homo sapiens Human secreted protein encoded by gene 39,accession number Y76162,Smith-Waterman Score=60.
ctcgcctgcctgtggggtttctgtcaactagtcgtggagggaaggagactctttaaagaataacatcttattgtggccatgccagaacccactaagaaagagggtaagacttatctagaaatctttttgttgtactcctgaataaagtgtttattttggtatttatcttcaaacaaataacaaatatcttaactagatgagaaaataaaatcactatgatttaaggaaacgatcttttagattaaacagaccagaggaaaaatacagcgagagtatattgaattgaaaaatttctgataacgatagtttctaaagggatattgactaaaattatcaaatgataattc

SEQ ID NO: 22214 - DNA, 403 bp, Homo sapiens
  SIMILAR (47)..(172): 971254mologous to Homo sapiens slow MyBP-C,accession number X73114,Smith-Waterman Score=228.
ttttttcacattcgcagactctgtttattttcatcctattcaaaacagatacatctttgaacacaaaggatgccagagaatcctgtttatcaataactgtcagatgacagatgattcagagtattatgtgacagccggtgatgagaaatgttccactgagctcttcgtaagaggtaaaaatgaaatctcttattgtggtcaccaggagctgttggcttcttctcccagggataatgatcaaagtgaaagtaactgaggctcctctacactggcagctattatggatcctaatgagtcttctggtttgttgaagaagaattaatgctggaagtgttgtggcttgtgaactgttgtgaagcagtagaaagaggattattcaaaatctgatgagtagttgtgacct

SEQ ID NO: 22215 - DNA, 3851 bp, Homo sapiens
  SIMILAR (97)..(3528): 961254mologous to Homo sapiens C protein,accession number X66276,Smith-Waterman Score=5700.
gtgaattccgcaccatctctctcctgcctgtggggtttctgtcaactagtcgtggagggaaggagactctttaaagaataacatcttattgtggccatgccagaacccactaagaaagaggaaaatgaagtgccagccccagccccacccccggaagaaccaagtaaagagaaggaggccggaactacaccagcaaaagactggacccttgtcgaaactcctcctggggaggaacaagccaagcagaatgccaactcccagctgtccatcttgttcattgaaaaacctcaaggaggaacagtgaaagttggtgaagatatcaccttcatagccaaagtcaaggctgaagatctttctgagaaacccactatcaatggttcaaggaaatggatggacctggccagcaaagccgggaagcaccttcagctgaaggaaacctttgagaggcacagtcgggtgtacacatttgagatgcagatcatcaaggccaaagataactttgcaggaaattacagatgcgaggtcacctataaggataagtttgacagctgttcatttgatcttgaagtgcacgaatctactgggactactccaaacattgacatcagatctgctttcaagagaagtggagaaggtcaagaggatgcaggagaacttgactttagtggtctcctgaaacgtagggaggtgaagcagcaggaggaagaaccccaggtggacgtatgggagttgctgaagaacaccaaacccagtgagtacgagaagatcgccttccagtatgaatcaccgacctgcagcggcatgctgaagcgactcaagcgcagcatcagagaggagaagaagagcgccgcttttgcaaaaattcttgatcctgtatatcaggttgacaaaggaggcagagtgaggtttgttgtggagctggcagatccaaagttggaggtgaaatggaataaaaatggtcaagaacttcgacccagtaccaaatacatctttgaagacacaagatgccagagcatcctgaatatcgataactgtcagatgacagatgattcagagtattatgtgacagccggtgatgagaaatgttctactgagctcttagtaagagagcctccaattatggtgaccaaacagctggaagatacaactgattattgtggggagagagtggaattagaatgtgaggtgtctgaagatgatgcccaagtaaaatggtttaagaatggtgaagagattatcctggtccaaacaagataccgaattagagttgagggtaaaaaacacatcttgatcatagagggagcaacaaaggctgatgctgcagattattcagtaatgacaacaggaggacaatcatctgctaaacttagtgttgacttgaaacctctgaagattttgacacctctgactgatcagactgtaaatcttggaaaagaaatctgcctgaagtgtgaaatctctgaaaacataccaggaaaatggactaaaaatggcctacctgttcaggagagtgaccgtctaaaggtggttcacaagggaaggatccacaagttagtgatagatcatgccctcactgaagatgaaggtgattatgtatttgcacctgatgcctacaatgttactctgcctgccaaagttcatgttattgatcctcctaagatcatcctggatggtcttgatgctgacaacacagtgacagtgattgcaggaaacaagcttcgtcttgagatccccatcagcggagaaccacctcctaaagccatgtggagccggggagataaggctattatggaaggcagtggccggataagaacagaatcttaccctgatagcagcactctggtcattgatatagctgaaagagatgactctggtgtttaccacatcaatctgaaaaacgaagctggagaggcacatgcaagcatcaaggttaaagttgtggacttccctgatcctccagtggcaccgactgtgacagaggtgggagatgactggtgtatcatgaactgggagcctcctgcctacgacggaggctctccaatcctaggatattttattgagaggaagaagaaacaaagctccaggtggatgaggctgaattttgatctctgcaaagaaacaacttttgagcccaagaagatgattgaaggtgtggcctatgaggtccgcatctttgcagtcaatgccattggcatctccaagcccagtatgccctccaggccttttgttcctttggccgtaacaagccctcctactcttctgactgtggactctgtcactgacacgactgtcacgatgaggtggcgccccccagaccacattggtgcagcaggtttagatggctatgtgctagagtattgctttgaaggaagtacatcagcaaaacagtctgatgaaaatggggaggctgcctatgatctgccagctgaggactggatagttgcaaacaaagatctgattgacaagacgaagttcaccatcacaggtctgccaacagatgcaaagatctttgtgcgtgtgaaggctgttaatgcagctggtgccagcgagcccaagtactattctcagcccattctcgtgaaggaaatcataggaacctccaaagattcgcatcccaagacacctgaaggcaaacctattatccgcagagttgggagaagctgttcaatctgggttattacctttccaggggaaaaccaaggaccaggattttaacttgggaaggaagggtgggttgcaggaatttgataaggattcaaataaacattcggcaactctgagactgatacaatcatatttattagaaaagcagagaggagccactctgggaaatatgatctgcaagtcaaagtggacaaattcgtggagaccgcatcaattgacatcagaatcattgaccgtccaggtccaccccaaattgtgaagattgaggatgtctgggggagaaatgtcgctctcacatggactccaccaaaggatgatggaaatgctgctatcacaggctataccattcagaaggctgacaagaagagcatggaatggttacgtgtcattgagcatatcatcgaaccagtgccacatactgaattggtcatagggaatgaatattacttccgggtcttttctgaaaacatgtgtggcctcagtgaggatgccaccatgactaaagagagtgcagtgatcgccagggatggtaaaatctacaaaaatccagtgtatgaagactttgatttctcagaggcacccatgtttactcagcctttggttaaccgcctatgccatagcggttacatggccaccctaaactgcagtgtgagaggaaatcctaagcctaaaataacctggatgaaaaacaaagttgctattgtggatgatccaagatacaggatgttcagcaacctgggagtctgtaccctggaaattggcaagcccagcccttatgatggaggcacttactgctgcaaagcagtcaatgaccttgggacagtggagattgaatgcaaactggaggtgaaagtcattgcacaataaggatttttggaatgtataatatcatctaaggtgggctctccttctgcagactcctcttgcaaggcgtacctccaaacataattgattgctatctgcgagacttacactcaagcaatcctgaggaatactgagggagggcctggctactgtctctctgcactctgctgctttgaaatctggttgaaatgagaaaaagcattttctgttttcccaccaggcccccaagtgtggtctttttctttcctcctaatgttgaagagaaaaaaaaaaaaaaaaaagtttgcccagattgcttaattaaaaattgcaaacaaaatctc

SEQ ID NO: 22216 - DNA, 619 bp, Homo sapiens
  SIMILAR (72)..(266): 1001254mologous to Homo sapiens slow MyBP-C,accession number X73114,Smith-Waterman Score=360.
cacactgcagtttagggtggcattgtaaccagctatggcataggtgttaaccaaaggctgagtaaacatgggtgagaggaaatcctaagcctaaaataacctggatgaaaaacaaagttgctattgtggatgatccaagatacaggatgttcagcaaccagggagtctgtaccctggaaattcgcaagcccagcccctatgatggaggcacttactgctgcaaagcagtcaatgaccttgggacagtggagattgaatgcaaacttggaggtgaaagtgatatatcaaggagtaaatacccctggacaaccagtcttcctggaggggcagcaacagtcattgcacaataaggatttttgaatgtataatatcatctaaggtgggctctccttctgcagactcctcttgcaaggcgtacctccaaacataattgattcgtatctgcgagacttacactcaagcaatcctgaggaatactgagggagggcctggctactgtctctgctgcactctggctgcttgaaatctggttgaaatgagaaaaagcattttctgttttcccaccagggcccccaagtgtggtctttttctttcctcctaatgttgaagagaaaaaaaa

SEQ ID NO: 22217 - DNA, 3879 bp, Homo sapiens
  SIMILAR (2012)..(2536): 671254mologous to Homo sapiens slow MyBP-C,accession number X73114,Smith-Waterman Score=541.
  misc_feature (1)...(3879): n = a,t,c or g
cctctcgcctgcctgtggggtttctgtcaactagtcgtggagggaaggagactctttaaagaataacatcttattgtggccatgccagaacccactaagaaagaggaaaatgaagtgccagccccagccccacccccggaagaaccaagtaaagagaaggaggccggaactacaccagcaaaagactggacccttgtcgaaactcctcctggggaggaacaagccaagcagaatgccaactcccagctgtccatcttgttcattgaaaaacctcaaggaggaacagtgaaagttggtgaagatatcaccttcatagccaaagtcaaggctgaagatcttctgagaaaacccactatcaaatggttcaaaggaaaatggatggacctggccagcaaagccgggaagcaccttcagctgaaggaaacctttgagaggcacagtcgggtgtacacatttgagatgcagatcatcaaggccaaagataactttgcaggaaattacagatgcgaggtcacctataaggataagtttgacagctgttcatttgatcttgaagtgcacgaatctactgggactactccaaacattgacatcagatctgctttcaagagaagtggagaaggtcaagaggatgcaggagaacttgactttagtggtctcctgaaacgtagggaggtgaagcagcaggaggaagaaccccaggtggacgtatggggagttgctgaagaacgcgaaacccagtgagtacgagaagatcgccttccagtatggaatcaccgatctgcgcggcatgctcaagcgactcaagcgcatgcgcagagaggagaagaagagcgcagcttttgcaaaaattcttgatcctgcatatcaggttgacaaaggaggcagagtgaggtttgttgtggagctggcagatccaaagttggaggtgaaatggtataaaaatggtcaagaaattcgacccagtaccaaatacatctttgaacacaaaggatgccagagaatccctgtttatcaataactgtcagatgacagatgattcagagtattatgtgacagccggtgatgagaaatgttccactgagctcttcgtaagagagcctccaattatggtgaccaaacagctggaagatacaactgcttattgtggggagagagtggaattagaatgtgaggtgtctgaagatgatgccaatgtaaaatggtttaagaatggtgaagaagattatccccggtccaaaatcaagatacccgaattagagttgagggtaaaaaaacacatcttgatcatagagggagcaacaaaggctgatgctgcagaatattcagtaatgacaacaggaggacaatcatctgctaaacttagtgttgacttgaaacctctgaagattttgacacctctgacctgatcagactgtaaatcttggaaaagaaatctgcctgaagtgtgaaatctctgaaaacataccaggaaaatggactaaaaatggcctacctgttcaggagagtgaccgtctaaaggtggttcacaagggaaggatccacaagttagtgatagccaatgccctcactgaagatgaaggtgattatgtattttgcacctgatgcctacaatgttactctggcctgccaaagttcatgttattgatcctcctaagatcatccctggatggtcttggatgctggacaacacagtgacagtgattgcaggaaacaagcttcgtcttgagatccccatcagcggagaaccacctcctaaagccatgtggagccggggagataaggctattatggaaggcagtggccggataagaacagaatcttaccctgatagcagcactctggtcattgatatagctgaaagagatgactctggtgtttaccacatcaatctgaaaaacgaagctggagaggcacatgcaagcatcaaggttaaagttgtggacttccctgatcctccagtggcaccgacctgtgacagaggtgggagatgactggtgtatcatgaacctgggagcctcctgcctacgacggaggctctccaatcctaggatattttattgagaggaagaagaaacaaagctccaggtggatgaggctgaattttgatctctgcaaagaaacaacttttgagcccaagaagatgattgaaggtgtggcctatgaggtccgcatctttgcagtcaatgccattggcatcctccaagcccagtatgccctccaggccttttgttcctttggctgtaacaagccctcctactcttctgactgtgggactctgtcactgacacggactgtccacggatgaggtgggcgccccccagaccacattggtgcagcaggtttaggatggctatgtgctagagtattgctttgaaggaactgaggactggatagttgcaaacaaagatctgatttgacaagaccgaagttcaccatcacaggtctgccaacagatgcaaagatctttgtgcgtgtgaaggctgttaatgcagctggtgccagcgagcccaagtactattctcagcccattctccgtgaaggaaatcatagaacctccaaagattcgcatcccaagacacctgaagcaaacctatatccgcagagttggagaagctgtcaatctggttatacctttccagggaaaaccaagaccagaattaacttggaagaaggatggtgcagaaattgataagaatcaaataaacattcgcaactctgagactgatacaatcatatttattagaaaagcagagaggagccactctgggaaatatgatctgcaagtcaaagtggacaaattcggtggagacccgcatcaattggacatccagatcattggaccgtccaggtccaccccaaattggtggaagatttgaggatgtctgggggagaaaattgtcgctctcacattggactccaccaaagggatgatggaaatgcctgctattcacaggctataccattcagaaggctgacaagaagagcatgggatgggtttactggttcattgagcatttatcatcgaaccagtggcaccattacttgaattggtcataagggaatgaatattacttccggggtcttttctgaaaaacatgtgtggccntccagtgaggatgcccaccatgactaaagagagtgccagtgatcgccagggatggtaaaatctacaaaaatccagtgtatgaagacttttgatttcctcagaggcacatcatgtttactcagcctttggttaacacctatgccatagctggttacaatgccaccctaaactgccagtgtgagaggaaatcctccagccctaaaaataaccctggatgaaaaaccaaagttgctattggtggatgattccaggataccaggatgttcagcaacccaggggagtctgtacccctggaaaaattccgccaagccccagccccctatgatgggaggcactttactgctgcaaagccagtcaaatgacccttggggaccagtgggagattgaatgcaaaactggaaggtgaaagtgatatatcaaggagtaaatacccctggacaaccagtcttcctggaggggcagcaacaggtgggctctccttctgcagacttcctcttgcaaggcgtacctcccaaacataattgattcatatctgccgagacttacactcaagcaatcctgaggaatactgaggggaagggcctggctactgtctctctgcactctgctgctttgaaatctggttgaaatgagaaaaagcattttctgttttcccaccaggcccccaagtgtggtctttttctttcctcctaatgtttgaagagaaaaaaaaaaaaaaaaaagtttgcccagattgcttaattaaaaattgcaaacaaaaaaaaaaaaaa

SEQ ID NO: 22218 - DNA, 528 bp, Homo sapiens
  SIMILAR (373)..(224): 981254mologous to Homo sapiens dsRNA binding protein TCP-80 isoform,accession number AF202445,Smith-Waterman Score=275.
ttttcagttttgtgtttctttatttgtctacattcagcttaattcagatgtactgcctgaatgacccagacataaaaagaaaccccccactctttcccactggtttttaaaataaaatcttcacttataaaactgaaacactaaagcattaaaatacagaaagctcgtttaactcacttcacaaaagcattaacaaatgacgtatcccttctgtaactatttaaagacaaactgagttaccactaacacgaaggtgaaatagacagagggatactgaactgcaaaaactcaaaaactctacccagacaaagttgtaatggcaactaacaaaccattgaagacacggagtcccaaacacggctaaatatgggtcacctcacgacacagcaacgtggacgggatcggggctggggctggaagccagctgacatggttactgtgatgcctaaaactcgatcttctgactgggagtaagttcagaaggttgaatcttcgcctgtgcttgatccgtaccggagttcatgcgtg

SEQ ID NO: 22219 - DNA, 485 bp, Homo sapiens
  SIMILAR (56)..(262): 1001254mologous to Homo sapiens dsRNA binding protein TCP-80 isoform,accession number AF202445,Smith-Waterman Score=399.
gcggagatttctaccttctgcacttactccccatcagaagatcgagttttatgcatcccgtccacgttgctgtgtcgtgaggtgcagcgggtcaccctgtggcccgtcctgtgacccatatttagccgtgtttgggactccgtgtcttcaatggtttgttagttgccattacaactttgtctgggtagagtttttgagtttttgcagttcagtatccctctgtctattcacacttcgtgttagtggtaactcagtttgtctttaaatagttacagaagggatacgtcatttgttaatgcttttgtgaagtgagttaaacgagctttctgtattttaatgctttagtgtttcagttttataagtgaagattttattttaaaaaccagtgggaaagagtggggggtttctttttatgtctgggtcattcaggcagtacatctgaattaagctgaatgtagacaaataaagaaaaacaaaactgaaaa

SEQ ID NO: 22220 - DNA, 559 bp, Homo sapiens
  SIMILAR (104)..(334): 941254mologous to Homo sapiens dsRNA binding protein TCP-80 isoform,accession number AF202445,Smith-Waterman Score=414.
  misc_feature (1)...(559): n = a,t,c or g
caccagggccagcagcagtcctacaacagtagcccctacagcanctatggccctccacagggcaagcagaaaggctataaccatggacaaggcagctactcctactcgaactcctacaacgccnccatcccgtccacgttgctgtgtcgtgaggtgcagcgggtcaccctgtggcccgtcctgtgacccatatttagccgtgtttgggactccgtgtcttcaatggtttgttagttgccattacaactttgtctgggtagagtttttgagtttttgcagttcagtatccctctgtctattcacacttcgtgttagtggtaactcagtttgtctttaaatagttacagaagggatacgtcatttgttaatgcttttgtgaagtgagttaaacgagctttctgtattttaatgctttagtgtttcagttttataagtgaagattttattttaaaaaccagtgggaaagagtggggggtttctttttatgtctgggtcattcaggcagtacatctgaattaagctgaatgtagacaaataaagaaaaacaaaactgaaaaaa

SEQ ID NO: 22221 - DNA, 2295 bp, Homo sapiens
  SIMILAR (1)..(2292): 1001254mologous to Homo sapiens translational control protein 80,accession number AF141870,Smith-Waterman Score=4008.
atgcgtccaatgcgaatttttgtgaatgatgaccgccatgtgatggcaaagcattcttccgtttatccaacacaagaggagctggaggcagtccagaacatggtgtcccacacggagcgggcgctcaaagctgtgtccgactggatagacgagcaggaaaagggtagcagcgagcaggcagagtccgataacatggatgtgcccccagaggacgacagtaaagaaggggctggggaacagaagacggagcacatgaccagaaccctgcggggagtgatgcgggtgggcctggtggcaaagggcctcctactcaagggggacttggatctggagctggtgctgctgtgtaaggagaagcccacaaccgccctcctggacaaggtggccgacaacctggccatccagcttgctgctgtaacagaagacaagtacgaaatactgcaatctgtcgacgatgctgcgattgtgataaaaaacacaaaagagcctccattgtccctgaccatccacctgacatcccctgttgtcagagaagaaatggagaaagtattagctggagaaacgctatcagtcaacgaccccccggacgttctggacaggcagaaatgccttgctgccttggcgtccctccgacacgccaagtggttccaggccagagccaacgggctgaagtcttgtgtcattgtgatccgggtcttgagggacctgtgcactcgcgtgcccacctggggtcccctccgaggctggcctctcgagctcctgtgtgagaaatccattggcacggccaacagaccgatgggtgctggcgaggccctgcggagagtgctggagtgcctggcgtcgggcatcgtgatgccagatggttctggcatttatgacccttgtgaaaaagaagccactgatgctattgggcatctagacagacagcaacgggaagatatcacacagagtgcgcagcacgcactgcggctcgctgccttcggccagctccataaagtcctaggcatggaccctctgccttccaagatgcccaagaaaccaaagaatgaaaacccagtggactacaccgttcagatcccaccaagcaccacctatgccattacgcccatgaaacgcccaatggaggaggacggggaggagaagtcgcccagcaaaaagaagaagaagattcagaagaaagaggagaaggcagagcccccccaggctatgaatgccctgatgcggttgaaccagctgaagccagggctgcagtacaagctggtgtcccagactgggcccgtccatgcccccatctttaccatgtctgtggaggttgatggcaattcattcgaggcctctgggccctccaaaaagacggccaagctgcacgtggccgttaaggtgttacaggacatgggcttgccgacgggtgctgaaggcagggactcgagcaagggggaggactcggctgaggagaccgaggcgaagccagcagtggtggcccctgccccagtggtagaagctgtctccacccctagtgcggcctttccctcagatgccactgccgagcaggggccgatcctgacaaagcacggcaagaacccagtcatggagctgaacgagaagaggcgtgggctcaagtacgagctcatctccgagaccgggggcagccacgacaagcgcttcgtcatggaggtcgaagtggatggacagaagttccaaggtgctggttccaacaaaaaggtggcgaaggcctacgctgctcttgctgccctagaaaagcttttccctgacacccctctcgcccttgatgccaacaaaaagaagagagccccagtacccgtcagagggggaccgaaatttgctgctaagccacataaccctggcttcggcatgggaggccccatgcacaacgaagtgcccccaccccccaaccttcgagggcggggaagaggcgggagcatccggggacgagggcgcgggcgaggatttggtggcgccaaccatggaggctacatgaatgccggtgctgggtatggaagctatgggtacggaggcaactctgcgacagcaggctacagtcagttctccaggcccccgcccccatcccgtccacgttgctgtgtcgtgaggtgcagcgggtcaccctgtggcccgtcctgtgacccatatttagccgtgtttgggactccgtgtcttcaatggtttgttagttgccattacaactttgtctgggtagagtttttgagtttttgcagttcagtatccctctgtctattcacacttcgtgttagtggtaactcagtttgtctttaa

SEQ ID NO: 22222 - DNA, 441 bp, Homo sapiens
  SIMILAR (224)..(439): 821254mologous to Xenopus laevis dsRNA-binding protein 4F.1,accession number U07155,Smith-Waterman Score=313.
cctccgacacgccaagtggttccaggccagagccaacgggctgaagtcttgtgtcattgtgatccgggtcttgagggaccttggtcactcgcgtgcccacctggggtcccctccgaggctggcctctcgagctcctgtgtgagaaatccattggcacggccaacagaccgatgggtgctggcgaggccctgcggagagtgctggagtgcctggcgtcgggcatcgtgatgccaagcacgcactgcggctcgctgccttcggccagctccataaagtcctaggcatggaccctctgccttccaagatgcccaagaaaccaaagaatgaaaacccagtggactacaccgttcagatcccaccaagcaccacctatgccattacgcccatgaaacgcccaatggaggaggacggggaggagaagtcgcccagcaaaaaaaaaaa

SEQ ID NO: 22223 - DNA, 558 bp, Homo sapiens
  SIMILAR (64)..(408): 801254mologous to Homo sapiens drbp76,accession number AJ271741,Smith-Waterman Score=487.
ggagcatgcattacttaattggctggccgacaggccaggaataacatgctcttgctgccctagaaaagcttttccctgacacccctctcgcccttgatgccaacaaaaagaagagagccccaggtacccgtcagagggggaccgaaatttgctgctaagccacataaccctggcttcggcatgggaggccccatgcacaacgaagtgcccccaccccccaaccttcgagggcggggaagaggcgggagcatccggggacgagggcgcgggcgaggatttggtggcgccaaccatggaggctacatgaatgccggtgctgggtatggaagctatgggtacggaggcaactcggcgacacaaggctacaagtgactttttcacaagactgcttacggctattcatgattttgggtcttcctagagccgtctaaaagtattgcacacaaaatcaactttttactccaatttcctccaactccaaaacccaaagtgtccgttgctgtgtccctgtgcttcactgggtttctcaaccgtggcttttcaccgcagcttgtctga

SEQ ID NO: 22224 - DNA, 3598 bp, Homo sapiens
  SIMILAR (1996)..(2985): 651254mologous to Homo sapiens nuclear factor associated with dsRNA NFAR-2,accession number AF167570,Smith-Waterman Score=1056.
  misc_feature (1)...(3598): n = a,t,c or g
cgccgcctgcccgcccgcccgctcgcccccggtccggactcctcctcctcctcttctcgccattgcagttggacccagcagcccggcgcgcaccgcgtggcttttgggggcagaccccggcgggctgtggcaggagggcggcggcggcggctgcggtcgaagaaggggacgccgacaagagttgaagtattgataacaccaaggaactctatcacaatttgaaaagataagcaaaagtttgatttccagacactacagaagaagtaaaaatgcgtccaatgcgaatttttgtgaatgatgaccgccatgtgatggcaaagcattcttccgtttatccaacacaagaggagctggaggcagtccagaacatggtgtcccacacggagcgggcgctcaaagctgtgtccgactggatagacgagcaggaaaagggtagcagcgagcaggcagagtccgataacatggatgtgcccccagaggacgacagtaaagaaggggctggggaacagaagacggagcacatgaccagaaccctgcggggaagtgatgcgggctgggcctggtggccaaagtgcctcctactcaagggggacttgggatctgggagctggtgctgctgtgttaaggagaagcccacaaccggccctcctgggacaaggtggccgacaacctggccatcacagcttgctgctgtaacagaagacaagttcgaaatactgcaatctgtcgacgatgctgcgattgtgataaaaaaacacaaaagagcctccattgtcccctgaccatccacctgacatcccctgttgtcagagaagaaaatggagaaagtattagctggagaaacgctatcaggtcaacggaccccccgggaacgttctggacaggggnagaattgcctttgctgccttttgnggttcccttccggaaacgcaaaggtggttccaaggccagagccaacgggctgaaagtcttgtgtcattgtgattccgggtcttgagggcacctgtgcactcgcggtgcccacctgggggtccccctccgaggctggcctctcgagctccctgtgtgaagaaatcccattggcacggccaacagaccgatgggtggctggcgaaggccctgcggagagtgctggagtgcctggcgtcgggcatccgtgaatgccagatggttctggcatttatgacccttgtgaaaaagaagccactgatgctattgggcatctagacagacagcaacgggaagatatcacacagagtgcgcagcacgcactcgcggctcgccgcgttcggccagctccataaagtcctaggcatggaccctctgccttccaagatgcccaagaaaccaaagaatgaaaacccagtggatctacaccgttcagatcccaccaagcaccacctatgccattacgcccatgaaacgcccaatggaggaggacggggaggagaagtcgcccagcaaaaagaagaagaagattcagaagaaagaggagaaggcagagcccccccaggctatgaatgccctgatgcggttgaaccagctgaagccagggctgcagtacaagctggtgtcccagactgggcccgtccatgcccccatctttaccatgtctgtggaggttgatggcaattcattcgaggcctctgggccctccaaaaagacggccaagctgcacgtggccgttaaggtgttacaggacatgggcttgccgacgggtgctgaaggcagggactcgaccaagggggaaggactcggctgaggagaccgaggcgaagccagcagtggtggcccctgccccagtggtagaagctgtctccacccctagtgcggcctttccctcagatgccactgccgagaacgtaaaacagcaggggccgatcctgacaaagcacggcaagaacccagtcatggagctgaacgagaagaggcgtgggctcaagtacgagctcatctccgagaccgggggcagccacgacaagcgcttcgtcatcggaggtcgaagtggatggacagaagttccaaggttcttggttccaacaaaaaggtggcgaaggcctacgctgctcttgctgccctagaaaagcttttccctgacacccctctctcgcccttgatgccaacaaaaagaagagagccccagtacccgtcagagggggaccgaaatttgctgctaagccacataaccctggcttcggcatggggaggccccattgcacaacgaattgcccccaccccccaaccttcgagggcggggaagaggcgggagcatccggggacgagggcgcgggcgaggatttggtggcgccaaccatggaggctacatgaatgccggtgctgggtatggaagctatgggtacggagggcaattttgcgacagcaggctacagtcagttctacagcaacggagggcattcttggaatgccagtggcggtggcggcgggggcggtggtggctcctccggctatggctcctactaccaaggtgacaactacaactcaccggttgcccccaaaaacacgctgggaaagaagcagccgcacgggggccagcagaagccctcctacggctcgggctaccagtcccaccagggccagcagcagtcctacaaccagagcccctacagcaactatggccctccacagggcaagcagaaaggctataaccatggacaaggcagctactcctactcgaactcctacaactctcccgggggcgggggcggatccgactacaactacgagagcaaattcaactacagtggtagtggaggccgaagcggcggggaacagctacggcttcaggcggggcatcctaacaacccaggggtcacacgggggctacggcggaggttctggggggcggctccttcataccaagggcaaacaaggaggttacttcacagtcgaactacatactccccggggtccggccaagaactacagtggccctcccagctccttaccaagtcctcacaaggcggcttatggcagaaacgcagacccacagcattgaacttaccagtaccagataaagcccccgcggggcggagatttctaccttctgaaacttacttccccatcagaagatcgagttttatgcatcaccagttaacatgtcagctgcctgcgctccaggcccccggcccccatcccgtcccacggttgctgtgtcgtgaaggtgccagcgggtcaacctgtgggcccgtcctgtgaccccatatttagccgtgtttgggactccgtgttttcaatggtttgttagttgcccattacaactttgtcctgggtagagtttttgagtttttgcagttcagtatccctctgtctactgtcacccttcgtgttagtggtaactcagtttgtctttaaatagttacagaaggggatacgtcatttgttaatgcttttgttgaagttgagttaaaacgagcttttctgtattttaaagctttagtgtttcagttttataaatgaaaattttattttaaaaaccagtgggaaaaagtggggggtttctttttatgtttgggtcattcaggcagtacattttaattaagctgaatgtagacaaataaagaaaaacaaaactgaaaaa

SEQ ID NO: 22225 - DNA, 452 bp, Homo sapiens
  SIMILAR (154)..(243): 931254mologous to Homo sapiens dJ891H21.1 (HYPOTHETICAL 43.1 KD PROTEIN),accession number AL035417,Smith-Waterman Score=147.
tccctgaagctaggaatgctgccaccaggggatgggaccaccctctctaaagcctgtgtctcctgaatctgaccctgcttcccacccccacccttgtaagagcacctgtgggcatggaggggaaggatctggggctgatctaaatgtcttctctcctttttagacgactgcaagaacattgccaacatcatgaagacactcgcctatcgaggcttcatcttcaagcagacatcgaagccgttctgattggccgaggacaggatggggcaggacagggtagctgtttggcccagcccagaatcctcctctccctcaccagaggggaagagggagagtggcatagctctgtgtccagagtgtccccagctgccctgtgggctcatgcccttggcgtgggcttgtgcccttgcaagggcttggccacttggcccttctggagcagacactttgtg

SEQ ID NO: 22226 - DNA, 2154 bp, Homo sapiens
  SIMILAR (1447)..(1629): 911254mologous to Homo sapiens dJ891H21.1 (HYPOTHETICAL 43.1 KD PROTEIN),accession number AL035417,Smith-Waterman Score=306.
  misc_feature (1)...(2154): n = a,t,c or g
atgctccccaaggacccggggcttgctctcatgtgggtaagagtccatcacgtgtccacacttgcagccacagctagcagaacaggagagaggcttgttgggcaccaagacccacccgacccatggctgctgcccttaagccctttaattctgatgcaggatcagtttcatggccccccctattcccctccaccacagaccatgtcagggttacagcccagccactttggattgaattctggaaccacacttggagacaaaccctggagcctcacccaggggcagcaggaggtcttaaaggactcgtgttttaacggcgatgttactaacacttgggagcagttacctgggaaccctctgcatgcctctgaagggatggttctacacaccttgtacgacagagcaactagttgtattttctttgaggcactggccaacttctcacattggggctttccagctctcacagaaccttcagcatccccagctgccggtcttggcatcttcgaagtaaggagaggtgctttcagtcagctggactcagaacctgttgcaggtggtagtggcctcattgcctttgagtacgcgctggacttcacagggtgctatccctctaccctatgtgaagggagccaggtgcccacttgcagccatcagaggcaagcctttggttgtgttggaatgaggcttcggaaagcacaaactatggccattactgtattgtacagctgctgtttcctggtggtccctcataaggatgggcctccgcctggctcccactatggctcctcactagtattcccggaatgggaacaagcgtttgctgtgtccgagtcttggctgtattgcaacttcactgtaaatcagcaattaaaacccaaacagccaaatgccaaagatgacccgaagcacaaagcaactgacaaacaagtccggacaaatcgacgggtgccctggctgcagagttgtgccaacttggtgcagattggggcacctctcccactactgggctgtttgggccagtattttgaggttctgggaagtatggaagtactggctgggcaatatgggaaggaaatcatccgagttccccatcctaaagctaaatgggccggaccatgggagattgagtcttaccttttcacatgtatgttccagcctgtagttccatccacagctttacccccattctgttacagagctcaccggggattatttcaagccatggtgggatggtcagccaagcctgcagcaagtgctgggagagggtcgatgaatggatgggcgaaggaaggccttcttagatccaaacgttcaagttcaatttttgttcaccctgtgggaggactggggacttaaaaagtccatnctcccaggcccagtgccagtaacttggggcttggccagtggggggatttacttccaagcagtgggattaatcctgaaaaaaggcttacagctttcgccatgggctgctggcccaagaatggacttctagacatgaacaagggcctcagcctgcaacacataggccggccccacagcggcattgacgactgcaagaacattgccaacatcatgaagacactcgcctatggaggcttcatcttcaagcagacatcgaagcccgttctgattggccgaggacaggatggggcaggacagggtagcttggttggcccaccccaaaatcctcctctccctcaccaaagggggaagagggagagtgggcataagctttgttgtcccaaagttgtcccctcagcttccctgtggggctcaatgccccttggccgtgggctttgttgccctttgcaaggggctttggcaacttggccctttctggaagcaagacacttttgtgcccccccatcccccacccctcaatctcagcccagtatcagcccctcccattgcgggcctgggctaagggggaccccaggcactcaccgcctcctcccctggtacaacaggcttctgtggggccaccaagaccctcgctgtgccccctcccatccataagtgcatggtgtgtggtcgccccagggctccaggacagatcaggccccaccttgtgtctacccccatccccgctgtgaacgtgccactgaataaagtcggggaaacgaggcactgggtgtgtgtgcaaagcca

SEQ ID NO: 22227 - DNA, 1115 bp, Homo sapiens
  SIMILAR (427)..(1113): 821254mologous to Homo sapiens p40,accession number U93569,Smith-Waterman Score=961.
gagagctctggctggcatctggtgggcacccctctgggaagaagcttccagaggaaggagcaggcagcaatctttgctgttctgcagcctccactggtgatacccaggcaaacaggatctggagtggacctccagcaaactccaacagacctgcagaagagggtcctgactgttagaaggaaaactaacagcatcaacatcaacaaaaaggatgaccatgcaaaaaccacatccaaaggtcaccaacagcaaagaccaaaggtagataaatccacaaagatgaggaaaaaccagtgcaaaaaggccacaaattccaaaaaccagaatgtgtcttctcctccaaaggatcacaactcctcaacagcaaaggaacaaaactggatggagaatgagtttgacaaattgacagaagtaggattcagaagtagccaattcgatcaagtggaagaaaggatatcagatattgaagataaacttaatgaaataaagcatgaagacaaaattagagaaaaaagaatgaaaaagaaggaacaaagcctccaagaaatatgggaatatgtgaaaagaccaaacctacgtttgattggtgtacctgaaagtgacggggagaatggaaccaagttggaaaatacacttcaggatactatacaggagaacttccccaatctagcaagacaggccaacattcaaattcaggaaatacagagaacaccacaaagatactcctcgagaagagcaaccccaagacacataattggtagattcaccaaggttgaaatgaaggaaaaacggttaagggcagtcagagagaaaagtagggttacccacaaagggaagctcatcagactaacagcagatctctctgcagaaaccctacaaggcagaagagagtgggggtcaatattaaacattcttaaagaaatgaattttcaacccagaatttcatatccagccaaactgagcttcataagtgaaggagaaataaaatgctttacagacaagcaaatgttgagggatttcgccaataccaggcctgccttacaggagctcctgaaggaagcactaaatatagaaaggaaaaaccggtaccggccactgcaaaagcaaatcaaaaa

SEQ ID NO: 22228 - DNA, 517 bp, Homo sapiens; identical to SEQ ID NO: 2735
  SIMILAR (3)..(419): 1001254mologous to Homo sapiens Hb2E,accession number AF235097,Smith-Waterman Score=747.

SEQ ID NO: 22229 - DNA, 1987 bp, Homo sapiens
  SIMILAR (685)..(804): 521254mologous to Homo sapiens Human secreted protein, SEQ ID NO: 4473,accession number G00392,Smith-Waterman Score=79.
tcatgcttgcgtcgtgcccgccgttgccgtcgcgccggggatgcatgtgtcgccgctccaccccgccttccgggcggcgggcccgttgtcgtctccggtgtttgcgcatcgctgcgctgccacctgcccttcgacggcccctcgtcggccccctatgtggtggcttgctggctgtcgcactgtcggctccctgtcgtctgtgtaccggtctgcccttggcccgccgcgccctcgattgatgctcgatccgctcgacggccttcggttcgactgtgcgcccgccgctgccacttgcttgtcggtgcgacgcgtcgagaggtttctcttcattgttcggcgtggcgatgtggtgggggtggctgctgaggtggtggtggtgtgggtgaggtcgtggttgagacaacgggctctgagttcatgatgaagagcacgagtctccggctcgggcgttagcggattcaatcggtgtactggtatggcaccatctctacccacatttttcgatggatctaaccgtgctcctctaggtctgacatgctccgacctttggtctttgatgttggtgaccttcagatggggtttctgtgtggacaccctttttgttaatgttgatgctattcctttccgtttgttagttttccttctaacagtcaggcctctctgctgcaggtctgctgcagtttgctggaggtccactccagatcgtgtttgcctgggtatcaccagcagaggctgcagaacagcaaagattgctgcctgtttcttcctctggaagctctgtcccagagggacacccaccagatgccagccagagctttcctgtatgaggtgtctgtcgacccctgaggaggcagtctgtcccttagcagagctcaagcgctgtggtgggagatccactgctctcttcagagccagcaggcaggaatgtttaagtctgctgaagctgtgcccacagccacaccttcctccaggtgctggcttcccttggctaggggaggggagtcccccccctccttgtgcttctagatgaagccccatttgcagcgttgtgttacggcacacctcttgtggagctggcaacgcttgtgtaaccacacccccagtgtgaaataatgtgaggtacctctcagcgggtaaatcccgaaatgtatcgccccccagaatttcatatctggctaaaccaagctgcataagtgaaggagaaataagatccttttcagaaaagcaaatgctgagggaattcatcaccaccaggtctgccttgcaagagctccagctctcctcctcctcctcccagcctgacaggcgctccagctcgtcgggccgcagcggctccacctcgtccagcaagccgccctcgcccgccgctagcaaggaggtggcgtcccgcagctcttcgctactcgtccgcctcgggcccgacccgggcccgccgcccgacttggcgctgaggcccaaggggaagccccgaggagacgccgcgccggaggagggaatggacgcgccggcccgaaccgggctgccgggcccaagggagccggcgccctgcacggcccccgagcggctcctcagctgttcgttctgcttctccagcttcttcaccagctcctgcagcttccgcacctcttggtccgcgttcacgttggagttaacgtcctccatcccggccccgccgccgccgccgcctccgccgcccggtcgctctcgcagcgacagggaaagagacggaggaaagaggcgtcgccgccgctcactctagccgaggcgccggcatatagcaggaccaggccccaccgccagggtccccccacctcgggttccaaagcgccgctggccccagccgaactgcctcatctgcgccggctccgggattgggggacgcggcgccaatactccggcccctgccgccatcttccctccgtccctgcgccccccgcgtgccggcccagtcggtgacctcagagcgtcgggggtggacgcggccgca

SEQ ID NO: 22230 - DNA, 2488 bp, Homo sapiens
  SIMILAR (1815)..(1970): 961254mologous to Homo sapiens KRAB zinc finger protein ZFQR,accession number AF309561,Smith-Waterman Score=259.
ccagagcaaaggcatacctccaccacattaagaatcctagacattattggccacaggtataaaatccgctggggctccaaacaaaggtatatagttaactatattgggggcattgctttaagatgagtgcctagcagcagtgacagtatctgggcctggaaaaaatgtaccacttacattgaatttgctcttcaacccacaggttctgactcctcaggagcaaaaaacataacctgaagagggaggaagtggatttggggttcaccatttcttggggcacacttgattgaaaactgagacttctgaagagaaggccagaagatacaaagacagaccatcccagttgaatgctgtcttccaagaacagaagaaaatgatccaggcccaggaatccataacactggaggatgtggctgtggacttcacttgggaggagtggcaactcctgggcgctgctcagaaggacctgtaccgggatgtgatgttggagaactacagcaacctggtggcagtggggtatcaagccagcaaaccggatgcactcttcaagttggaacaaggagaacaactgtggacaattgaagatggaatccacagtggagcctgttcagacatatggaaagttgatcatgtgctggagcgcttgcagagtgaaagcctggtgaacagaaggaaaccatgtcatgaacatgatgcatttgaaaatattgttcattgcagcaaaagtcagtttctgttagggcaaaatcatgatatatttgacttacgtggaaaaagtttgaaatccaatttaactttagttaaccagagcaaaggctatgaaataaagaactctgttgagtttactggaaatggggactcctttcttcatgctaaccatgaacgacttcatactgcaattaaattccctgcaagtcaaaaactcatcagcactaagtcccaattcatcagtcccaagcatcagaaaacacgaaaattagagaagcatcatgtgtgcagtgaatgtgggaaagccttcatcaagaagtcttggctaactgatcaccaggtaatgcatacaggagagaaaccccacagatgtagtctatgtgagaaagccttctccagaaagttcatgcttactgaacatcagcgaactcatacaggagaaaaaccttatgaatgccctgaatgtggcaaagcctttctcaagaaatcacggctcaacatacatcagaaaacacataccggagagaaaccctatatatgcagtgaatgtggaaaaggcttcatccagaaaggaaatctcattgtacaccagcgaattcatacaggtgagaaaccttatatatgcaatgaatgtggaaaaggcttcattcagaagacgtgtctcatagcacatcagagatttcacacaggaaagacgccctttgtgtgcagtgaatgtggaaaatcctgttctcagaaatcaggtctcattaaacatcaaagaattcacacaggagagaaaccctttgaatgtagtgaatgtgggaaagcctttagcacaaagcaaaagctcattgtccatcaaaggactcatacaggagagagaccctatggctgtaacgagtgtgggaaagcgtttgcgtatatgtcgtgtctggttaagcataagagaatacacacaagggagaaacaagaggcagccaaggtggaaaatcctcctgcagagaggcacagctcattacacaccagtgatgtcatgcaggagaaaaactctgctaacggggcgactacacaagtgccttctgtggcccctcagacatcattaaacatcagcggcctcctcgcaaaacaggaacgtagtccttgtgggacagccagtggtcagatgtgcagcctcaggagataacagtggatttgcacaggacagaaaccttgtgaatgcagtgaatgtggttgtgccttccgtgatcaattatgtcttattttatgttacagaaaacccataggaagaaaactcagatctatgtggaaaagggttgagcaaaaatttgtagttcattatgtggccgaaaagcatacactgtgagaacatgtataaggctgagatagcctgatagactcatcctattaaaatgtatgctgtgatacacaggcaaatttgatgttaacctaagcacatacacagcaattgctcgactgtgtcaattaaatgagtaaaggaagcccaagtacttttaagtggaggaaatgaagtactgtgaatttttaaaacagatgagataattggtgttgggaagtgttgcagtgactgaaaagcttcataaggggcagttggtgggaaagggctaatactgtaatggtggaatgtgggacacatatgtgtcaattcagtttccttagaccagtgccagtgtggaggattaattgaaaaccatggaccataaactttcagaactttgtattatgcagagggatctgtgaaactagtcaatttgtttcattaaacaaatattttaaaatt

SEQ ID NO: 22231 - DNA, 344 bp, Homo sapiens
  SIMILAR (9)..(158): 861254mologous to Homo sapiens bK217C2.1 (nuclear pore- associated protein, 60kDa (rat)-like),accession number Z82243,Smith -Waterman Score=214.
  misc_feature (1)...(344): n = a,t,c or g
aaacatgggccaaaagaaaatcnntgaaggaactgacagataggaattgggatcaagaagatgaagctgaagaggtgggaacattctccatggccagtgaggaagtcttnaagaatagagccntaaagaaagcaaagcgcagaaatgttngagttgaagttctcttgctgcaaatggccctaccaccttggntgataaagtttcaaatcccaaaactaatngggacagtcagcagccctcctcctcttggcttgcttccngtaaagcttntgttgggaatgcctatcacaagcagtttggcnccttnaactgctccntgccggntttggntagtnaagcacggg

SEQ ID NO: 22232 - DNA, 543 bp, Homo sapiens
  SIMILAR (8)..(349): 1001254mologous to Homo sapiens nuclear pore-associated protein,accession number AF107840,Smith-Waterman Score=586.
cgaaaacatggccaaaagaaatgctgagaaggaactgacagataggaattgggatcaagaagatgaagctgaagaggtgggaacattctccatggccagtgaggaagtcttgaagaatagagccataaagaaagcaaagcgcagaaatgttggatttgaatctgacactggaggagcctttaaaggttttaaaggtttggtggtaccttctggaggaggacgcttttctggatttggtagtggcgctggagggaagcctttggaaggactgtcgaatggaaacaacataaccagtgcccctcccttcgccagtgcaaaggcagcggcagatcccaaggtagcctttggtggagatgaagaagagaatgatgagccacccaaagtagtagttaccgaagtaaaagaagaagatgctttttactccaaaaagtgtaaactgttttacaagaaagacaatgagtttaaagagaaaggcataggtactctgcatttaaaacctacagcaaatcagaagacacagcttttggtgcgggcagacaccaa

SEQ ID NO: 22233 - DNA, 490 bp, Homo sapiens
  SIMILAR (75)..(1): 501254mologous to Oryctolagus cuniculus cytochrome P- 450,accession number L04758,Smith-Waterman Score=61.
ttgtgagcagcagcaagatttattgcaaagagcgaacaaacaaagcatcccggtgtggaaggggacccgagtgggttgtcactgctggctcgggcagcctgcttttattctcatctggccccacccacatcctgctgactggtagagccgagtggtctgttttgacagggtgccgattggtgcgtttacaatccctgagctagacacaaaggttctccatgtccccaccagattaactagatacagagtgttgacaaaaaggttttccaagtccccaccagagtagctagatacagagtgtctattggtgcattcacaaaccctgagctagacacaaggtgctgattggtgtgtttacaaaccttgagctagatacagagtgccaattggtttatttacaatcccttagctagacataaaggttctccaagtccccaccagactcaggagcccagctggctttcacccagtggatcctgcacaggggctg

SEQ ID NO: 22234 - DNA, 517 bp, Homo sapiens
  SIMILAR (175)..(330): 351254mologous to Chironomus pallidivittatus gamma protein constant region,accession number X06434,Smith-Waterman Score=74.
cggcacgaggttcgagttacaaaatggccgcccggagcgtgttcggcgcggttcccccagctgtctctggctgaaccggcgctctcgcctccctgccgaacacagcgtgaggagcccccccagggatatggtgtttgagtctctgggcttgccgagcactaagtcctctgagttccgcagcgcagcaccggaagcggccgagcgcgctcagcccggcgacccctgcgggctccagacccctgcgccgctgcgccccgggtttcgccgcaaccaagacccagcgagtgcagcggcggccgccgaggaggtgaggagcggcggcgggcgcgggaggatcttagcgaccactttgtggggttgtaatacactctgtattacacaatacaccagaataaggaagcttactctggtgtattgtggtgttgagagcaaacaagagtggggagagtatcacgaaggagttcaggcaggtttaacaagacctggcaggtccccaaaactaatcagtaagtttttg

SEQ ID NO: 22235 - DNA, 4719 bp, Homo sapiens
  SIMILAR (2052)..(2186): 951254mologous to Homo sapiens PRO1146,accession number AF116624,Smith-Waterman Score=216.
atggggtttcaccatgttggccaggctggtctcgaactcctgacctcagaagtgaagctgcggacctttgcagtgagtgttacagctcttaaggcggcgcgtctggagttgttccttcctcctggtgggttcgtggtctcgctggtttcagaagtgaagctgcagactttcgcagtgggtgttacagctgataaagacagtgtggacccaaagactagacataaaggttctccaagtccccaccagactcaggaacccagctggcttcacccagtggataccgcacaggggctacaggtggagctgcctgccagtcgcgccgtgcgccggcactcctcagcccttgggtggtcgatgggactgggcgtggtggagcagggggcggcgctcgtcggagagtctcgggtctcaggtcgcacaggagcctacggagcgggggaaggctcaggcatggcgggctgcaggcctcactcaggagtgcctgtgattgcctacctggttcttggggcttcaggataccaccatctcctgccaggagatggtgttgccactggaactcgtgcccctgccaagcaccaaagtctcccatgggccatggcccactttccagctattcaccctgcagaactcactggaccaaagctggagctgctctatgttgaagtggtagcaagatgcttctctcctctccaatgcactgcccttgccctggaggaaacaggaatgtcctggggagtgttagaaatttaccagacggctctggtgaagggctgggaacttcagctggaatttggaatatggtccttggagtcttggccgtttagttggcagatgaaaaaagacagcatgaggaagatctgtccttccagaaacacctccaggaggattatttccaatccccagcttcaaccgcctgtcctgccaccctcgtcacccacctgccagtttgctgccccacttcctggaaggccagctctgtgcaaatctggagctatgggagtgggaggtaccaaagaagaagctgtggctctcaccatgttggagttcaaggagggtgatggccatcgggggtgccagctttgggagtgtccctctgaaaatgagtccttcccagtatcatccaccccatggagtgatactccagggtgtctgtctccttatgcccatgtgactgggtggcctctggctgtctacagaagtttgctcagagccagtgtgacagctgactcctgctcattgagaagagacccttctgcctcttggtttattgcaaatcgattttactgtgggcaacaagctttcccagaaatacctaacactgacgcacacatctgtacttgggtgactaatcggcatatcaagcttacccgtcaaaacagaactgaagatttcctccctcaggctgttcctcatgcactttcccctatggaagcatggtctgagtcagtgtgggattatcagtacacattgaaggatgtgtgtgaagggaaagagtgtagcagaggagataattatttccaggtgaagcgactgtattcagatttgatgttagatttagcagctcagtctgatgcaggttttgttttttggcaagaacatttcctaggtattcccagtgcatacacagggcaactcacagatgcccaggtaatatgttactgccagattgcctgccagacgctcacaccaaagcatgctcctgtcctgccttctgtgtatgaggatgctcacattcccacccacttgccaacagtcattatcatttcttcaaatctttgccaattctatagcggtctccggctgaaccggcgctctcgcctccccgccgaacacagcgtgaggagcccccccagggatatggtgtttgagtctctgggcttgccgagcactaagtcctctgagttccgcagcgcagcaccggaagcggccgagcgcgctcagcccggcgacccctgcgggctccagacccctgcgccgctgcgccccgggtttcgccgcaaccaagacccagcgagtgcagcggcggccgccgaggaggttcgaaaacatgggccaaaagaaatgccgggaaggaactgacagataggaattgggatcaagaagatgaagctgaagaggtgggaacattctccatggccagtgaggaagtcttgaagaatagagccataaagaaagcaaagcgcaagaaatgttggatttgaatctgacactggaggagcctttaaaggttttaaaaggtttggtgggtacccttctgaagaagaacgcttttctggatttgggtagtggcgctggagggaagcctttggaaggactgttcgaatggaaacaacataacccagtgcccctcccttcgccagtgcaaaggcagcggcagatccccaaggtagcctttggtaagtagctcccatcccccagccgcctcttggttgataaaaatgtttcaaatcccaaaactaatggggacagtcagcagccctcctcctctggccttgcttccagtaaagcttgtgtcggaaatgcctatcacaagcagttggccgccttggactgctccgtgcgggattggatggtgaagcacgcgaatacaaactccctctgtgatctgacacctatctttaaaagactatgagaaaatatttagcaaacattgaaacagcaaacacgggaaacaagtggcaggaattctgaaagtgaatctaacaaagtggcagctgaaacacagtctccttccctttttggctcaacaaaattacagcaagagtcaacgtttttgtttcatggcaacaaaactgaagatacacctgacaagaagatggaggtggcatctgaaaagaaaacggacccatcatcactaggagcgacaagtgcctcatttaatttcggcaagaaagttgatagctctgttttgggctcattaagctctgtccccctgactggattttctttctcccctggaaactccagtttatttggcaaagatactacccagagtaaaccagtctcttcaccatttcccactaaaccattggagggccaagcagaaggtgacagtggtgaatgcaaaggtggagatgaagaagagaatgatgagccacccaaagtagtagttaccgaagtaaaagaagaagatgctttttactccaaaaagtgtaaactgttttacaagaaagacaatgagtttaaagagaaaggcataggtactctgcatttaaaacctacagcaaatcagaagacacagcttttggtgcgggcagacacccaatttaggcaacatattgctgaacgttctgattccaccccaatatgccatgtacgcgaacagggaagaataacgttcttatcgtctgtgttccaaatccaccaattgacgagaagaatgcccaccatgcccagtcaccatgttgatttcgggtaaaaaccagcgaggatgcagacgagttgcacaaaattttactggagaaaaaggatgcctgaacacgcaaagtcggctgcagaattattgccaagtttttttgctgcttccaccgccccttaaagttagtcagtttttcttctcttctttgacatttttaagaacttatagataacttaaaacttttgtgaggaagattaatgtggcccaataaaacctttaaatgttaagtgtcaagaaactgcactctcccttcttaagaactgcctaaagtgtaaaatacatttgaatgcaatttttggaagattttttaatgttcgtttattaaactaaccctaagtgatttcttcaaggactggcaatcagggtatcaatttgctttcccaaagggctcttccaacccgtgggttttggggtccaccgccaccaccagagaggcttttgaacaggtgcctggctgtgttcagaaggaagctggcctgtgtgcttctctccggtgggctcagccgacgtgtgagacttgttctgttaccaaatgaaccgggctgccacgctgtgacaggcgtttgtcctctgctttatttttactttgaagctcaaatgcgagtactaagtgttcacctcagcgttcgaatcattggcctgtaaccctgtgggctgcttcacgagaattcaggacctgcattttcattctaaaaagaaatgaacagcttgtgaaggagttttttggcttcatagtttctattcatgaggtagggttacttctttatccccctaaagacaaaatgaagataaagggggattgccaggaattggttttaaaagcacaaatgtggtagcttatcatctacaccatggagagtgaacccttacgaaatgaaagtcaaatgagaccatcctagaaaaagaagatgctcataggcatttgtaccatgatcaaccccacgcatatgaaaactatgaccaagtgacgtgcctgggagctttgacacacaagccatgtgaattcactagggaacacgtaataaagcttggccaaggattccaagaaatcataatgcccagagtttgcaagtggcgagaaagtgagcattctcatacacagatgcagctatctcactgtctatctcacactcactgagggtgatgtttcaggagccactggacagaatcttctgcggcaaacctgagaaagaaaactgaaattactgctttgaagtgacgggttactcagaaatactgaaatacatattctataaaatgtaaacttttgattttgactctaataaaataataagcctttg

SEQ ID NO: 22236 - DNA, 432 bp, Homo sapiens
  SIMILAR (215)..(277): 521254mologous to Arabidopsis thaliana glycine-rich protein homolog,accession number AL161543,Smith-Waterman Score=53.
  misc_feature (1)...(432): n = a,t,c or g
aagggcgcctaagaaagctggccaggctgctnaaggagtcggcgcgaaagccgttgcccaaaatatgggtgtggcnacgctgtgcacggggaaacaaggcctcgcgggcnccnagcttcttgctgctgccgttgagctggaagaggttctgcagcacccccggccccttgctggccgctgccaccgccttccgcttggtctgcccaccgcggaccagctcagcaaggggctccacggcggcccaggaagtggtcggagngcccgtgggggatttggcacctgaggttaggagttcggctttaccagctttgtctttgctaatggattttttcccaggtgtcttcaaagcttcggggccgtcctgtgctttgggggacaggctgggggtggcggcttcactagncgggggtgcctcactggataccttcttgg

SEQ ID NO: 22237 - DNA, 419 bp, Homo sapiens
  SIMILAR (51)..(419): 661254mologous to Homo sapiens CAGL79,accession number U80753,Smith-Waterman Score=441.
ccgtgctcatccccaaggaggatagcctgctgtacgcgggcagcgtcaggaccctgcagccacccgacatctatagcatcgtcatcgagggcgagaggggcaaccggcagaggatctactcactggagcagctgctgcaggaagcggttctcgatgtgcggccacagtccagccggtacctcccgcccggcacgcgggtctgcgcctactggagtcagaagtctcgatgtctgtacccgggcaacgtggtccggggggcctccggtgacgaagatgaggacctggactcagtagtggtggaatttgacgatggggatacaggccacatcgccgtctccaacgtcaggctgctgccccctgacttcaagatccagtgcacagagccctctccggccctgctagtgtctagcagctgccgg

SEQ ID NO: 22238 - DNA, 557 bp, Homo sapiens
  SIMILAR (552)..(22): 271254mologous to Macaca mulatta fibrinogen A-alpha- chain,accession number D43758,Smith-Waterman Score=111.
tgcggccgccctccgtggaaaaccggccaaagatctcagccttcctgcccgcccggcagctctggaagtggtcggggaatcccacacagcggcgtggcatgaaggggaaggcccggaagctgttctacaaggccatcgtgcggggcgaggagaccctgcgtgtcggggactgtgctgtcttcctagtcagctgggcggcccaacctcccctacatcggccgcatcgagagcatgtgggagtcgtggggcagcaacattggtggtcaaggtcaagtggttctaccacccctgaggagaccaagctgggcaagaggcagtgcgacggcaagaatgcgctgtaccagtcctgccacgaggatgagaacgacgtgcagaccatctcccacaagtgccaggtcgtggcgcgcgagcagtatgagcagatggcccggagccgcaagtgccaggaccggcaggacctctactactggcgggcacctacgaccccaccaccgggcgcctggtgacggctgatggcgtgcccatcctatgctgagccgctcccacttcagattggt

SEQ ID NO: 22239 - DNA, 2943 bp, Homo sapiens
  SIMILAR (1069)..(1977): 301254mologous to Homo sapiens CAGL79,accession number U80753,Smith-Waterman Score=152.
atgcggcggcggcgcaaagtcgcggccatccatgccgggccccggccccggtccgccgccgcttcctcggagcagcgcggccggggcccgggggcggctcggcgcgcgggcggcgcagaggcggcggcgtccggggtcacaggcggtggtggcggcggggccggtcagcacgcgggaggactgggcttctcggcgggcggccgcgcaccgagccagcggccgctgtgcgggtccatgcctgctcgactttttagcaaacaggaggtggattactgtggcctgcctgcgccgccagcatcgtctttaaggtcgagagggcaccggcagaggatctactcattgaaccagctgctgcaggaagcgttgaggaccgggcgggcccgccccggggaggggcctggctggcttgtcacagacaaaggagggcttggctggggcagcagccactcccaggcccagggaccagactctcaggcagcctggggccgggccccacctgctcatgggtcgtcgcccgcgttcctgcaggttctcgatgtgcggccacagtccagccggtacctcccgcccggcacgcgggtctgcgcctactggagtcagaagtctcgatgtctgtacccgggcaacgtggtccgggccccgcctccctgtttcgggcgcctactgggggttccagctgcaagctcaggtgtgccgtccacaggggcctccggtgacgaagatgaggacctggactcagtagtggtggaatttgacgatggggatacaggccacatcgccgtctccagacgcacagagccctctccagccctgctagtgtctagcagctgccggaggaccaagaaggtatccagtgaggcacccccgcctagtgaagccgccacccccagcctgtcccccaaagcacaggacggccccgaagctttgaagacacctgggaaaaaatccattagcaaagacaaagctggtattttaccggacttcccagaatccggatcggggaaggcaccctctgggggctgggggaaccaggaggcccgtggggtaggcagggtccggggaggggcaggtggaggcagctttgtgggcccagctggggctgactctgctgggcttttgccctcaggtaaagccgaactcctaacctcaggtgccaaatcccccacgggggcctccgaccacttcctgggccgccgtggcagccccttgctgagctggtccgcggtggcgcacaccaagcggaaggcggtggcagcggccagcaaggggccgggggtgctgcagaacctcttccagctcaacggcagcagcaagaaactgcgggcccgcgaggccctgttccccgtgcacagcgtggccacacccatatttggcaacggctttcgcgccgactccttcagcagcctggccagctcctacgcgcccttcgtcggggggaccgggccgggcctccccaggggagcccacaagctgctgcgggctaataaggccgagagggtggaggccgagaagggtgggcggcggcgggcgggcggtgagttcctggtcaagctggaccacgagggtgtgacctcccccaagaacaagacctgcaaggcgttgctcatgggggacaaggacttcagccccaagctcgggcggcccctgcccagccccagctatgtgcacccggcccttgtgggcaaggacaagaaggggcgggcacccatccccccgctgcccatggggctggcgctgcgcaagtacgcgggccaggcagagttcccgctgccctacgacagcgactgccacagctccttctcggacgaggacgaggacgggccggggctggcggccggcgtgccctcccgcttcctcgcccgcctgtccgtgtcctcttcctcctctggctcgtccacctcctcctcctcaggctccgtgtccacctccagcctctgctcctccgacaacgaggactcgtcctacagctcagacgacgaggacccggctctgctgctgcagacctgcctcacccaccccgtgcccaccctcctggcccagcccgaggccctgcgctccaagggcagcggccctcacgcgcatgcccagcgctgcttcctgtccagggccacggtggctggcaccggtgcgggctcaggccccagcagcagcagcaaatccaagctcaagcgcaaagaggccctgagcttctccaaagccaaagagctctcccggaggcagcggccgccctccgtggaaaaccggccaaagatctcagccttcctgcccgcccggcagctctggaagtggtcggggaatcccacacagcggcgtggcatgaaagggaaggcccggaagctgttctacaaggccatcgtgcggggcgaggagaccctgcgtgtcggggactgtgccgtcttcctgtcagctgggcggcccaacctcccctacatcggccgcatcgagagcatgtgggagtcgtggggcagcaacatggtggtcaaggtcaagtggttctaccaccctgaggagaccaagctgggcaagaggcagtgcgacggcaagggaggggacacgacagcagccagcactgtgccccaacacggagcacctggccccaccacacagcccccgctcagcaggtaccacggccctgcagggagccgcacagcccatgggcatgccctagagcagggctcccaggtccctccccacagtggggggctgtggcccacagcagtgctcagcatccggcagaatgcgctgtaccagtcctgccacgaggatgagaacgacgtgcagaccatctcccacaagtgccaggtcgtggcgcgcgagcagtatgagcagatggcccggagccgcaagtgccaggaccggcaggacctctactacctggcgggcacctacgaccccaccaccgggcgcctggtgacggctgatggcgtgcccatcctatgctga

SEQ ID NO: 22240 - DNA, 429 bp, Homo sapiens
  SIMILAR (201)..(1): 1001254mologous to Homo sapiens unnamed protein product,accession number AK023249,Smith-Waterman Score=343.
  misc_feature (1)...(429): n = a,t,c or g
aatattgccatatacaagaatatcattaaacaagaaaaactgccttgctttgggctttttcctgcacaacttagtcaatactccttctccaataagaactcgtccaggtatagttaaaggttgaccagctgctccaaaacagttttccactatacttatacgtctagtatttgcttcactgtttgccaagcgatccaccatctttcactaatagccccgacggccgcgggcggcggcggcggcgacagcgaaggcgaaggtccgatcctcctggtcgcggacgcacgaaatcgtcgacccgggaaatctgaattcgtcgccaagcttctcgagcttaggctagctctagaccacacgtgtggggggccgagctcgcgcccgctgttctgnnnnnnnnnnnnnnnnnnnnngcacaagtcactggccgac

SEQ ID NO: 22241 - DNA, 659 bp, Homo sapiens
  SIMILAR (373)..(534): 661254mologous to Homo sapiens unnamed protein product,accession number AK023249,Smith-Waterman Score=174.
  misc_feature (1)...(659): n = a,t,c or g
gggtgtcttgattagccatccattccttaagtctccctcatctttgatggaatcaatagtgacattttccaggggaataatatgttgtttgttatattttttcttctggatgacaatattgccatatacaagaatatcattaaacaagaaaaactgccttgctttgggctttttcctgcacaacttagtcaatactccttctccaataagaactcgtccaggtatagttaaaggttgaccagctgctccaaaacagttttccactatacttatacgtctagtatttgcttcactgtttgccaagcgatccaccatctttcactaatagccccgacggccgcgggcggcggcggcggcgacagcgaaggcgaaggtccgatcctcctggtcgcggacgcacgaaatcgtcgacccgggttcccgggtccgancgtttcgtttgattccatcaaagatgagggagacttaaggaatggatggctaatcaagacaccaactaaatcttttgcagtttatgctgccactgctacggagatctgaatttgtcgacaagcttctcgagcttaggctagctctagaccacacgtgtggggggccgagctcgcgcccgctgtatctatatagtgtctcctaaatggccgcacaatgcactggctatg

SEQ ID NO: 22242 - DNA, 912 bp, Homo sapiens
  SIMILAR (152)..(826): 271254mologous to Homo sapiens Abl-interactor protein 2b,accession number AF260261,Smith-Waterman Score=117.
atgagcaaggcagggcccatcttcctccccacagtgatctttcaaacccaggatgtcggctgctgcctacccccagcagagctttctggtttgagcggagctgagcttgccaggcctcaagccattctgggcctgtctggggacctggtgaacggactaccccaggagcctaggcatcagcccgaagagaaccctcgaggaaccaacaccctaacttgtgggtcacagaacaaaatgaatcgcctcaccgcgtaccgttgcgaatccattagttcccgcgcgtacaccaactggccccaggacaaacaagcccaaacatctaatcaaacaagggagaggccagcccaggcagccgttgtcgggttcgactggaggggcgggggagtcacctgcgagcggctgcgctggcggccagcccgcccatcgtgtctggatcgcgccggctgcgcggggctgcggacagcacacaccctggaaggccccggcggggaacgggcagagtccgcgccctgcgtccgcgaccaggatgatcggaccttcgccttcgctgtcgccgccggcgccgcccgcggtcgttggggtagctgctcttggcagcagaaacaggtgtatcctttgagatggccccaaggtcacctccaatcccccctcaaggttccaagctcagtgactgctggccaaggcagccagcaggtggccgtggcagagcgggctgtctgcaagcttgaggagcaaggagaggcagtccgagtctcaaaactgaagaacttggagtccaatatagagggcccacccgttaagcgggagcaggtggccaggcgtgccttggcacttgcactcggagaattgagtatcaacaagcagcagggcttcatttctgcttccattgcctgctttaagaagataatgtag

SEQ ID NO: 22243 - DNA, 549 bp, Homo sapiens
  SIMILAR (425)..(475): 761254mologous to Homo sapiens Nascent polypeptide associated complex alpha subunit,accession number X80909,Smith-Waterman Score =65.
  misc_feature (1)...(549): n = a,t,c or g
cctcaagggctctcagcccccgagcagcaagaggatgaggacagcctgaaggaagactcgcntcgggcctggggctcgggccagcattcggatagccacggggagtcatcagccgagctggacgacaaggacatcttggctcctcagaccgtgcagtgtccagcccaggccccagcaggcggcagtgaggagaccatcgccaaagccaagcagagtcgcagtgagaagaaggcccgaaaggcaatgtcaaagctgggcttgcggcagattcagggagtcaccaggatcaccatccagaagtccaagaacatcctctttgtcatcgccaagcctgatgtcttcaagagcccagcctcagacacttatgtggtctttggcgaggccaagattgaggacctgtcccagcaagtgcacaaagccgcagctgagagacaaccacagtgacatcgtcaatgccatcatggaactgaccatgtagccactgaccggaagctggagccatcctacgccttccctcagctctgctactcaataaatcggtgtcccttc

SEQ ID NO: 22244 - DNA, 621 bp, Homo sapiens
  SIMILAR (126)..(605): 321254mologous to Haemonchus contortus collagen 2c,accession number J04670,Smith-Waterman Score=95.
atgacctgattacgccagcttgaacgaggccttgccaagggtcagcccagcacgcccgtggacaggcccctgggccctgacccttctgctcctggtacccttgctggggcagccctacccccactggagcccccagccccctgcctgtgccaggacccccaggaagactctgtggaagacgaggagcccccaggctctctgggcctcccaccgccccaggcaggagtccagcctgccgctgctgctgtctcaggaaccacacagcctctggggactgggccgcgagtcagcctctcgcctcactccccactcctcagccccaaggtggcctccatggatgccaaagacctggccttgcagatcttgccgccttgccaagtgcctcctccctctgggccccagagcccagctggccctcaagggctctcagcccccgagcagcaagaggatgaggacagcctggaggaagactcgcctcgggccctgggctcgggccagcattcggatagccacggggagtcatcagccgagctggacgagcaggacatcttggctcctcagaccgtgcagtgtccagcccaggccccagcaggcggcagtgaggagaccatcgccaaagcc

SEQ ID NO: 22245 - DNA, 2271 bp, Homo sapiens
  SIMILAR (1479)..(2147): 501254mologous to Mus musculus alpha-NAC, muscle-specific form gp220,accession number U48363,Smith-Waterman Score=420.
atgcctggggagctgctcgcgccgagctgctgctgccgaggcggaccgacccgggaccgcacagatctgtcctgcgatgcggccgctgccaccaccatcctgggaggggaccggcgggagccctgtgctctgaccccagggcccagccacctggccctcacgttcctgcccagcaagccgggtgcccggccccagcccgagggagccagctgggatgcagggcctggctctgtccacggaggctcctctcccggccaccctggagccccggattgtgatgggagaggagacgtgccaggccctcctgtcacccagagctgcccggacagcgctcagggaccaggagggctggggcctgtcccgcaggggtccatggtggatgaacgagagctgcacccagcagggaccccagagcccccgtcctctgagtccagcctctctgcagacagcagctcctcctggggccaggagggccacttcttcgacctggacttcctggccaatgacccaatgatccccgcagccctcctacccttccagggcagcctcatctttcaggtggaggcagtggaggtgacaccgctatccccagaggaagaagaagaggaggctgtggcggatcccgacccagactcagcctcctacgcagaggcagatgatgagaggctgtacagcggggagccccatgcccaggccactttgctccaggacagtgtccagaagacagaggaggagagcggaggactccgctatgacaccgcctctgcccctacaagacacagatctctcgtcagccccaaagcctgtagctgcagccacgattgtgccccaggcaggctgaagaggacctcaccttaccccaggactccgctatgacaccgcctctgcccctacaagacacagatctctcatcagccccaaagcctgtggctgcagccacgattgtgtcccagcaggctgaagagggcctcaccttaccccaggactccgctatgacaccgcctctgcccctacaagacacagatctctcgtcagccccaaagcctgtagctgcagccacgcctgtgtcccagcaggctgaagagggcctcaccttaccccaggactccgctatgacagcacctctgcctctgcaagacacaggccccacctcaggtccagagcctctggctgtggccacccctcaaaccttgcaggcagaagcaggctgtgccccagggacagagcctgtggccaccatggctcagcaggaagtaggcctggacgggaagcatgtctggaagcgcgacgacacaggtgatggggctaagcctgactcaccccaaaaggagaccctggaggttgagaaccagcaggaaggaggcctgaaggcacctggcacaggaacatggacccagccccaaggtggcctccatggatgccaaagacctggccttgcagatcttgccgccttgccaagtgcctcctccctctgggccccagagcccagctggccctcaaggctctcagcccccgagcagcaagaggatgaggacagcctggaggaagactcgcctcgggccctgggctcgggccagcattcggatagccacggggagtcatcagccgagctggacgagcaggacatcttggctcctcagaccgtgcagtgtccagcccaggtgcccagtccagggaagagggccccagcaggcggcagtgaggagaccatcgccaaagccaagcagagtcgcagtgagaagaaggcccgaaaggcaatgtcaaagctgggcttgcggcagattcagggagtcaccaggatcaccatccagaagtccaagaacatcctctttgtcatcgccaagcctgatgtcttcaaggagacccagcctcagcacacttatgtggttctttggcgaggccaaacattgaggaccttgtcccagcaagtgcacaaagccgcagctgagaagtttaaggtgccctcagagaccctcagccttggtccctgagtcagcaccccagggcccgggttaggcttgagtgcaaggaaaaggaaaaggagggaggaggaaaaggtggaccaggcggggctggaactgcgtgacatttagctggtgatggcgcaggccaatgtgtccagggccaaggccgtgcggggtcttaggagacaacccacagtgacatcgtcaacgccatcatggaactgaccatgtagccactgaccggaagctggagccatcctacgccttccctcagctctgctactcaataaatcggtgtcccttcaaa

SEQ ID NO: 22246 - DNA, 405 bp, Homo sapiens
  SIMILAR (367)..(200): 251254mologous to Homo sapiens Human secreted protein, SEQ ID NO: 6656,accession number G02575,Smith-Waterman Score=63.
tttcgtcacccacgccggcgggagccgcccgttcgcgctgccagcagcttccgcctgctacggtcctggcaagcacctcgggatcccattccttcacagggaccctagccagttaaagctgatacattcctgtgggtcaactatgcaactaactcagattttgagcaaacaaagctctcaagttggtgatcctcaggagtctctgcattagttggacagctcttctggaattatcttctaagtcaactgtgggttgggtaggtggctctgctgatttttcgctggacttccacatttgggacgagttggctgtcatcagctctagaaagggtgtggccgttttacattggctgttttcctcacattcctcaagcagttgctgaacagaagacttttgagagtcag

SEQ ID NO: 22247 - DNA, 496 bp, Homo sapiens
  SIMILAR (73)..(237): 281254mologous to Homo sapiens Human secreted protein sequence encoded by gene 12 SEQ ID NO:65,accession number B25676,Smith-Waterman Score=67.
ttttaccctaatgctatataagaattgccttatattaagtaaatattcaggaatagagacagccctaagaactgggtcatgtcactagccctcttcagttgcagttcacggatcctccaccttgacaataaccatgattctatccatttctcctcccttgtctgctgctaccaccaactcctcagcacctcctctatacatgcattgcaagctttctcctttctcataactttggtatgctgaagatttatactggccctttctctatgaatcctttcagcttcaacttcagctctgtattgcacatgggaactcttgaaaagacaatctgatcctgtccctctcaggggagaaacttttgggccactgcttttttctcagctatagcaaggaaagcagatagggaaaagaggtgagttggtcactatgtgcagaatatggccaatcagagaagttctgctaaaggagcaagcaggtgtggcagttgctggtcgac

SEQ ID NO: 22248 - DNA, 701 bp, Homo sapiens
  SIMILAR (32)..(145): 421254mologous to Homo sapiens Secreted protein encoded by gene 107 clone HTPCN79,accession number W88640,Smith-Waterman Score =68.
gtcctggcaagcacctcgggatcccattccttcacagggaccctagccaggcaagcgcgcgcctcactgtaccggagagctccaagcacgcgcttggtctggggcccggacgctacatctgggaaggggtgggtggctgggtagataggcgaggaaggatcgtctctaccctctctcaagtagctgaggcctccgaaaccttccctagctggatttggggacagaggagcgctgttaaagctgatacattcctgtgggtcaactatgcaactaactcagattttgagcaaacaaagctctcaagttggtgatcctcaggagtctctgcattagttggacagctcttctggaattatcttctaagtcaactgtgggttgggtaggtggctctgctgatttttcgctggacttccacatttgggaccagttggctgtcatcagctctagaaagggtgtggctgttttacattggctgttttcctcacattcctcaagcaggagggctctgagagatttcatttctgtcctgctgatgaagtctacgttcattcagggcctgctgtggaagaccagccccaaagttgctgaacagaagacttttgagagtcagcagaaatcttccactttgcatggttctcttgatgtgaaatcatctatatagccccagaattggaaaagaaaaaaaataaaaaaatggaagg

SEQ ID NO: 22249 - DNA, 2532 bp, Homo sapiens
  SIMILAR (1600)..(1875): 381254mologous to Xenopus sp. Dr1,accession number AB003582,Smith-Waterman Score=95.
  misc_feature (1)...(2532): n = a,t,c or g
tcacggatcctccaccttgacaataaccatgattctatccatttctcctcccttgtctgctgctaccaccaactcctcagcacctcctctatacatgcattgcaagctttctcctttctcataactttggtatgctgaagatttatactggcctttctctatgaatcctttcagcttcaacttcagctctgcttgaggaatgtgaggaaaacagccaatgtaaaacggccacaccctttctagagctgatgacagccaactcgtcccaaatgtggaagtccagcgaaaaatcagcagagccaccccttcccagatgtagcgtccgggccccagaccaagcgcgtgcttggagctctccggtacagtgaggcgcgcgcttgcctggctagggtccctgtgaaggaatgggatcccgaggtgcttgccaggaccgtagcaggcggaagctgctggcagcgcgaacgggcggctcccgccggcgtgggtgggggaagggcggcagccacacccggaagtcggtccgggagggagggggaaatctgagggaacgaggcttccggtggcgcaaagggtgtcgggagcggcttcctgcaaaccttccctggcatctggagggaccaccgttgccgcgtcttcggcttccacgatctgcgttcgggctacgcggccacggcggcagccactgcgactcccactgtgcctggctctgtccatattagttcccaggcggccgtcgccgttccagcagcggcagcggcagcggcagctggcggacatgttgtgaggcggcggcgcgggtgtctgaaggacggtttggccgaggcggcggcaacggcttgctggcggcggcggcagcggcagcggcagcggggcctcgggctctatagagccagagcccgctgggtacccgcctcggtaccgcggcgaggccagtgcccctggatcttgcctctgctccgacgccgtttgtgaccagtttaggcgacagcgccctgcccctctgaggagacacgaatggtggttccccagccgctcaaatttccggaccaccgcgctttcccctcctcagcctgggctgtgctctctctagaatcctcgggcccccactttccttccaaacttcatcctaaattctctcacacacgccaatgtgtcccagccctcaaggcaagctgttcctccgttcattttctgcaccctcttcgaaaagcaccccccgcgaatcactctccgagggcgacttttttagaaatctcggtggagttagtggaccagagctggggaagtttaaaaagccggggcccgaggaaaccaggaaggtactatggcttcctcgtctggcaacgcagaaggttctaacaatccccagaggttgctatcaataaaaatgatcaaaagagactcttccttaatgttccgggtggcccaacgatgctcgaagaagctgtggtgaactgctggcactgaattcattccaccttatatcttctgaagccaatgagatttgtaacaaatcggaaaagaagaccatctcaccagagcatgtcatacaagcactagaaagtttgggatttggctcttacatcagtgaagtaaaagaagtcttgcaagagtgtaaaacagtagcattaaaaaagaagaaaggccagttctcggtttgggaaacccttgggcattcctgaagaagagtttatttggagaccaggcaaacaaagaattatttggcaaaagcctagaccagcaacaagcagaaattggcccaacaaggaatgggcttcaaatgcagcaagctgccccancaagccccagcttgctgctgcctcagccaagtgcatctaatccaggcggggatctttctcagggatggaagaagatggtggatggatatctgaaattccaccagctgagtttctatttcttctataaatgtttttccctgcacaacaaaaaacagtgaaagaaaatgcttatctgtaattttggtatgcatcttggtggaccttggtcattggtattctagggatgtctgctattaagtttcatctattgtggggctaaacatgtaaaaactgtctctttgaactattgaaaatttaaggttcagtataatatcaattttgaatttttaatggtgtttatgaaattttaggatagcagcgagtccttcgtttgatcaataaacagtgttacaggataacttcaagtttataaaaaatacagtggaaatttctacaaaggctctaaatctggcatttgcatttcctctgcccttttaactaaactaaaacttgtgaattttaaattattaagggggggggggtcctgtgtaaataagtagacattggattgggttggtgaaagagttccagttctgtagtatctggaatttgtcttttaaaatgagtacatatataggcaataaatatatatgctcagatcaatatacttgttagaaacttcaggcatcaaaacctaggaggagtattttaatagtatttgtataaatcggtgggtatgtttttaattagttcc

SEQ ID NO: 22250 - DNA, 2183 bp, Homo sapiens
  SIMILAR (28)..(498): 1001254mologous to Homo sapiens M phase phosphoprotein 10,accession number X98494,Smith-Waterman Score=805.
  misc_feature (1)...(2183): n = a,t,c or g
atggcgccgcaggtctggcgtcgacggaccctggagcggtgtctgacggaagtcggcaaagccacgggtcggcccgagtgcttcctcacgattcaagagggattggcatcaaagttcacttctttaacaaaagtgctttatgactttaataaaatattagagaatggtaggatccatggaagccccttgcaaaaacttgtgatagaaaattttgatgatgagcagatttggcaacaactggaattgcaaaatgaaccaattttacaatactttcagaatgcagttagtgaaacaattaatgatgaagatatcagtcttctcccagagagtgaagaacaggaacgtgaagaggatggttcagagatagaggctgatgacaaggaggacctagaagatttagaggaggaggaagtgtccgacatgggtaatgatgatcctgaaatgggtgagagagctgaaaactcaagcaaatctgatctgaggaaaagccccgttttcatgtgatgaggattctgaccttgactttgatatcagcaaattggaacagcagagcaaggtgcaaaacaaaggacagggaaaaccaagagaaaagtccatagtagatgataaattcttcaaactctctgaaatggatctctatttagaaaacatacataaantgttaagaggaacgaaaagatgataatgatgatgaggaggaggaagatattgatttttttgaagatattgattctgatgaagatgaagggggactgtttggaagtaaaaaacttaagtcaggtaaaagttccagaaatctgaaatacaaagattttttttgatccagttgaaagtgatgaagacataacaaatgttcatgatgatgagctggattcaaacaaagaagatgatgaaattgctgaagaagaagctctattaactaagtatttcggaaacggatgaagatgatgaccttcaagaaaatgaagacaataaacaacataaagaaagcttgaaaagagtgacctttgctttaccagatgatgcggaaactgaagatacaggtgttttaaatgtaaagaaaaattctgatgaagttaaatcctcctttgaaaaaagacagggaaaagatgaatgaaaaaattgcatctttagaaaaagagttgttagaaaaaaagccgtggcaggcttcaggggggaagtgacagcacagaagaggccagagaacagcctcctggaggagaccctacactttgaccatgctgtccggatggcacctgtgattacagaggaaaccacccttcaactggaaggatatcattaaacagaggataagagatcaggcttgggatgatgtagtacgtaaagaaaaacctaaagaggatgcatatgaatataaaaagcgtttaaccttagaccatgagaagagtaaattgagccttgctgaaatttatgaacaggagtacatcaaactcaaccagcaaaaaacagcagaagaagaaaatccagaacatgtagaaattcagaagatgatggattccctcttctttaaaattggatgccctctccaaacttccactttatcccttaaaccggcctggtaccagaggttaaagttgtgtccaaatctggccagccattaaccatggagggaagtagccccagtgagtgttagtgatccagctctcctgggccccagaggagatcaaggagaaaaataaagctggagatataaaaacagctgctgaaaaaacagctacagacaagaaaccgagagcgagggaaaaaggaaatattcaaaagcgtatgaaaataaaagagaaggagaagcgggagaaaaactgcttgaaaagagcagtgtagatcaagcagggaaataccagcaaaaccagtagccttcggagaagttaaaaccagctgaccaaaactgggcaaagcttcctttcataaaaggattgaacggtaaagacaaggccttaaagttcctctcaagcattcttttctaaattacaagatccaagtaaaaatgcaaatcaatgatgcaaagaaaacgagaaaagaaaaagaagaaaagacaggatatttctgttcaataaattaaagctgtaatatattctgaatataatgtaaatattaatgtgtaagcttatattgtgtcattgttctgttttataataaaattcttgagaaccttaaaaaaaaaa

SEQ ID NO: 22251 - DNA, 150 bp, Homo sapiens; identical to SEQ ID NO: 10536
  SIMILAR (1)..(87): 1001254mologous to Homo sapiens 13kDa differentiation- associated protein,accession number AF112208,Smith-Waterman Score= 148.

SEQ ID NO: 22252 - DNA, 610 bp, Homo sapiens
  SIMILAR (361)..(483): 521254mologous to Homo sapiens 13kDa differentiation- associated protein,accession number AF112208,Smith-Waterman Score= 82.
attcggcacgaggggaggggccagcgaggcaagatggagttagtgcagggtcctaaaacgcgggctgcagcagatcaccgggcacggcgggtcttccgaggctatctacgggttttttttcaggacaaatgatgcgaaggttggtacattagtgggggaagacaaatatggaaacaaatactatgaagacaacaagcaattttttggccgtcaccgatgggttgtatatactactgaaatgaatggcaaaaacacattctgggatgtggatggaagcatggtgcctcctgaatggcatcgttggcttcacagtatgactgatgatcctccaacaacaaaaccacttactgctccgtaaatttcatttgggacggaaccattaaatttcaacgtggactggggcaccccaggaacaatatgtaccttattctaccactagaaaagaagattcaggagtggatcccaccttcaacaccttacaagtaaagacaatgaagaacagttgaaacatgcaaaatatggagcttttcatgtaattactcttttactgtttaccattcactataattcacaattaaaattgtgtgactaaacaaaaaaaaaaaaaaaa

SEQ ID NO: 22253 - DNA, 258 bp, Homo sapiens
  SIMILAR (3)..(167): 901254mologous to Homo sapiens Human protein kinase homologue, PKH-3,accession number Y76750,Smith-Waterman Score=246.
tggacatggcagcccaaattgcagaaggcatggcattcattgaagagcggaattatattcatcgtgaccttcgggctgccaacattctggtgtctgacaccctgagctgcaagattgcagactttggcctagcacgcctcattgaggacattcaccatcaagtcagatgtgtggtcttttgggatcctgctgacggaaattgtcacccacggccgcatcccttacccagggatgaccaacccggaggtgattcagaac

SEQ ID NO: 22254 - DNA, 741 bp, Homo sapiens
  SIMILAR (532)..(738): 841254mologous to Homo sapiens put. ptk (135aa),accession number X04476,Smith-Waterman Score=312.
atggaggactttctgctctccaatgggtaccagctgggcaagaccattggggaagggacctactcaaaagtcaaagaagcattttccaaaaaacaccaaagaaaagtggcaattaaagttatagacaagatgggagggccagaagaacgatcattcgatcattccctgctcccgctggcctggaaccaagcaagcccgatggcagctctggagtggcgccctcacaaagccaatgctgaggagatgaccaagtaccacagcgatgactacattaaattcttgcgctccatccgtccagataacatgtcggagtacagcaagcagatgcagagatctgctgccaacccagacaatgcgcccattgttctgcgtctccgggagccagtgtgcaactgcgtgtatctgtttctctctgtgtgtgacttcagctgctggcttcttcccagagccctctcctgctgctgcccaccaatgcagtgctcctgccacccaggcatctcctgggcgtctgatgcacgacttggctgccgttaccctcttattggcaacaatcagaggcctagatttccagggcgaggctaccgcatggtgcgccctgacaactgtccagaggagctgtaccaactcatgaggctgtgctggaaggagcgcccagaggaccggcccacctttgactacctgcgcagtgtgctggaggacttcttcacggccacagagggccagtaccagcctcagccttga

SEQ ID NO: 22255 - DNA, 2320 bp, Homo sapiens
  SIMILAR (284)..(484): 1001254mologous to Homo sapiens PTK homologous protein (AA 1- 507),accession number X05027,Smith-Waterman Score=377.
tttcgtctacgacggcgaagggagctgagactgtccaggcagccaggttaggccaggaggaccgtgtgaatggggccagagggctcccgggctgggcagggaccatgggctgtggctgcagctcacacccggaagatgactggatggaaaacatcgatgtgtgtgagaactgccattatcccatagtcccactggatggcaagggcacgctgctcatccgaaatggctctgaggtgcgggacccactggttacctacgaaggctcccgggctgggcagggaccatgggctgtggctgcagctcacacccggaagatgactggatggaaaacatcgatgtgtgtgagaactgccattatcccatagtcccactggatggcaagggcacgctgctcatccgaaatggctctgaggtgcgggacccactggttacctacgaaggctccaatccgccggcttccccactgcaagacaacctggttatccgctctgcacagctatgagccctctcacgacggagatctgggctttgagaagggggaacagctccgcatcctggagcagagcgttcgagtggtggaaggcgcagtccctgaccacgggccaggaaggcttcatccccttcaattttgtggccaaagcgaacagcctggagcccgaaccctggttcttcaagaacctgagccgcaaggacgcggagcggcagctcctggcgcccgggaacactcacggctccttcctcatccgggagagcgagagcaccgcgggatcgttttcactgtcggtccgggacttcgaccagaaccagggagaggtggtgaaacattacaagatccgtaatctggacaacggtggcttctacatctcccctcgaatcacttttcccggcctgcatgaactggcctccgccattacaccaatcgcttcagatgggctgtgcacacgggttgagccgcccctgccagacccagaagccccagaagccccagaagccgtggtgggaggacgagtgggaggttcccagggagacgctgaagctggtggagcggctgggggctggacagttcggggaggtgtggatggggtactacaacgggcacaacgaaggtggcggtgaagagcctgaagcagggcagcatgtccgccggacgccttcctggccgaggccaacctcatgaagcagctgcaacaaccagcggcttggttcggctctacgctgtggtcaccccaggagcccatctacatcatcactgaatacatggagaatgggagtctagtggattttctcaagaccccttcaggcatcaagttgaccatcaacaaactcctggacatggcagcccaaattgcagaaggcatggcattcattgaagagcggaattatattcatcgtgaccttcgggctgccaacattctggtgtctgacaccctgagctgcaagattgcagactttggcctagcacgcctcattgaggacaacgagtacacagccagggagggggccaagtttcccattaagtggacagcgccagaagccatttaatctaggggaaattcaccaccaaggtcggatgtgtggtcctttgtgagacctgctgccggaaatttttaccccacggccgcatcccttaccccagggaatacccaacccggagttgattcagaaactggagcgaggctaccgcatggtgcgcccttactaactgtccagagaagctttaccaactcattgaggctgtgctggaaggagcgcccagaggacccggcccacctttgactacctgcgcagtgtgctggaggacttcttcaaacgccacaggagggccagtaaccagcctcaagccttgagagaacccctgaggaagcccctttgtttctccccctttcctctccagccctgaactggggagagtcgagttcctgtgccatagtcaacatggcctatgcaccatatggactcttgcacatgaatcccaaccaacagtgtgaaaaatatgcaccttgtgtctgtacacggtgtcctgtagttgcgtggactctggcacatgtcttgtacatgtgtagcctgtgcatgtatgtcttggacacttgtacaaggtacccctttctggctctcccatttccttgaggaccacagagagaggggagaagcctgggattgacagaagcttctgcccacctacttttctttcctcagatcatccagaagttcctcaagggccaggactttatctaataccttctgtgtgctcctccttggtgcctggcctggcacacatcaggagttcaataaatgtctgttgatgactgttgtaaaaaat

SEQ ID NO: 22256 - DNA, 384 bp, Homo sapiens
  SIMILAR (3)..(200): 981254mologous to Mus musculus type I inosine monophosphate dehydrogenase,accession number U00978,Smith-Waterman Score=337.
aggacaaaggatccattcagaagttcgtgccctacctcatagcaggcatccaacacggctgccaggatatcggggcccgcagcctgtctgtccttcggtccatgatgtactcaggagagctcaagtttgagaagcggaccatgtcggcccagattgagggtggtgtccatggcctgcactcttacgaaaagcggctgtactgaggacagcggtggaggccgaggtggtggaggggatgcaccccagtgtccacttttgggcacagcctccctcccttctcctcagctgcagtcgaaggctttaactttgcacacttgggatcacagttgcgtcattgtgtattaaatacttggaataaatcaagcaggtctcaacgcctccact

SEQ ID NO: 22257 - DNA, 467 bp, Homo sapiens
  SIMILAR (38)..(466): 821254mologous to Homo sapiens IMP dehydrogenase type 1 (EC 1.1.1.205),accession number J05272,Smith-Waterman Score=631.
acacagtaacaatctgatctctctttcttttccccacaccgtgcagcagctcttcgccagtgaccagggactcacctacaacgacttcttgattctcccaggattcatagacttcatagctgatgagacgccgctgatctcctcccccatggacactgtgacagaggccgacctggccatcgtgatggctctgatgggaggtactggtttcattcaccacaactgcaccccagagttccaggccagtgaggtgcagaaggtcaagaagtttgaaccgggctttatcacacaccccgtggtgctgagccccttgcacactgtgggtgatgtgttggaggccaagatgcgtcatggcttctctggcatccccatcactgagacgggtaccatgggcagcaagctggtgggcatcgtcacctcccgagacatcgactttcttgctgagaaggaccacaccaccctcctca

SEQ ID NO: 22258 - DNA, 468 bp, Homo sapiens
  SIMILAR (4)..(360): 731254mologous to Homo sapiens inosine-5'-monophosphate dehydrogenase (EC 1.1.1.205),accession number J04208,Smith-Waterman Score=462.
atggtcactctgaagacgccgctgatctcctcccccatggacactgtgacagaggccgacctggccatcgtgatggctctgatgggaggtactggtttcattcaccacaactgcaccccagagttccaggccagtgaggtgcagaaggtcaagaagtttgaaccgggctttatcacacaccccgtggtgctgagccccttgcacactgtgggtgatgtgttggaggccaagatgcgtcatggcttctctggcatccccatcactgagacgggtaccatgggcagcaagctggtgggcatcgtcacctcccgagacatcgactttcttgctgagaaggaccacaccaccctcctcagtgagaaccgagactaccctgtggcctccaaggattcccatgagcagctgctgggcggggcagctgtgggtacccatgaggatgacaaataccacctggacctgctcacccag

SEQ ID NO: 22259 - DNA, 648 bp, Homo sapiens
  SIMILAR (238)..(645): 761254mologous to Cricetulus griseus inosine-5'-monophosphate dehydrogenase,accession number J04209,Smith-Waterman Score=537.
gccgacatagccattgcaatggctctgatgggaggtattggtttcattcaccacaactgcaccccagagttccaggccaaggaggtgcggaaggtcaagaagtttgaacagggcttcatcacggacccggtggtgctgaccccctcgcacactgtgggtgatgtgttggaggccaagatgcggcatggcttctctggcatccccatcactgagacgggcaccataggcagcaagctgaagaacagagactaccctctggcctccaaggattcccacaagcagctactgcgtggggcagctgtgggcacccctgaggatgacaaataccgcctggacttgctcacccaggcgggggtagacgtcgtagtcttggacttgtcccaagggaactcggtgtatcagattgccacggtgcattacatcaaacagaagtacccccacctccaggtgattgggatgacagccgcccaggccaaaaacctgattgacgctgcggtggacgggctgcgcataggtatgggctgcggctccatctgcatcacccaggaagtgatggcctgcggtgggccccagggcactgcattgtacaaggtggccgagtatgccctgtgctttggtgtgtccatcatagccgatggcggcatctag

SEQ ID NO: 22260 - DNA, 3387 bp, Homo sapiens
  SIMILAR (1088)..(1471): 1001254mologous to Homo sapiens IMP dehydrogenase type 1 (EC 1.1.1.205),accession number J05272,Smith-Waterman Score=658.
ttaaactgggtagcctataccaatgtaaggcaatgttgaggagtagatgcggcctctttcctcaaagagagatccagaaaggcttctgaaaacccaagacacttgaagaccattgtcctctagcagtctgaacaccatggagaggcccacagctgtgaagacagaaagggatggccccggttctaccagggccccattccagtgaatgaaggcaaagagcctgcacccacaaccaccctgaggaccgaggggtggaaacaggagcacagggaattcctctccaggtattggctcctggcctccaccaatcatcgttgtctgactgtggaaaacctgcttaagcttcctgagcttcagtttccttgccattatactcccagcatctagttggcacatgagaggtgcccaataaacatttgttgaatggctgagacgcaaggagaagccctgcctctggagtccagctcctttcctcttctggttttcctcggaaggggccaggagacactggaaggtccggacggcagggaaggggacggggttctttccagtcccacccgtgtagggacacctctccccctcatcccccgatgtaccctcgctgaatctgggatgggagagacgaaccgagtctaggcatctgcgtagcagcgccggggagagcggggagcccaggcggagcccagtcgactcccggattcccctgccccgcccccggcacgaggccccgccccggcgccccgcccctcctcgggactcgaccgggctgcgctcactgcccagccggggccccgggagcctccaggctcgcccgccctgagctgcggcctccgcatggagggccactcactccaccaccgctgcagggaggcggacggcgctgttccggagcccggagcccggcaacacccgggacacgagacggcggcgcagggctacagcgcccgactgctgcaggccggctacgagcccgagagccctagattggacctcgctacacacccgacgacaccccgttcagaactatcttcagtggtcttactggcaggtgttggtgtccagatggatcgccttcgcagggctagccatggcggactacctgatcagcggcggcaccggctacgtgcccgaggatgggctcaccgcgcagcagctcttcgccagcgccgacgacctcacctacaacgacttcctgattctcccaggattcatagacttcatagctgatgaggtggacctgacctcagccctgacccggaagatcacgctgaagacgccactcatctcctcccccatggacactgtgacagaggctgacatggccattgccatggctctgatgggaggtattgggttcattcaccacaactgcaccccagagttccaggccaatgaagtacgcaaggtcaagaactttgaacagggcttcatcacggaccctgtggtgctgagcccctcgcacactgtggggcgatgtgctggagggcaagatgcggcatggcttctctgggcatccccatcactgagaccggcaccatgggcagcaagctggtgggcatcgtcacctcccgagacatcgactttcttgctgagaaggaccacaccaccctcctcagtgaggtgatgacgccaaggattgaactggtggtggctccagcaggtgtgacgttgaaagaggcaaatgagatcctgcagcgtagcaagaaagggaagctgcctatcgtcaatgattgcgatgagctggtggccatcatcgcccgcaccgacctgaagaagagccgagactaccctctggcctccaaggattcccagccgcagctcctctgtggggcagctgtggacacccgtgaggaagacaaataccgtctggacctgctcacccaggcgggcgtcgacgtcatagtcttggactcgtcccaagggaattcggtgtatcagtaccgccagggtgctttacttcaaacagaagtacccccacctccaggtgtatgggggggaacgtggtgacagcagcccaggccaagaacctgattgatgctggtgtggacgggctgcgcgtgggcatgggctgcggctccatctgcatcacccagggaagtgatggcctgtggtcggccccagggcacttgctgtgttacaaggtaggctgagtatgcccggcgctttggtgtgcccatcatagccgatggcggcatccagaccgtgggacacgtggtcaaggccctggcccttggagcctccacagtgatgatgggctccctgctggccgccactacggaggcccctggcgagtacttcttctcagacggggtgcggctcaagaagtaccggggcatgggctcactggatgccatggagaagagcagcagcagccagaaacgatacttcagcgagggggataaagtgaagatcgcgcagggtgtctcgggctccatccaggacaaaggatccattcagaagttcgtgccctacctcatagcaggcatccaacacggctgccaggatatcggggcccgcagcctgtctgtccttcggtccatgatgtactcaggagagctcaagtttgagaagcggaccatgtcgccccagattgagggtggtgtccatggcctgcactcttacgaaaagcggctgtactgaggacagcggtggaggccgaggtggtggaggggatgcaccccagtgtccacttttgggcacagcctccctccataactgagtggtccacagatttgcactacgggttctccagctcctttccaggcagagaggaggggaggtcctgaggggactgctgcccctcactcgggcatcccctgcagagtcaggactgctcccgggggccaggctgccctgggagccccccccttcgagccaagccagcaaggctctcaggccctgcgcctgtcctcaggtctttcttgctgcagctctgctccagtctggcccccaccccaggggcaggcggcactgttctggcttctcctcgtagggcacctccctgcccctagcctcccgaggaaatggtgctctccttggccctgccttctcgcccttcccgggccgctgcccctcaagccatgtggcactttttgagctcctgacctaggccaaggggaggtctctgcccccttccccggccctggggctacccttgggtcctgctcctcaaggccgctcccctgtccctggccatgggtaggagactgccctggtcatggccgcctgcctgtcattcctgactcaccaccgtccccaggtgaaccattcctcccttctcctcagctgcagtcgaaggctttaactttgcacacttgggatcacagttgcgtcattgtgtattaaatacttggaataaatcaagcaggtctcaacgcctccactaaa

SEQ ID NO: 22261 - DNA, 517 bp, Homo sapiens
  SIMILAR (20)..(307): 961254mologous to Homo sapiens alpha-catenin,accession number D13866,Smith-Waterman Score=469.
ccatttgatgacttctgggctgtctcagaatcacattttggaagatgtgaacaaatgtgtcattgctctccaagagaaggatgtggatggcctggaccgccaagctggtgcaattcgaggccgggcagcccgggtcattcacgtagtcacctcagagatggacaactatgagccaggagtctacacagagaaggttctggaagccactaagctgctctccaacacagtcatgccacgttttactgagcaagtagaagcagccgtggaagccctcagctcggaccctgcccagcccatggatgagaatatcagtcactgttcgtcactcaaatgaatttgctaaatacaacactgatactagattccacagggaaatgggcagactgaaccagtccaggtggtgaattttccaagaacatagtttaagttgattaaaaatgcttttagaatgcaggagcctacttctagctgtattttttgtatgcttaaataaaaataaaaattcataaccaaagag

SEQ ID NO: 22262 - DNA, 608 bp, Homo sapiens
  SIMILAR (291)..(608): 761254mologous to Homo sapiens cadherin-associated protein- related,accession number M94151,Smith-Waterman Score=398.
aaatgactgctgtccacgcaggccacttaaacttgaagtgggaccccaaaagtctagagatcaggactctggcagctgagagacttgttacacaggttacaaccctggtaaacaccaatagtaaggggccctctgataagaagagaggtcattctaagaaggtccatgttttggctgcatctgttgaacaagcagctgagaatttcttggagaaggaggataaaattgtgaaggagagccagttttctctaggaatagcttttggctgctgtagaatacgttcgaaaacaagcaaggagtgcttgaggccttccctggaggagcacctggaaggcatcattagcggagctgccttgatgggcgactcgtcctgcaagcatgatgaccatcgtgagcgaattgcggcagagtgtaacactgtcctccaggtcctgcaggacctgcttttggagtacatgggcaatgctggatgtaaagaaagaagtaattccctcaattctgctatagataaaatgaccaagaagaccagggacttgcgtagacagctccacaaagctgtcatggaccacgtttcagattctttcctggaaaccaatgttccacttttg

SEQ ID NO: 22263 - DNA, 3592 bp, Homo sapiens
  SIMILAR (71)..(2863): 991254mologous to Homo sapiens alpha2(E)-catenin,accession number U03100,Smith-Waterman Score=4647.
gctatctcgccagcagcgcccgtctgcttcgggcctctggaatttagctctttcccagctagccgcagaaatgactgctgtgcatgcaggcaacataaacttcaagtgggatcctaaaagtctagagatcaggactctggcagttgagagactgttggagcctcttgttacacaggttacaacccttgtaaacaccaatagtaaagggccctctaataagaagagaggtcgttctaagaaggcccatgttttggctgcatctgttgaacaagcaactgagaatttcttggagaagggggataaaattgcgaaggagagccagtttctcaaggaggagcttgtggctgctgtagaagatgttcgaaaacaaggtgatttgatgaaagctgctgcaagagagttcgcaaaagaaccctgctcttttgtgaaacgaagcaacatggttcgggcagctccagctttgctctctgctgttacccggttgctcattttggctgacatggcagatgtctacaaattacttgttcagctgaaagttgtggaagatggtatattgaaactgaggaatgctggcaatgaacaagacttagggaatcagtataaagccctaaaacctgaagtggataagctgaacattatggcagcaaaaagacaacaggaattgaaagatgttgggcatcgtgatcagatggctgcggctagaggaatcctgcagagcaacgttccgatcctctatactgcatcccaggcatgcctacagcaccctgatgtcgcagcctataaggccaacagggacctgatatacaagcagctgcagcaggcggtcacagggatttccaatgcagcccaggccactgcctcagacgatgcctcacagcaccagggtggaggaggaggagaactggcatatgcactcaataactttgacaaacaaatcattgtggaccccttgagcttcagcgaggagcgctttaggccttccctggaggagcgtctggaaagcatcattagtggggctgccttgatggccgactcgtcctgcacgcgtgatgaccgtcgtgagcgaattgtggcagagtgtaatgctgtccgccaggcctgcaggacctgcgtttcggagtacatgggcaatgctggacgtaaagaaagaagtgatgcactcaattctgcaatagataaaatgaccaagaagaccagggacttgcgtagacagcttcgcaaagctgtcatggaccacgtttcagattctttcctggaaaccaatgttccacttttggtattgattgaagctgcaaagaatggaaatgagaaagaagttaaggaatatgcccaagttttccgtgaacatgccaacaaattgattgaggttgccaacttggcctgttccatctcaaataatgaagaaggtgtaaagcttgttcgaatgtctgcaagccagttagaagccggttgtcctcaggttattaatgctgcaacctgggctttagcaccaaaaccacagagtaaactggcccaagagaacatggatctttttaaagaacaatgggaaaaacaagtccgtgttctcacagatgctgtcgatgacattacttccattgatgacttcttggctgtctcagagaatcacattttggaagatgtgaacaaatgtgtcattgctctccaagagaaggatgtggatggcctggaccgcacagctggtgcaattcgaggccgggcagcccgggtcattcacgtagtcacctcagagatggacaactatgagccaggagtctacacagagaaggttctggaagccactaagctgctctccaacacagtcatgccacgttttactgagcaagtagaagcagccgtggaagccctcagctcggaccctgcccagcccatggatgagaatgagtttatcgatgcttcccgcctggtatatgatggcatccgggacatcaggaaagcagtgctgatgataaggacccctgaggagttggatgactctgactttgagacagaggattttgatgtcagaagcgagacgagcgtccagacagaagacgatcagctgatagctggccagagtgcccgggcgatcatggctcagcttccccaggagcaaaaagcgaagattcgggaacaggtggccagcttccaggaagaaaagagcaagctggatgctgaagtgtccaaatgggacgacagtggcaatgacatcattgtgctggccaagcagatgtgcatgattatgatggagatgacagactttacccgaggtaaaggaccactcaaaaatacatcggatgtcatcagtgctgccaagaaaattgctgaggcaggatccaggatggacaagcttggccggaccattcgagaccattgccccgactcggcttgcaagcaggacctgctggcctacctgcaacgcatcgccctctactgccaccagctgaacatctgcagcaaggtcaaggccgaggtgcagaatctcggcggggagcttgttgtctctgggaactgtgacacctgcggggcactgcaagggctgaaaggctggcctcctcccctttgcctggccactcactgggtggacagcgccatgtccctgatccaggcagccaagaacttgatgaatgctgtggtgcagacagtgaaggcatcctacgtcgcctctaccaaataccaaaagtcacagggtatggcttccctcaaccttcctgctgtgtcaatgaagatgaaggcaccagagaaaaagccattggtgaagagagagaaacaggatgagacacagaccaagattaaacgggcatctcagaagaagcacgtgaacccagtgcaggccctcagcgagttcaaagctatggacagcatctaagtctgcccaggccggccgcccccacccctctggctcctgaatatcagtcactgttcgtcactcaaatgaatttgctaaatacaacactgatactagattccacagggaaatgggcagactgaaccagtccaggtggtgaattttccaagaacatagtttaagttgattaaaaatgcttttagaatgcaggagcctacttctagctgtattttttgtatgcttaaataaaataaaattcataaccaagagatccacattagcttgttagtaatgctctgaccaagccgagatgccattctcttagtgatggcggcgttaggtttgagagaaggaattggctcaacttcagttgagagggtgcagtccagacagcttgactgcttttaaatgaccaaagatgacctgtggtaagcaacctggcatcttaggaagcagtccttgagaaggcatgttccagaaaggtctctgaggacaaactcactcagtaaaacataatgtatcatgaagaaaactgattctctatgacatgaaatgaaaattttaatgcattgttataattactaatgtacgctgctgcaggacattaataaagttgcttttttaggctacagtgtctcgatgccataatcagaacacactttttttcctctttctcccagcttcaaatgcacaattcatcattgggctcacttctaataactgcagtgtttccgccttgcgttgcag

SEQ ID NO: 22264 - DNA, 3932 bp, Homo sapiens
  SIMILAR (1348)..(1878): 561254mologous to Homo sapiens alpha2(E)-catenin,accession number U03100,Smith-Waterman Score=409.
  misc_feature (1)...(3932): n = a,t,c or g
gtcctcctcctagccggactggagggagacaaagcagcgcccgtctgcttcgggcctctggaatttagcgctcgcccagctagccgcagaaatgactgctgtccacgcaggccacttaaacttgaagtgggaccccaaaagtctagagatcaggactgctggcagttgagagactgttggagcctcttgttacacaggttacaaccctggtaaacaccaatagtaaggggccctctgataagaagagaggtcattctaagaaggtccatgttttggctgcatctgttgaacaagcagctgagaatttcttggagaaggaggataaaattgtgaaggagagccagttttctctaggaatagcttttggctgctgtagaagatgttcgaaaacaaggtgatttgatgaaggctgctgcacggagacgttcgcacgatgatccctgttcttctgtggagcaaggcaacatggttcaggcagcttgaactttgctctctgctgttacctgcttgctgattttggctgaacatgggaaatgtctacaaattacttgttcagctgaaagttgtggaagatggtatcttgaagttgaggaatgctggcaatgaacaagacttaggaatccagtataaagccctaaaacctgaagtggataagctgaacattatggcagccaaaagacaacaggaattgaaagatgttggccatcgtgatcagatggctgcagctagaggaatcctgcagaagaacgttccgatcctctatactgcatcccagggcatgcctacagcaccctgattgtcgcagcctataaggcccaacagggacctgatatacaagcagctgcagcaggcggtcacaggcatttccaatgcagcccaggccactgcctcagacgatgcctcacagcaccagggtggaggaggaggagaactggcatatgcactcaataactttgacaaacaaatcattgcggaccccctgagctccagacgaggagacgctgtaggccttccctggaggagcgtctggaaagcatcattagtggggctgccttgatggccgactcgtcctgcacgcgtgatgaccgtcgtgagcgaattgtggcagagtgtaatgctgtccgccaggccctgcaggacctgcgtttcggagtacatgggcaatgctgcacgtacagaaagatgtgatgcgctcaattttgctatatataaaacgaccacgaagaccacggacttgctgtacacagctccgcaaagctgtcatggaccacgtttcaagattctttcctgggaaaccaatgttccacttttgggtattgattgaagctgcaaagaatggaaatgagaaagaagttaaggagtatgcccaagttttcccgtgaacatgccaacaaattgattgaggttgccaacttggcctgttccatctcaaataatgaagaaggtgtaaagcttgttcgaatgtctgcaagccagttagaagccggttgtcctcaggttattaatgctgcaacctgggctttagcagcaaaaccacagagtaaactggcccaagagaacatggatcttttaaaagaaccaatgggaaaaacaagtccgtgttctcacagatgctgtcgatgacattacttcccattgatgacttcttggctgtctcagagaatcacattttggaagatgtgaacaaatgtgtcattgctctcccaagagaaggatgtggatggcctggaaccgcacagctggtgcaattccgaggccgggcagcccgggtcattcacgtagtcacctcagaggatggacactatgagaccaggagtctacacagagaaggttctggaagccactaagctgctctccaacacagtcattgccacgttttactgagcaagtagaagcagccgtggaagccctcagctcggaccctgcccagcccatggatgagaatgagtttatcgatgcttcccgcctggtatatgatggcatccgggacatcaggaaagcagtgctgatgataaggacccctgaggagttggatgactcttgactttgagacagaagattttgatgttcagaagcaggacgagcgtccagacagaagacgatcagctgatagctgggccagagttgcccgggcgttcatgggttcagtttccccagggggcaaaaagcgaagattgcggaacaggtggccagcttccaggaagaaaagagcaagctggatgctgaagtgtccaaatgggacgacagtggcaatgacatcattgtgctggccaagcagatgtgcatgattatgatgggagatgacagactttacccgaggtaaagggaccactcaaaaatacatcagatgtcatcagtgcttgncaaagaaaattgcttgaaggcaggatccaggatggacaagcttggctgcaccatcacagaccactgccccgactcggcctgcaagcaagcccggcctgctcgactcagcctgccctgacttggcctgctggcctacctgcaacgcatcgccctctactgccacccagctgaacatctgcagcaaggtcaaggccgaggtgcagaatctcggcggggagcttgttgtctctggggtggacagcgccattgtccctgatctgggcaaccaaagaacttgatgaaatgctgtggtgcagacagtgaaggcatcctacgtcgcctctaccaaataccaaaagtcacagggtatggctttccctcaaccttcctgctgtgtcatggaagatgaagcccacccgggaataagcccattgttgaggagagagaaaacgggatgagacaacagaccaagattatacgggccttcttcggaagagggcacgtgaaccccgttgcaggcccctcagcgagttcaaagctatgaccggcttctaagtcctgcccaggccgggccgcccccaccccctcgggggctccctgaatatcagtccttgttggtcactcaaaagaatttggctaaatcaaccactgatatttagattccacagggaaatgggcagactggaaccagtccagggtggtgaattttcccaagaacattagtttaaagttgattaaaaatgcttttagaatgcggggagcctacttcctagctgtattttttgtatgccttaaaataaaaataaaaattccattaacccaaagagaatccccacattaagccttgttaagtaaatgcctcctgaccccaagcccgaagatgccccccattcctcctaagtgaatggccggccgttaagggtttgaagaagaaagggaatttggcctcaaccttcagttgaagagggtgcagtcccagacagccttgaactgccttttaaatgacccaaagatgaccctgtggtaaagcaaccctgggcatccttaggaagccagtccctggagaaaggcatgttccccagaaaaggtctctggagggacaaactcactccagtaaaaacataatgtatcatcatgaagaaaactgattcttctatgacatgaaatgaaaattttaagtgcattggttataattacataaatgtaccgctgctgcaggacattaataaagttgcttttttaggctacagtgtctcgatgccataatcagaacacactttttttcctctttctcccagcttcaaatgcacaattcattaattgggttcacttctaataactgcagtgtttcccgccttgggcttgcagcagaaaaacctgacaacatagtgtttgctaaggcagtaatttagactttaccttatttgtgattactgtagtgattgattgattgattactattaactacaaggtataatttactatcaccttatttaaattttatgaattaatttgaatgtttttttacactaactaacttttcccaataaagtccactatgaaaccacgacaaaaaaaaaaaaaaaaaa

SEQ ID NO: 22265 - DNA, 1587 bp, Homo sapiens
  SIMILAR (526)..(1536): 971254mologous to Homo sapiens fibronectin,accession number M10905,Smith-Waterman Score=1800.
atgacaatctcgacagctattcctgcaccaactgacctgaagttcactcaggtcacacccacaagcctgagcgcccagtggacaccacccaatgttcagctcactggatatcgagtgcgggtgacccccaaggagaagaccggaccaatgaaagaaatcaaccttgctcctgacagctcatccgtggttgtatcaggacttatggtggccaccaaatatgaagtgagtgtctatgctcttaaggacactttgacaagcagaccagctcagggagttgtcaccactctggagaatgtcagcccaccaagaagggctcgtgtgacagatgctactgagaccaccatcaccattagctggagaaccaagactgagacgatcactggcttccaagttgatgccgttccagccaatggccagactccaatccagagaaccatcaagccagatgtcagaagctacaccatcacaggtttacaaccaggcactgactacaagatctacctgtacaccttgaatgacaatgctcggagctcccctgtggtcatcgacgcctccactggcctggaaccgggaaccgaatatacaatttatgtcattgccctgaagaataatcagaagagcgagcccctgattggaaggaaaaagacagacgagcttccccaactggtaacccttccacaccccaatcttcatggaccagagatcttggatgttccttccacagttcaaaagacccctttcgtcacccaccctgggtatgacactggaaatggtattcagcttcctggcacttctggtcagcaacccagtgttgggcaacaaatgatctttgaggaacatggttttaggcggaccacaccgcccacaacggccacccccataaggcataggccaagaccatacccgccgaatgtaggtgaggaaatccaaattggtcacatccccagggaagatgtagactatcacctgtacccacacggtccgggactcaatccaaatgcctctacaggacaagaagctctctctcagacaaccatctcatgggccccattccaggacacttctgagtacatcatttcatgtcatcctgttggcactgatgaagaacccttacagttcagggttcctggaacttctaccagtgccactctgacaggcctcaccagaggtgccacctacaacgtcatagtggaggcactgaaagaccagcagaggcataaggttcgggaagaggttgttaccgtgggcaactctgtcaacgaaggcttgaaccaacctacggatgactcgtgctttgacccctacacagtttcccattatgccgttggagatgagtgggaacgaatgtctgaatcaggctttaaactgttgtgccagtgcttaggctttggaagtggtcatttcagatgtgattcatctagatggtgccatgacaatggtgtgaactacaagattggagagaagtgggaccgtcagggagaaaatggccagatgatgagctgcacatgtcttgggaacggaaaaggagaattcgaattcacaagaaactctgggctagggagttccatttgggagtcactcatttga

SEQ ID NO: 22266 - DNA, 3522 bp, Homo sapiens
  SIMILAR (139)..(3114): 901254mologous to Homo sapiens Human fibronectin,accession number W99595,Smith-Waterman Score=4893.
atgcttaggggtccggggcccgggctgctgctgctggccgtccagtgcctggggacagcggtgccctccacgggagcctcgaagagcaagaggcaggctcagcaaatggttcagccccagtccccggtggctgtcagtcaaagcaagcccggttgttatgacaatggaaaacactatcagataaatcaacagtgggagcggacctacctaggcaatgcgttggtttgtacttgttatggaggaagccgaggttttaactgcgagagtaaacctgaagctgaagagacttgctttgacaagtacactgggaacacttaccgagtgggtgacacttatgagcgtcctaaagactccatgatctgggactgtacctgcatcggggctgggcgagggagaataagctgtaccatcgcaaaccgctgccatgaagggggtcagtcctacaagattggtgacacctggaggagaccacatgagactggtggttacatgttagagtgtgtgtgtcttggtaatggaaaaggagaatggacctgcaagcccatagatagatgcaacgatcaggacacaaggacatcctatagaattggagacacctggagcaagaaggataatcgaggaaacctgctccagtgcatctgcacaggcaacggccgaggagagtggaagtgtgagaggcacacctctgtgcagaccacatcgagcggatctggccccttcaccgatgttcgtgcagctgtttaccaaccgcagcctcacccccagcctcctccctatggccactgtgtcacagacagtggtgtggtctactctgtggggatgcagtggctgaagacacaaggaaataagcaaatgctttgcacgtgcctgggcaacggagtcagctgccaagagacagctgtaacccagacttacggtggcaactcaaatggagagccatgtgtcttaccattcacctacaatggcaggacgttctactcctgcaccacagaagggcgacaggacggacatctttggtgcagcacaacttcgaattatgagcaggaccagaaatactctttctgcacagaccacactgttttggttcagactcgaggaggaaattccaatggtgccttgtgccacttccccttcctatacaacaaccacaattacactgattgcacttctgagggcagaagagacaacatgaagtggtgtgggaccacacagaactatgatgccgaccagaagtttgggttctgccccatggctgcccacgaggaaatctgcacaaccaatgaaggggtcatgtaccgcattggagatcagtgggataagcagcatgacatgggtcacatgatgaggtgcacgtgtgttgggaatggtcgtggggaatggacatgcattgcctactcgcagcttcgagatcagtgcattgttgatgacatcacttacaatgtgaacgacacattccacaagcgtcatgaagaggggcacatgctgaactgtacatgcttcggtcagggtcggggcaggtggaagtgtgatcccgtcgaccaatgccaggattcagagactgggacgttttatcaaattggagattcatgggagaagtatgtgcatggtgtcagataccagtgctactgctatggccgtggcattggggagtggcattgccaacctttacagacctatccaagctcaagtggtcctgtcgaagtatttatcactgagactccgagtcagcccaactcccaccccatccagtggaatgcaccacagccatctcacatttccaagtacattctcaggtggagacctaaaaattctgtaggccgttggaaggaagctaccataccaggccacttaaactcctacaccatcaaaggcctgaagcctggtgtggtatacgagggccagctcatcagcatccagcagtacggccaccaagaagtgactcgctttgacttcaccaccaccagcaccagcacacctgtgaccagcaacaccgtgacaggagagacgactcccttttctcctcttgtggccacttctgaatctgtgaccgaaatcacagccagtagctttgtggtctcctgggtctcagcttccgacaccgtgtcgggattccgggtggaatatgagctgagtgaggagggagatgagccacagtacctggatcttccaagcacagccacttctgtgaacatccctgacctgcttcctggccgaaaatacattgtaaatgtctatcagatatctgaggatggggagcagagtttgatcctgtctacttcacaaacaacagcgcctgatgcccctcctgacacgactgtggaccaagttgatgacacctcaattgttgttcgctggagcagaccccaggctcccatcacagggtacagaatagtctattcgccatcagtagaaggtagcagcacagaactcaaccttcctgaaactgcaaactccgtcaccctcagtgacttgcaacctggtgttcagtataacatcactatctatgctgtggaagaaaatcaagaaagtacacctgttgtcattcaacaagaaaccactggcaccccacgctcagatacagtgccctctcccagggacctgcagtttgtggaagtgacagacgtgaaggtcaccatcatgtggacaccgcctgagagtgcagtgaccggctaccgtgtggatgtgatccccgtcaacctgcctggcgagcacgggcagaggctgcccatcagcaggaacacctttgcagaagtcaccgggctgtcccctggggtcacctattacttcaaagtctttgcagtgagccatgggagggagagcaagcctctgactgctcaacagacaaccaaactggatgctcccactaacctccagtttgtcaatgaaactgattctactgtcctggtgagatggactccacctcgggcccagataacaggataccgactgaccgtgggccttacccgaagaggacagcccaggcagtacaatgtgggtccctctgtctccaagtacccactgaggaatctgcagcctgcatctgagtacaccgtatccctcgtggccataaagggcaaccaagagagccccaaagccactggagtctttaccacacgccatcattccccaagaaaaatgtcaggcatgaacaccccatggaggactctccacatgcacaggtgctccttatcccatccagggttcattacccacagtgagcggctgtgtgtgcccaaaatccactgtgagtggctgtacgtgctcatcacccactatgagtgtacttgtccattacccactatgagtggctgtgcgtgtccgtcacctgccgtgggtggctgcgcgtctgtcacctgccgtgggtggctgtgcatgtatgtcacccgccgtgggtggctgtgcgtgtccgtcacctgccgtgggtggctgtgcgtgtctgtcgcctgccatgggtggctgtgcatgttttgtcctcatcatcatcttgggcttcagcactttgctctgggccacggtggctga

SEQ ID NO: 22267 - DNA, 674 bp, Homo sapiens
  SIMILAR (3)..(266): 1001254mologous to Homo sapiens Cathepsin D fragment of fibronectin Fn 585-1578,accession number R08039,Smith-Waterman Score=455.
aactggatgctcccactaacctccagtttgtcaatgaaactgattctactgtcctggtgagatggactccacctcgggcccagataacaggataccgactgaccgtgggccttacccgaagaggacagcccaggcagtacaatgtgggtccctctgtctccaagtacccactgaggaatctgcagcctgcatctgagtacaccgtatccctcgtggccataaagggcaaccaagagagccccaaagccactggagtctttaccacacgccatcattccccaagaaaaatgtcaggcatgaacaccccatggaggactctccacatgcacaggtgctccttatcccatccagggttcattacccacagtgagcggctgtgtgtgcccaaaatccactgtgagtggctgtacgtgctcatcacccactatgagtgtacttgtccattacccactatgagtggctgtgcgtgtccgtcacctgccgtgggtggctgcgcgtctgtcacctgccgtgggtggctgtgcatgtatgtcacccgccgtgggtggctgtgcgtgtccgtcacctgccgtgggtggctgtgcgtgtctgtcgcctgccatgggtggctgtgcatgttttgtcctcatcatcatcttgggcttcagcactttgctctgggccacggtggctga

SEQ ID NO: 22268 - DNA, 1574 bp, Homo sapiens
  SIMILAR (540)..(953): 961254mologous to Homo sapiens fibronectin,accession number U42594,Smith-Waterman Score=667.
gatgttccgagggacctggaagttgttgctgcgacccccaccagcctactgatcagctgggatgctcctgctgtcacagtgagatattacaggatcacttacggagaaacaggaggaaatagccctgtccaggagttcactgtgcctgggagcaagtctacagctaccatcagcggccttaaacctggagttgattataccatcactgtgtatgctgtcactggccgtggagacagccccgcaagcagcaagccaatttccattaattaccgaacagaaattgacaaaccatcccagatgcaagtgaccgatgttcaggacaacagcattagtgtcaagtggctgccttcaagttcccctgttactggttacagagtaaccaccactcccaaaaatggaccaggaccaacaaaaactaaaactgcaggtccagatcaaacagaaatgactattgaaggcttgcagcccacagtggagtatgtggttagtgtctatgctcagaaacccaagcggagagagtcagcctctggttcaagattgcagtacccactattcctgcaccaactgacctgaagttcactcaggtcacacccacaagcctgagcgcccagtgggcactacccaatgttcagctcactggatatcgagtgcgggtgacccccaaggagaggaccggaccaatgaaagaaatcaaccttgctcctgacagctcatccgtggttgtatcaggacttatggtggccaccaaatatgaagtgagtgtctatgctcttaaggacactttgacaagcggaccagctcagggagttgtcaccactctggagaatgtcagcccaccaagaagggctcgtgtgacagatgctactgagaccaccatcaccattagctggagaaccaagactgagacgatcactggcttccaagttgatgccgttccagccaatggccagacttccaatccagagaaccatcaagccagatgtcagaagctacaccatcacaggtttacaaccaggcactgactacaagatctacctgtacaccttgaatgacaatgctcggagctcccctgtggtcatcgacgcctccactgccattgatgcaccatccaacctgcgtttcctggccaccacacccaattccttgctggtatcatggcagccgccacgtgccaggattaccggctacatcatcaagtatgagaagcctgggtctcctcccagagaagtggtccctcggccccgccctggtgtcacagaggctactattactggcctggaaccgggaaccgaatatacaatttatgtcattgccctgaagaataatcagaagagcgagcccctgattggaaggaaaaagacagttcaaaagacccctttcgtcacccaccctgggtatgacactggaaatggtattcagcttcctggcacttctggtcagcaacccagtgttgggcaacaaatgatctttgaggaacatggttttaggcggaccacaccgcccacaacggccacccccataaggcataggccaagaccatacccgccgaatgtaggacaagaagctctctctca

SEQ ID NO: 22269 - DNA, 2385 bp, Homo sapiens
  SIMILAR (3)..(1685): 1001254mologous to Homo sapiens fibronectin,accession number M10905,Smith-Waterman Score=2943.
atcaaacagaaatgactattgaaggcttgcagcccacagtggagtatgtggttagtgtctatgctcagaatccaagcggagagagtcagcctctggttcagactgcagtaaccaacattgatcgccctaaaggactggcattcactgatgtggatgtcgattccatcaaaattgcttgggaaagcccacaggggcaagtttccaggtacagggtgacctactcgagccctgaggatggaatccatgagctattccctgcacctgatggtgaagaagacactgcagagctgcaaggcctcagaccgggttctgagtacacagtcagtgtggttgccttgcacgatgatatggagagccagcccctgattggaacccagtccacagctattcctgcaccaactgacctgaagttcactcaggtcacacccacaagcctgagcgcccagtggacaccacccaatgttcagctcactggatatcgagtgcgggtgacccccaaggagaagaccggaccaatgaaagaaatcaaccttgctcctgacagctcatccgtggttgtatcaggacttatggtggccaccaaatatgaagtgagtgtctatgctcttaaggacactttgacaagcagaccagctcagggtgttgtcaccactctggagaatgtcagcccaccaagaagggctcgtgtgacagatgctactgagaccaccatcaccattagctggagaaccaagactgagacgatcactggcttccaagttgatgccgttccagccaatggccagactccaatccagagaaccatcaagccagatgtcagaagctacaccatcacaggtttacaaccaggcactgactacaagatctacctgtacaccttgaatgacaatgctcggagctcccctgtggtcatcgacgcctccactgccattgatgcaccatccaacctgcgtttcctggccaccacacccaattccttgctggtatcatggcagccgccacgtgccaggattaccggctacatcatcaagtatgagaagcctgggtctcctcccagagaagtggtccctcggccccgccctggtgtcacagaggctactattactggcctggaaccgggaaccgaatatacaatttatgtcattgccctgaagaataatcagaagagcgagcccctgattggaaggaaaaagacagacgagcttccccaactggtaacccttccacaccccaatcttcatggaccagagatcttggatgttccttccacagttcaaaagacccctttcgtcacccaccctgggtatgacactggaaatggtattcagcttcctggcacttctggtcagcaacccagtgttgggcaacaaatgatctttgaggaacatggttttaggcggaccacaccgcccacaacggccacccccataaggcataggccaagaccatacccgccgaatgtaggtgaggaaatccaaattggtcacattcccagggaagatgtagactatcacctgtacccacacggtccggggctcaatccaaatgcctctacaggacaagaagctctctctcagacaaccatctcatgggccccattccaggacacttctgagtacatcatttcatgtcatcctgttggcactgatgaagaacccttacagttcagggttcctgggacttcctaccagtgccactctgacaggcctcaccagaggtgccacctacaacatcatagtggaggcactgaaagaccagcagaggcataaggttcgggaagaggttgttaccgtgggcaactctgtcaacgaaggcttgaaccaacctacggatgactcgtgctttgacccctacacagtttcccattatgccgttggagatgagtgggaacgaatgtctgaatcaggctttaaactgttgtgccagtgcttaggctttggaagtggtcatttcagatgtgattcatctagatggtgccatgacaatggtgtgaactacaagattggagagaagtgggaccgtcagggagaaaatggccagatgatgagctgcacatgtcttgggaacggaaaaggagaattcaagtgtgaccctcatgaggcaacgtgttacgatgatgggaagacataccacgtaggagaacagtggcagaaggaatatctcggtgccatttgctcctgcacatgctttggaggccagcggggctggcgctgtgacaactgccgcagacctgggggtgaacccagtcccgaaggcactactggccagtcctacaaccagtattctcagagataccatcagagaacaaacactaatgttaattgcccaattgagtgcttcatgcctttagatgtacaggctgacagagaagattcccgagagtaa

SEQ ID NO: 22270 - DNA, 8216 bp, Homo sapiens
  SIMILAR (4038)..(5072): 991254mologous to Homo sapiens fibronectin,accession number U42594,Smith-Waterman Score=1770.
  misc_feature (1)...(8216): n = a,t,c or g
tttgaannatagtaaaccgtancgccgcaccaccggtccggannnnaggggcgacgatggcgtgctgtgctgcacagggggaggagagggtaaccccatgcgcgagcgggaagaggggacctgcagccacaacttctctggtcctctggatcccttctgtccctccacccgtccccttccccaccctctggcccccaccttcttggaggcgacaacccccgggaggcattagaagggatttttcccgcaggttgcgaagggaagcaaacttggtggcaacttgcctcccggtgcgggcgtctctcccccaccgtctcaacatgcttaagggtccggggcccgggctgctgctgctggccgtcctgtgcctggggacagcggtgccctccacgggagcctcgaagagcaagaggcaggctcagcaaatggttcagccccagtccccggtggctgtcagtcaaagcaagcccggttgttatgacaatggaaaacactatcagataaatcaacagtgggagcggacctacctaggtaatgtgttggtttgtacttgttatggaggaagccgaggttttaactgcgaaagtaaacctgaagctgaagagacttgctttgacaagtacactgggaacacttaccgagtgggtgacacttatgagcgtcctaaagactccatgatctgggactgtacctgcatcggggctgggcgagggagaataagctgtaccatcgcaaaccgctgccatgaagggggtcagtcctacaagattggtgacacctggaggagaccacatgagactggtggttacatgttagagtgtgtgtgtcttggtaatggaaaaggagaatggacctgcaagcccatagctgagaagtgttttgatcatgctgctgggacttcctatgtggtcggagaaacgtgggagaagccctaccaaggctggatgatggtagattgtacttgcctgggagaaggcagcggacgcatcacttgcacttctagaaatagatgcaacgatcaggacccaagggcatcctatagaattggagacccctggagcaacaaggttcatcgaggaaacctgctccagtgccatctgcacaggcaacgcccgaggagagtggaagtgtgagaggcacacctctgtgcagaccacatcgagcggatctggccctttcaccgatgttcgtgcagctgtttaccaaccgcagcctcacccccagcctcctccctatggccactgtgtcacagacagtggtgtggtctactctgtggggatgcagtggctgaagacacaaggaaataagcaaatgctttgcacgtgcctgggcaacggagtcagctgccaagagacagctgtaaaccagaattaccgtcggcaactcaaatggagagccatgtgtcttaccattcacctacaatggcaggacgttctactcctgcaccacggaagggcgacaggacggacatctttggtgcagcacaacttcgaattatgagcaggaccagaaatactctttctgcacagaccacactgttttggttcagactcaaggaggaaattccaatggtgccttgtgccacttccccttcctatacaacaaccacaattacactgattgcacttctgagggcagaagagacaacatgaagtggtgtgggaccacacagaactatgatgccgaccagaagtttgggttctgccccatggctgcccacgaggaaatctgcacaaccaatgaaggggtcatgtaccgcattggagatcagtgggataagcagcatgacatgggtcacatgatgaggtgcacgtgtgttgggaatggtcgtggggaatggacatgcattgcctactcgcaacttcgagatcagtgcattgttgatgacatcacttacaatgtgaacgacacattccacaagcgtcatgaagaggggcacatgctgaactgtacatgcttcggtcagggtcggggcaggtggaagtgtgatcccgtcgaccaatgccaggattcagagactgggacgttttatcaaattggagattcatgggagaagtatgtgcatggtgtcagataccagtgctactgctatggccgtggcattggggagtggcattgccaacctttacagacctatccaagctcaagtggtcctgtcgaagtatttatcactgagactcccgagtcagcccaaacttcccccccatccagtggaatgcaccacagccatctcacatttccaagtacattctcaggtggagacctaaaaattctgtaggccgttggaaggaagctaccataccaggccacttaaactcctacaccatcaaaggcctgaagcctgggtgtgggtatacgagggccagctcatcagcatccagcagtacggccaccaagaattgactcgctttgacttcacaaccaccagcaccagcacacctgtgaccagcaacacccgtgacaggagagacgactcccttttctcctcttgtggccacttctgaatctgtgaccgaaatcacagccagtagctttgtggtctcctgggtctcagcttccgacaccgtgtcgggattccgggtggaatatgagctgagtgaggagggagatgagccacagtacctggatcttccaagcacagccacttctgtgaacatccctgacctgcttcctggccgaaaatacattgtaaatgtctatcagatatctgaggatggggagcagagtttgatcctgtctacttcacaaacaacagcgcctgatgcccctcctgacccgactgtggaccaagttgatgacacctcaattgttgttcgctggagcagaccccaggctcccatcacagggtacagaatagtctattcgccatcagtagaaggtagcagcacagaactcaaccttcctgaaactgcaaactccgtcaccctcagtgacttgcaacctggtgttcagtataacatcactatctatgctgtggaagaaaatcaagaaagtacacctgttgtcattcaacaagaaaccactggcaccccacgctcagatacagtgccctctcccagggacctgcagtttgtggaagtgacagacgtgaaggtcaccatcatgtggacaccgcctgagagtgcagtgaccggctaccgtgtggatgtgatccccgtcaacctgcctggcgagcacgggcagaggctgccactcagcaggaacacctttcgcagaagtcaccgggctgtcccctggggtcacctattacttcaaagtctttggccagtgagccactgggagggagagcaagcctctgactgctcaacagacaaccaaactgggatgctcccactaacctccagtttgtcaatggaactgattctactgtccttggttgagatggactccacttccgggcccagataacaggataccgactgaccgtgggccttacccgaagaggccagcccaggcagtacaatgtgggtccctctgtctccaagtaccccctgaggaatcttcagcctgcatctgagtacactgtatccctcgtggccataaagggcaaccaagagaaccccaaagccactggagtatttaccacactgcagccaggaagctctattccaccttacaacaccgaggtgactgagaccaccatcgtgatcacatggacgcatgctccaagaattggttttaagctgggtgtacgaccaagcaacccaggagaggcaccacgagaagtgacttcagactcaggaagcatcgttgtgtccggcttgactccaggagtagagtacgtctacaccatccaagtcctgagagatggacaggatagagatgcgcccaattgtaaacaaaagtggtgacaccattgtctccaccaacaaacttgcatctggaggcaaaccctgacactggagtgctcacagtctcctgggagaggagcaccaccccagacattactggttatagaattaccacaacccctacaaacggccagcagggaaattctttggaagaagtggtccatgctgatcagagctcctgcactttttgataaccttgaagtcccgggcctggagtacaatgtcagtgtttacactgtcaaggatgacaaggaaagtgtccctatctctgataccatcatcccagctgttcctcctcccactgacctgcgattcaccaacattggtccagacaccatgcgtgtcacctgggctccacccccatccattgatttaaccaacttcctggtgcgttactcacctgtgaaaaatgaggaagatgttgcagagttgtcaatttctccttcagacaatgcagtggtcttaacaaatctcctgcctggtacagaatatgtagtgagtgtctccagtgtctacgaacaacatgagagcacacctcttagaggaagacagaaaacaggtcttgattccccaactggcattgacttttctgatattactgccaactcttttactgtgcactggattgctcctcgagccaccatcactggctacaggatccgccatcatcccgagcacttcagtgggagacctcgagaagatcgggtgccccactctcggaattccatcaccctcaccaacctcactccaggcacagagtatgtggtcagcatcgttgctcttaatggcagagaggaaagtcccttattgattggccaacaatcaacagtttctgatgttccgagggacctggaagttgttgctgcgacccccaccagcctactgatcagctgggatgctcctgctgtcacagtgagatattacaggatcacttacggagaaacaggaggaaatagccctgtccaggagttcactgtgcctgggagcaagtctacagctaccatcagcggccttaaacctggagttgattataccatcactgtgtatgctgtcactggccgtggagacagccccgcaagcagcaagccaatttccattaattaccgaacagaaattgacaaaccatcccagatgcaagtgaccgatgttcaggacaacagcattagtgtcaagtggctgccttcaagttcgcctgttactggttacagagtaaccaccacttcccaaaaatggaccaggaccaacaaaaactaaaactgcaggtccagatcaaacagaaatgactattgaaggcttgcagcccacagtggagtatgtggttagtgtctatgctcagaatccaagcggagagacgtcagcctctggttcagactgcagtaaccaacattgatcgccctaaaggactggcattcactgatgtggatgtcgattccatcaaaattgcttgggaaagcccacatggggcaagtttccaggtacagggtgacctactcgagcccctgaggatggaatccatgagctattccctgcacctgatggtgaagaagacactgcagagctgccaaggcctcagaccgggttctgagtacacagtcagtgtggttgccttgcacgatgatatggagagccagcccctgattggaacccagtccacagctattcctgcaccaactgacctgaagttcactcaggtcacacccacaagcctgagcgcccagtggacaccacccaatgttcagctcactggatatcgagtgcgggtgacccccaaggagaagaccggaccaatgaaagaaatcaaccttgctcctgacagctcatccgtggttgtatcaggacttatggtggccaccaaatatgaagtgagtgtctatgctcttaaggacactttgacaagcagaccagctcagggtgttgtcaccactctggagaatgtcagcccaccaagaagggctcgtgtgacagatgctactgagaccaccatcaccattagctnggagaaccaagacttagacgatcacttgggcttccaagttgatgcccgttccagccaatggccagactccatcccagagagccatcaagccagatgtcagaagctacaccatcacaggtttacaacagggcactgactacaagatctacctgtgcaccttgaatgacaatgctcggagctcccctgtggtcatcgacgcctccactgccattgatgcaccatccaacctgcgttttcctggccaccacacccaattccttgctggtatcatggcagccgccacgtgccaggattaccggctacatcatcaagtatgagaagcctgggtctcctcccagagaagtggtccctcggccccgccctggtgtcacagaggctactattactggcctggaaccgggaaccgaatatacaatttatgtcattgccctgaagaataatcagaagagcgagcccctgattggaaggaaaaagacagacgagcttccccaactggttacccttccacaccccaatcttcatggaccagagatcttggatgttccttccacagttcaaaagacccctttcgtcacccaccctgggtatgacactggaaatggtattcagcttcctggcacttctggtcagcaacccagtgttgggcaacaaatgatctttgaggaacatggttttaggcggaccacaccgcccacaacggccacccccataaggcataggccaagaccatacccgccgaatgtaggacaagaagctctctctcagacaaccatctcatgggccccattccaaggacacttctgagtacatcatttcatgtcatcctgttggcactgatgaagaacccttacagttcagggttcctgggaacttctaccagtgccactctgacaggcctcaccagaggtgccacctacaacatgataatggaggcactgaaagaccagcactaggcataaggttcgggaagaggttgttaccgtgggcaactctgtcaacgaaggcttgaaccaacctacggatgactcgtgctttgacccctacacagtttcccattatgccgttggagatgagtgggaacgaatgtctgaatcaggctttaaactgttgtgccagtgcttaggctttggaagtggtcatttcagatgtgattcatcctagatggtgccatgacaatggtgtgaactacaagattggagagaagtgggaccgtcagggaggaaaatggccagatgatgaagctgcacatgtcttgggaacggaaaaggagaattcaagtgtgaccctcatgaggcaacgtgttacgatgatgggaagacataccacgtaggagaacagtggcagaaggaatatctcgggtgccatttgctcctgcacatgctttggaggccagcggggctggcgctgtgacaactgccgcagacctgggggtgaaccccagtcccgaaggcacttactggccagtcctacaaccagtattctcaagagataccatcagagaacaacccacaattttaaattgccccaattgaagtgctcatgccttttggatgtacaggctgacagaagaagattccccgagagtaaatcatctttcccaatccagaggaaccaagcatgtctctctgccaagatccatcttaaactggagtgatgttagcacgacccagcttagagttcttctttctttcttaagcccctttgctctggaggaagttctcccagcttcagctccaacttcacaggcttctcccaaggcatcacccctgggaagtttccctgaggggttttctccataaatgagggctgcaccattggcccttgtttcttgctttcggaaagtatttcaatacccgctcaagtattttaaaatgaaggtgattctaagatttgggtttgggggatccaatagggaaaagccatatggccaggcccaacccaagatgcaaatggttttggaaaatggatatgacccaaaattttaaagtagggaaagtcacccccaaacacttcctgctttccaccttaaagtgtctgggcccgcaaatactggtaggaacaagcatgatcttgttactgtgatattttaaatatccacagtactcacctttttccaaatgatccctagtaattgcctagaaatatctttctcttaccctgttatttatcaattttttcccagtatttttatacggaaaacacttgtcttgaccacacttagtatgcagttgcataagaggaatttggtataattatggtgggtgattattttttatactgtatgtgccaaagctttactactgtggaaagacaactgttttaataaaagatttacattccacaaaaaaaaaaaaaaaaaaaaaatggtt

SEQ ID NO: 22271 - DNA, 462 bp, Homo sapiens
  SIMILAR (38)..(400): 981254mologous to Homo sapiens heterogeneous nuclear ribonucleoprotein D (hnRNP D),accession number D55671,Smith- Waterman Score=690.
aactcgaccaataagaggcgtgggttctgctttattacctttaaggaagataatggaaaagaaataccacaatgttggtcttagtaaatgtgaaataaaagtagccatgtcgaaggaacaatatcagcaacagcaacagtggggatctagaggaggatttgcaggaagagctcgtggaagaggtggtggccccagtcaaaactggaaccagggatatagtaactattggaatcaaggctatggcaactatggatataacagccaaggttacggtggttatggaggatatgactacactggttacaacaactactatggatatggtgattatagcaaccagcagagtggttatgggaaggtatccaggcgaggtggtcatcaaaatagctacaaaccatactaaattattccatttgcaacttatccccaacaggtggtgaagcagtattttccaatttgaaa

SEQ ID NO: 22272 - DNA, 214 bp, Homo sapiens
  SIMILAR (106)..(5): 821254mologous to Homo sapiens fragment of C hnRNP core protein (aa 225) (1 is 3rd base in codon) (677 is 1st base in codon),accession number X03910,Smith-Waterman Score=128.
  misc_feature (1)...(214): n = a,t,c or g
ccggcgcngcngctgccccctgtgtcgncgccaccatggctccctcctgctcgcccgccgagccgcctaccgccgccgttgcgctgccgncggcgcccgctctacctcgcgaagcacacaagacagggaaggcgcgcgcgtggctgcaaaggctcctgcgcctctccctggcctgcccccttcgcctcccactctggcggcgcacactcccgct

SEQ ID NO: 22273 - DNA, 447 bp, Homo sapiens
  SIMILAR (3)..(179): 961254mologous to Homo sapiens heterogeneous nuclear ribonucleoprotein D (hnRNP D),accession number D55671,Smith- Waterman Score=342.
  misc_feature (1)...(447): n = a,t,c or g
aacattggaatcaaggctatggcaactatggatataacagccaaggttacggttgttatggaggatatgactacactggttacaacaactactatggatatggtgattatagcaaccagcagagtggttatgggaaggtatccaggcgaggtggtcatcaaaatagctacaaaccatactaaattattccatttgcaacttatccccaacagcgggaacttcattgcaggccctgtgtcgcgctgacttcacgattctcacaggcccgctcaatgcggacagggtacgagatgctcacgctctcgaatgctgccgtttgggtgngtgaagcagtatttttccaatttgaaagattcatttgaaaggtggctcctgccacctgctaatagcagttcaaactaaattttttgtatcaagtccctgaatggaagtatgacgttgggtccc

SEQ ID NO: 22274 - DNA, 989 bp, Homo sapiens
  SIMILAR (638)..(477): 581254mologous to Saguinus oedipus estrogen response element binding protein,accession number AF093414,Smith-Waterman Score=136.
tgggcatgtgggaaaatattcatataaatcttaatggctacataaggaagtattattaaaacaaccaacaaacaaattgacattaagtcattcccaatttggacagggaggacacattatggcaaaaattagattttgctaaaaacatttcaaacttcactgcaattttaatcatgtcctcaatttcggcaagcctgtcttccaaacttatgcttttaataacttgaatccatgacaattttcccctattctgatgataaaagagcccaatacatttttatacaaaaggatttattaaaaaaaccagtaagacactactacatcatgacactgtcacactgggcttttaacacaagacttgctctacaatactgggggaaagggcataaaacacaaattgattctgaagcatagcaattaagaaataaaacaatgaaagcaaatttcttttaatgagaactcagaattaaacttcagagggacccaacgtcatacttccattcagggacttgatacaaaaaatttagtttgaactgctattagcaggtggcaggagccaccttcaaatgaatcttcaaattggaaaatactgcttcaccacctggagacaaagaagaaaaaatagaagtcactctgggcaggctacaacacttaacaaaaatttacataaaactgagttatccctatgttccactatatgtaaatactgtataacattaaatgtgtgatatgttttataaattaaagctgaacagtagagtccatgagctgtaaatccacatgtgcaccactggtttaagatgtgatatgcttttacaagtattctttaaaatataaaaagctttaaagtatttacccaaagaactcataaaaaggtcaatttggtaaaaggacattttgacccaagagcatctaatatttaagcttattttattggataagcatatctcttgtccatcacaagttatagaaaagttatatacgactaa

SEQ ID NO: 22275 - DNA, 1394 bp, Homo sapiens
  SIMILAR (1)..(978): 831254mologous to Saguinus oedipus estrogen response element binding protein,accession number AF093414,Smith-Waterman Score= 1371.
atgtcggaggagcagttcggcggggacggggcggcggcagcggcaacggcggcggtaggcggctcggcgggcgagcaggagggagccatggtggcggcgacacagggggcagcggcggcggcgggaagcggagccgggaccgggggcggaaccgcgtctggaggcaccgaagggggcagcgccgagtcggagggggcgaagattgacgccagtaagaacgaggaggatgaaggccattcaaactcctccccacgacactctgaagcagcgacggcacagcgggaagaatggaaaatgtttataggaggccttagctgggacactacaaagaaagatctgaaggactacttttccaaatttggtgaagttgtagactgcactctgaagttagatcctatcacagggcgatcaaggggttttggctttgtgctatttaaagaatcggagagtgtagataaggtcatggatcaaaaagaacataaattgaatgggaaggtgattgatcctaaaagggccaaagccatgaaaacaaaagagccggttaaaaaaatttttgttggtggcctttctccagatacacctgaagagaaaataagggagtactttggtggttttggtgaggtggaatccatagagctccccatggacaacaagaccaataagaggcgtgggttctgctttattacctttaaggaagaagaaccagtgaagaagataatggaaaagaaataccacaatgttggtcttagtaaatgtgaattaaaaggtagcccatgtcgaaggaacaatatcagcaaccagccaacagtgggattctagaggaggatgtgcaggaagagcctcgtggaagaggtggtgaccaggcagagtggttatgggaaaggtatccaggcgaggtgggccatcaaaaatagctacaaaccatatctaaattattccatttgccaaccttatcccccaacagcgggaacttcattgcaggccctgtgtcgcgctgacttcagattctcacaggcccgctcaatgcggacagggtaacgagatgctccacgctctcgaatgctgccgtttggtggtgaagcagtattttcccaatttgaagattcatttgaaggtggctcctgccacctgctaatagcagttcaaactaaattttttgtatcaagtccctgaatggaagtatgacgttgggtccctctgaagtttaattctgagttctcattaaaagaaatttgctttcattgttttatttcttaattgctatgcttcagaatcaatttgtgtgttatgccctttcccccagtattgtagagcaagtcttgtgttaaaagcccagtgtgacagtgtcatgatgtagtagtgtcttactggttttttaataaatccttttgtat

SEQ ID NO: 22276 - DNA, 1795 bp, Homo sapiens
  SIMILAR (303)..(548): 501254mologous to Homo sapiens heterogeneous nuclear ribonucleoprotein D,accession number AF026126,Smith-Waterman Score= 144.
ggcacgagggccattaaagcgaggaggaggcgagagcggccgccgctggtgcttattcttttttagtgcagcgggtagagtagcgggagtgtcgcgccgcgcgagagttgggaggcgaagggggcaggccagggagaggcgcaggagcctttgcagccacgcgcgcgccttccctgtcttgtgtgcttcgcgaggtagagcgggcgcgcggcagcgcggcggggcattactttgctgctagtttcggttcgcggcagcggcgggtggtagtctcggctggcacgggccgagacactagcactatgtcggaggaagcagttccggcggggacggggcggcggcacgggcaaccggcgtgcggtaggcggctcggcgggcgagcagcgagggagcccatggtggcggcgacacacggcgcacgcggcggcgtctgggaagcggacgcggcgaccggcggcggaaccgcgtctggaggcactcgaagggggcagcgccgagctcggaggggggcgaagatttacgccagtaagaacgaggaggatgaaggccattcaaactcctccccacgacactctgaagcagcgacggcacagcggggaagaatggaaaatggttataggaggccttagctgggacacttacaaagaaagatctgaaggactacttttccaaatttggtgaagttgtagactgcactctgaagttagatcctatcacaggggcaatcaaggggttttggctttgtgcctatttaaagaatcggagagtgtgagataaggtcatggatcaaaaagaacataaatttgaatggggaaggtgaatgatcctaaaagggccaaagccatggaaaacaaaagagccggttaaaaaaatttttgttggtggcctttctccagatacacctgaaagagaaaataagggagtactttggtggttttggtgaaggtggaatccatagagctccccatggaccaacaagaccaattaaagaggccgtgggttcctgcttttattacctttaaggaagaagaaccagtgaagaagattaatggaaaagaaataccacaatgttggtcttagtaaatgtgaaataaaagtagtcttgttgaatgaacaatatcagcaacagcaacagtggtgatctataggaggatttgcaggaatagctcttgtaataggtggtggtcccagtcaaaactggaaccagggatatagtaactattggaatcaaggctatggcaactatggatatagcagcccaaggttacgggtggttatggaggatatgactacactggttaccaacaactacgtatggatatggtgattatagcaaccagcagagtggttatgggaaggtatcccaggcgaggtggtcatcaaaaatagctacaaaccccatactaaatttattcccatttgcaacttattccccaacaggtggttgaagcagtattttcccaatttgaagattcaatttgaaaggggctcctgccacttgcttaattagcagttcaaacctaaattttttggtatcaagtcccctgaaatggaagtatgaccgttgggtccctctgaagtttaattctgagttctcattaaaaagaaatttgctttcattggttttaattctaaattgccatgcttcagaatcaatttgtgttttatgccctttcccccagtattgtagagcaagtcttgtgttaaaagcccagtgtggacagtgtcatgatgtagtagtgtcttactggttttttaataaatccttttgtataaaacaaaaaaaaaaaaaaag

SEQ ID NO: 22277 - DNA, 241 bp, Homo sapiens
  SIMILAR (3)..(173): 541254mologous to Homo sapiens DEAD-box protein abstrakt,accession number AF195417,Smith-Waterman Score=119.
  misc_feature (1)...(241): n = a,t,c or g
tggaggagtcggaacccgaacggaagcgggctcgcaccgacgaggtgcttgccggaggaagccgctccgaggcggaagatgaggacgacgaggactacgtgccctatntnccgttacggcagcgccgncagctactgctccagaagctgctgcagcgaagacgcaagggaagctgctcaagggggttnaggccgtagccatccatgggggcaaagaccaggaggaacggactaaggccatc

SEQ ID NO: 22278 - DNA, 1356 bp, Homo sapiens
  SIMILAR (206)..(349): 751254mologous to Homo sapiens DEAD-box protein abstrakt,accession number AF195417,Smith-Waterman Score=168.
atgctctgggagaggttgggcacctggcaggccgccccgactccgatcagctgtctccgctgctatctccggaacaaatttgtccctcgcgcgatccggaactccgaggtcgttcctacgcgccgtcgttcgcctctcacatcggattgggtctcacgcaaggatgaggcggggtttcgccgtggccgcatgcgtgcagcaaagaatggaggagtcggaacccgaacggaagcgggctcgcaccgacgaggtcctgccggaggaagccgctccgaggcggaagatgaggacgacgaggactcgtgccctatgtgccgttacggcagcgccggcagctactgcgcgcaaagagtctgccaaggagaagcactgaaggaagaagagaagatcctggagagtgttgccgagggccgagcattgatgtcagtgaaggagatggtaagggcattacgtatgatgaccccatcaaaaccaggggtagtgccagttttacaggcttggggctctgagaaagtacctgtgagtcatgaagacgatgtcggttggtttcatagccatcctgagaggcctgaagaagaaaggcattcaccacccaaccccattcagatccagggcatccccaccatcgggagctggcccggcagaccctggcatcctggagtactactgccgcctgctgcaggaggacagctcaccatcctgcgctgcgccctctgcattgggggcatgtccgtgaaagagcagatgagaccatccgacaaagaagatggtcagcctagacatctgtcgcacctggccctggacgaggctgaccgcatgatcgacatgggcttcgaggggacatccgtaccatcttctcctacttcaaggccatttttagggcaccagcccttggcggccagaggcttctggtcacctctggtccagatgacgggccatggcagggctgtggcgggaggtagaatatgtgaagaggaggccaagatggtgtacctgctcgagtgcctgcagaagacaccccgccttacaccggattggccgcaccgggcgctcggaaacacaggcatcgccactaccttcatcaacaaagcgtgtggagagcgcggctggccttctgcgggggcctgggtcatcggatcactgactgccccaaactcgggctatgcagaccaagcagggccacctggagagtctgaggatggtgtgtgtaccttatgtgtgtacaaggccatgtggggccctgcactgaggaggcagtggcagaatcatgaggcctgcctctgtactctggcaaaacagttcctcgccctccaccgcctcttccctgctgatccaaatgagctcaagccattctga

SEQ ID NO: 22279 - DNA, 260 bp, Homo sapiens
  SIMILAR (14)..(61): 1001254mologous to Homo sapiens DEAD-box protein abstrakt,accession number AF195417,Smith-Waterman Score=94.
gagagcgcggctggccttctgcgggggcctgggtcatcggatcactgactgccccaaactcgggctatgcagaccaagcagggccacctggagagtctgaggatggtgtgtgtaccttatgtgtgtacaaggccatgtggggccctgcactgaggaggcagtggcagaatcatgaggcctgcctctgtactctggcaaaacagttcctcgccctccaccgcctcttccctgctgatccaaatgagctcaagccattctga

SEQ ID NO: 22280 - DNA, 1743 bp, Homo sapiens
  SIMILAR (1)..(582): 1001254mologous to Escherichia coli DsbG,accession number AF000956,Smith-Waterman Score=1031.
atgaaaggttatctcggaaagtatcaggatatgggcgtcaccatctacctgactccagatggtaagcacgctatctctggttacatgtacaacgagaaaggtgaaaacctgagtaacacacttatcgaaaaagaaatttacgcaccagccggacgcgaaatgtggcaacggatggaacaatcccactggctcctcgacggtaaaaaagatgcgccggtcattgtctacgtcttcgccgatccgttctgcccatattgtaaacagttctggcagcaggcgcgcccgtgggtagattctggcaaagtgcaattaagaacattgttggttggggttatcaagccagaaagcccggcgacagcagcggcaattcttgcctccaaagatcccgcaaaaacctggcaacaatatgaagcctctggtggcaagcttaagctaaacgtgcctgcaaacgtaagtacagagcaaatgaaagtgttaagtgacaatgagaaactgatggacgatctgggggcaaatgtcacgccggctatctattacatgagtaaggaaaatacgctacaacaggccgtggggttgcccgatcttacggaagacaggaaagagcagagcaacaagtgctggggtgcgtggtgcagggaaggcagctggctgctgctggtgtggtcagagtgggccctcatggagaagactgcattcgagcagaaacttgaagggggtgagggggaggctgtgagaagcactcagaatctggatgtgccttgggggtgggccccactggatttcctggtggacctgtcgctcctcctggcgccgtttgaggcggcggcgcaggaagctgcagaagcagcagagcaggacgatgagaccccagatgagccagaagccggcgaagcacgtgaggaacgtgtaggtgccctgggacatcaccatggcggcggcacgggcggcgggtcctcagacgcttcactggacactgggctccgctgcgtggccccgggcccgcgccacactctcaggtgccgccagcgtcactcggggacccgcggccgggggctgcccgtggcaggccagcccctccagggccccctcaccactgtgctgcctggggcggttggccacctcttcctcctggaggccttccttgaccactccacgctgtccgagagctcaaaggccctcacggtatacactcacgctgggcatccagtccacatgggacccacagccctgaatggccccaaccacctctgtgcccactgtggcccaagcagccctaagctccgtccacctcagacgccacatcctttgcgttctcatcgccatttcaacagtgagaaacctcgactttggaaagaacaggaggaggaggtggctaggaagtggcagagccaggacaatacacccaggcctgatcttcagaagttcctatgtttctcaattccatctgacaaccatttaccgaccattgaggctgtgaggcagcaggccaggccctatgagtcagtgctgatggacctcaaagcgctgctgctagaagccaagcagaaggtgccgcccgtgctgcaggtgctgcattgcggggatgagtccatgctggacattggaggagagcgcggctgtgccttctgcgggggcctgggtcatcggatcactgactgccccaaactcgaggctatgcagaccaagcaggtcagcaacatcggtcgcaaggactacctggcccacagctccatggacttctga

SEQ ID NO: 22281 - DNA, 394 bp, Homo sapiens
  SIMILAR (222)..(353): 471254mologous to Homo sapiens DEAD-box protein abstrakt,accession number AF195417,Smith-Waterman Score=90.
gggtagtgccagttttacaggcttggggctctgagaaagtacctgtgagtcatgaagacgatgtcggttggtttcatagccatcctgagaggcctgaagaagaaaggcattcaccacccaaccccattcagatccagggcatccccaccatcgggagctggcccggcagaccctggcatcctggagtactactgccgcctgctgcaggaggacagctcaccatcctgcgctgcgccctctgcattgggggcatgtccgtgaaagagcagatgagaccatccgacaaagaagatggtcagcctagacatctgtcgcacctggccctggacgaggctgaccgcatgatcgacatgggcttcgaggggacatccgtaccatcttctcctacttcaag

SEQ ID NO: 22282 - DNA, 1203 bp, Homo sapiens
  SIMILAR (613)..(774): 981254mologous to Homo sapiens DEAD-box protein abstrakt,accession number AF195417,Smith-Waterman Score=273.
atgcagggcctctttgccttcagcaccccctgtgcccctgacctgtgcagggctgtggccggggccatcgcccgccagcgggagcggctgccagagctgaccaggccccagccctgccccctgccacgggccacctctctgccctccctggacacccccggagagcttcgggagatgccaccaggacctgagccacccacgtccaggaaaatgcacctggccgagcccggaccccagagcctgccgctactgctagatctcatggtgttgcatggaacaaaaaaaaaggttacccattttcaaagcgggaaggggccctatgaattcatcatctgcccttcggaggacagttccccactcttgcgatgcgccttctgcattgggggcatgtccgtgaaagagcagatggagaccatccgacatcctctgcagaccaccagaggccctggaccaggccctctgttcacagatgggccagaccccatcccggaggccttcctccacggacttctgagtattagggagatggtgagcacagaaaaggtgaagccagtgggccaggaaagcgagcccagagtaaagcctctggagcttgatgacagcgcttctggcggtgtacacatgatggtggccaccccggggcgcctcatggatttgctgcagaagaagatggtcagcctaaacatctgtcgctacctggccctggacgaggctgaccgcatgatcgacatgggcttcgagggtgacatccgtaccatcttctcctacttcaagcacacttccgcagctgccatcggcctgcagcttgctctggacggagggacgggaagtggccagaaggggaagtgtgaggagttcccgtccagcatgtcagcagtctccacaggtcttgaagcgtcggcctgctgcctgtccgtgaccatggaccctctggagaccctatcaaggatggcatcctctaccagcagcatgtcaagtttggcaagggcctggctctctcccgagcctggagactcaccggggatggtaggaggactcccaagagagctgcctggcatggccccactggaatgtggggaattccagaggcccgagagcttatgtgccgacaggaacgagctaggatcccagtctcccgagttcccagggcaggaagaggaggacgaggatgaggatgatgaggaggaagacgaggacgaatga

SEQ ID NO: 22283 - DNA, 2309 bp, Homo sapiens
  SIMILAR (195)..(1145): 701254mologous to Homo sapiens DEAD-box protein abstrakt,accession number AF195417,Smith-Waterman Score=1002.
  misc_feature (1)...(2309): n = a,t,c or g
tatctccggaacaaatttgtccctctgcgcgatccggaactccgaggtcgttcctacgcgccgtcgttcgcctcttcacatcggattgggtctcacgcaaggatgaggcggggtttcgccgtggcgcgcatgcgtgcagcaaagaatggaggagtcggaacccgaacggaagcgggctcgcaccgacgaggtgcctgccggaggaagccgctccgaggcggaagatgaggacgacgaggactacgtgccctatgtgccgttacggcagcgccggcagcctactgctccagaagctgctgcagcgaaagacgcaagggagctgcggaggaagagcagcaggacagcggtagtgaaccccggggagatgaggacgacatcccgctaggccctcaagtccaacgtcagcctcctggatcagcaccagcacctttaaagagaaggctgaaagcgccgcaaaagagtcttgccaaggaagaaagcagcttgaaggaaagaaagagaagatccttggaagaattgtttgccgaagggccgagcattgatgtcaagtgaaaggnagattggctaaagggcattaccgtattgattgaccccatcaaaacccagcttggacttccaccccgtttatgttcttgagcatgtctgaagagcgacatgagcgcgtgcggaagaaataccacatcctggtggagggagacggtatcccaccacccatcaagagcttcaaggaaatgaagtttcctgcagccatcctgagaggcctgaagaagaaaggcattcaccacccaacacccattcagatccagggcatccccaccattctatcttgccgtgacatgataggcatcgctttcacgggttcaggcaagacactggtgttcacgttgcccgtcatcatgttctgcctggaacaagagaagaggttacccttctcaaagcgcgaggggccctatggactcatcatctgcccctcgcgggagctggcccggcagacccatggcatcctggagtactactgccgcctgctgcaggaggacagctcaccactcctgcgctgcggccctctgcattgggggcatgtccgtgaaaagagcagattggagaccatccgacaaggtgtacacatgatggtggccacccccggggcgccctcatggatttgctgcagaagaagatggtcagcctagacatctgtcgctacctggccctggacgaggctgaccgcatgatcgacatgggcttcgagggtgacatccgtaccatcttctcctacttcaagggccagcgacagaccctgctcttcagtgccaccatgccgaagaagattcagaactttgcttaagagtgcccttgtaaagcctgtgaccatcaatgtggggcgtgctggggctgccagcctggatgtcatccaggaggtagaatatgtgaaggaggaggccaagatggtgtacctgctcgagtgcctgcagaagacacccccgcctgtactcatctttgcagagaagaaggcagacgtggacgccatccacgagtacctgctgctcaagggggttgaggccgtagccatccatgggggcaaagaccaggaggaacggactaaggcccatcgaggcattccgggagggcaagaaggatgtcctagtagccacagtacgttgcctccaagggcctggtcttccctgccatccagcacgtcatcaattatgacatgccagaggagattgagaactatgtacaccggattggccgcaccgggcggttcaggaaacacaggcatcgccactaccttcatcaacaaagcgtgtgatgagtcattcctgattgactctcaaggcgcttcttgttagaaagccaaagcagaaggtgccgcccgtgcttgcaggtgctgcaattgcgggggatggagtcccatgctggacattgggaggagcagccgcggctgtgccttctgcggggggcctgggtcatctggatcactgactgccccaaacttcgaggcttatgcagaccaagcaggtcagcaacatcggtcgcaaggactacctggcccacagctccatggacttctgagccgacagtcttcccttctctcccaagaggcctcagtccccaagactgccacccagtctacacatacagcagccccctggacagaatcagcatttcagctcagctggcctggaatggggccaggctggtcctggctgcctgttccctgtgctcttcagaattacttgtttttgtttttccttttaccccagctgccattaaagcccaaacctctaggcccaaaaaaaaaaaaaaaaaaa

SEQ ID NO: 22284 - DNA, 1428 bp, Homo sapiens; identical to SEQ ID NO: 5721
  SIMILAR (921)..(1418): 701254mologous to Homo sapiens mitochondrial aconitase,accession number U80040,Smith-Waterman Score=584.

SEQ ID NO: 22285 - DNA, 597 bp, Homo sapiens
  SIMILAR (313)..(396): 671254mologous to Homo sapiens aconitate hydratase,accession number U87939,Smith-Waterman Score=108.
tgcacaaaatggctccctacagcccactggtgacccggctgcagaaagctctgggtgtgcggcaataccatgtggcctcagtcctgtgccaacgggccaagatggcgatgagccactttgagcccaatgagtacatccactatgacctgctagagaagaacattaacattgtttgcaaacgactgaactggcctctgaccctcttggagaagatcgtgtatggacacctggatgacccggccagccaggaaatcgagcagggcaagacacctgtggctgtggccggaccacgtggccatgctgcagttcatcagcaaaattggggccaccacttccgtgttcccttacaaccacaggatgaggaggtacctaagcaagacggccggacagacattgccaatctagctgatgaattccaggatcacttggtgcctgaccctggctgccattatgaccaactaattgaaattaacctcagtgagctgaagccgcacatcaatgggcccttcacccccgaccaggctcaccctgtggcagaagtgggcaaggtggcagagaaggaaggatggcctctggacatccgagtaggtctgactg

SEQ ID NO: 22286 - DNA, 512 bp, Homo sapiens
  SIMILAR (149)..(511): 851254mologous to Sus scrofa heart aconitase precursor,accession number J05224,Smith-Waterman Score=548.
gaagaacattaacattgtttgcaaatgattgaaccggcctctgaccctctcagagaagatcgtgtacagacacccggatgaccccaccagccaggaaattgagcggggcgggacgtacctgcagcagtggccggacagcgtgaccatgcaggtgattggcgtgaagctgatgggctccctctctggttggacctcacccaaagatgtgatcctgaaggtggcaggcatcctcaccatgaaaggtggcacaggtgcaatcgtggaataccacgggcctgttgtagactccatctcctgcactggcatggtgacagtctgcaacatgggcttagaaattgggaccaccacttccgtgttccattacaacctcaggatgaagaagtacatgagcaagacctgccaggcagacattgccaatctagctgatgaattcaaagatcacttggtgcctgaccctgggtgccattatgaccaactaattgaagttaaccccagtgaactgaagctgcaca

SEQ ID NO: 22287 - DNA, 645 bp, Homo sapiens
  SIMILAR (406)..(519): 971254mologous to Rattus norvegicus mitochondrial aconitase,accession number AJ243266,Smith-Waterman Score=200.
  misc_feature (1)...(645): n = a,t,c or g
atggcgccctacagcctactggtgactcggctgcaggtcaaggcgtccccggcacagtcagctttcctaaccctgtccctgcctcgcaagaagggattctatagagccgtagcgcgggtctttcaacgcagtgggtatcgggttctttcccaaagtgcttacttggaaagagtgtggctgctggactcttttcgaaatgcccctctgagtcaggagcctggaaacagctatgaccatgattacgaattcgagctcggtacccagctcaacgactccattgccgaggagctgaacaagaagttggccaacaagatgaggagcagacctctcatcaggtcccccaaatcccatacgatgtggctgctgcccttctcctacatgctgttccagccacatctgcaatcgaaggacatcaagaagggggagaagaacacaatcgtcacctcctacaacaggaacttcacgggccgcaacgacgcaaaccccgagacccatgcctttgtcacgtccccagaggtgagactgcccagctgcgcacaagcctagaaatggcctaagggggtccctggcgggtcagaggaggaggcagaaggagatggggactggggtcatcgaattccncgncatggctatgaactcgacgcc

SEQ ID NO: 22288 - DNA, 862 bp, Homo sapiens
  SIMILAR (270)..(428): 1001254mologous to Homo sapiens dJ347H13.1 (aconitase 2, mitochondrial (Aconitate Hydratase, EC 4.2.1.3, Citrate Hydrolyase)),accession number AL023553,Smith-Waterman Score=272.
aattgctgtaaaaggggtcatagtcctaatgtgttcagcatcatggccaatggctacagcatctttcttcaaatgacgccacgtcatgagttagcctgtcctttattgttggatatttcggttgcttgcaactggtctctgttaaaaaagtctctggcccagcccagatggtgaactcttttggccaagtctggataatttgaagtcaggtggagacctctgctcactgtctcctcctgacccttaaccccaccacccacaatgcaccaggtctaattggtagctgcaccaattcaagctatgaagatatggggcgctcagcagctgtggccaagcaggcactggcccatggcctcaagtgcaagtcccagttcaccatcactccaggttccgagcagatccgcgccaccattgagcgggacggctatgtgagtgcccatatccccctgcccatctcccccaccccatgctgagtaatgcctccaggcggcacaagcccagaggcctgttgggccggggctggggcaggtcccagtggctgccctggggttccagtacagcacttcgtcctgcagccaccacatcaccccttcccatcagactctcacccacccttgacattctgtcttcctctctccctggcaggcacagatcttgagggatctgggtggcattgtcctggccaatgcttgtggcccctgcattggccagtgggacaggtaagaggcgtatcttttgacaagacagccccttgtgcacagggtacagagccccagaagttggagggggaattattggggtggagagaagagactccagccaaggtctctagctccagggactcttgcccattagaagcctc

SEQ ID NO: 22289 - DNA, 4032 bp, Homo sapiens
  SIMILAR (574)..(1737): 601254mologous to Homo sapiens aconitate hydratase,accession number U87939,Smith-Waterman Score=1037.
  misc_feature (1)...(4032): n = a,t,c or g
tcagtgcacaaaatggcgccctacagcctactggtgactcggctgtagaaagctctgggtgtgcggcagtaccatgtgggctcagtcctgtgccaacgggcgcggggtggcgatgagccactttgagcccaacgagtacatccattatgacctgctagagaagagcattaacattgttcgcaaacgactgaaccggccgctgacactctcggagaagattgtgtatggacacctggatgaccccgccagccaggaaattgagcgaggcaagtcgtacctgcggctgcggccggaccgtgtggccatgcaggatgcgaacggcccagatggccatgctccagttcatcagcagcgggctgtccaaggtggctgtgccatccaccatccactgtgaccatctgattgaagcccaggttgggggcgaggaagaacctggcgccgggccaaggacatcaaccaggaagtttataatttcctggcaactgcaggtgccaaatatggcgtgggcttctggaagcctggatctggaatcattcaccaaattattctggaaaactattgcgtaccctggttgtccttctgattgggccctgacttccacacacccaatggtggcggaccttgggggcattctgcattggaagttgtgggtggccgaatgcttgggaatggaatggcttgggaatcccctgggagttgaagtgccccaaggtgattggcgtgaagctgacgggctctctctccggttggccctcacccaaagatgtgatcctgaaggtggcaggcatcctcacggtgaaaggtggcacaggtgcaatcgtggaataccagggacctggtgtagactccatctcctgcactggcatggcgacaatctgcaacatgggtgcagaaattggggccaccacttccgtgttcccttacaaccacaggatgaagaagtacctgagcaagaccggccgggaagacattgccaatctagctgatgaattcaaggatcacttggtgcctgaccctggctgccattatgaccaactaattgaaattaacctcagtgagctgaagccacacatcaatgggcccttcacccctgacctggctcaccctgtggcagaagtgggcaaggtggcagagaaggaaggatggcctctggacatccgaggtgggtcttaattggtagctgcaccaatttcaagctatggaagatatgggggcgctcagcagctgtggccaagcaggcactggcccatggcttcaaagtgcaagtcccagtttcaccatcactccagggtttccgaggcagattccgcgccacctttgaggcgggacggctatgcacagatcttgagggatctgggtgggcattgtcctggccaatgcctgcgggccctgcattggccagtgggacagaaaggacatcaagaagggggagaagaacacaatcgtcacctcctacaacaggaatttcacggggccgcaacgacgcaaaccccgagacccatgcctttgtcacgtccccagagattgtcacagccctggccattgcgggaaccctcaagtttcaacccagagaccgattacctgacggggcacggatgggcaagaagtttcaggcttggaggttcccggattgcagattgagttttcccaaagggggagttttgacccaggggcagggacacctaccagcacccacccaagggacagcagcggggcagcatgttgggacttgagccccaccagccagcgcctgcagctcctggagccttttgacaagtgggatggcaaggacctggaggacctgcagatcctcatcaaggtcaaagggaagtgtaccactgaccacatctcagctgctggcccctggctcaagttccgtgggcacttggataacatctccaacaacctgctcattggtgccatcaacattgaaaacggcaaggccaactccgtggggcaatccggtcactcaggagtttggccccgctcccgatcattgcccgctactacaagaaacatggcatccagttgggtggtgatcggagacgagaactacggcgaagggctcgagccgggagcatgcagctctggaaccctcgccacctttgggggcggggccatcatcaccaaagagctttgcccagatccaacgagaccaaccctgaagaaaacaggggcctgcttcctctgacctttggctgacccgggctgactaccaaccaagattcccccctgtggacaagctgaccattcaggggcctgaaagggacttcaccccctggcaaagccccctgaaagtgcatccatcaagccaccccacaggggaccccaggagaaccatccctccctgaaccacaccctccaacgagacgcaagattgaagtggttccgcagctggcagtgccctcaacagaaatgaagggaactgcaaacagtgaggcgcagtgccctccccccgtctccccgctggcgtcaagttcagctcccacgtgtgcccatcagtggatccgatccgttccagccatggcttcctattccaagatggtgtgaccagacatgcttccttgctccccgcttagcccacggaattaacctgtggttgtggtggggggggttctttaaaataactttttagcccccgtcttcctattttgagtttggttcagatcttaagcagctccatgcaactgtatttatttttggatggacaagactcccatcttaaagtttttctcctgcctgattcattttcattgggtgggttgaagggattctagagaaccttttgttcttgcaaggaaaacaagaatccaaaaccagtgactgttctgtgagtgattggtgtctgtgccgtttgttgtcaagtccagggtccaggaagggtcttttcagtcaaggtcagtggaggcccaacagccacagccacagatggatccatcactgcagtgaaggaggagcagggcctagatggtggaggagcggggcaagctggtgggcactcctggccttgcctcactgtccagctccgagacactatctccttaagcatcggcctcagctgctgttggtcttcacagccggccataccaccttcccgcaggctggtagggtccactgtccagccccagggctagttgctggtccaccaggagatgagagcccaggcctggctcactgatggatcccacaagcgtgtacggagcctccttctttggcagctcctcactggaagtggtggcatctgctgagctaggccctgtgggggacgtgtcaacaaagctctcgtccaccacccggaagcggatctcctcgccggtgtccatgtagaggtcgtgtgctccttcctccgtctcgtactcccacacccacacctgctccgcttcgtcgaacttggctggctggctgcagtgactctggggggatgagaatgtcatcgaagaagcctagagagacgtgcactccttctgggctgcagcctttgatcttcccaatgagaatctcatctaggaatggatgaaacaccacgcagcgaaaatggactttggtgtgtgatgcgccatccccagggaatacataggcatcctccagtttggtgatatcaaacagacaaatgcagaatccccacgtttgtaacacaaccttgttggccaaacttcttgttcaactccctcggcaaatggagtcgtttgagcttcctctcaaactgcccaaggggggatccggacggtgtccaccatttccnacccaggacgaacatcccggcctgcgctgggggctctgggaacaggagggtcagtcacgcacccagggccgggggcagggagaatccccgagccccttggtcccgtcccagtcgctgaggcccccaggctggcggtgaggttgcacggggcggtctcgggggcccggtccgggccatgctccgctactacaacatgaggaaactgaggccagagggaggcactctccgtccacagctccgggtgcgcgcccgcgccgcgagaccccgccacgccacgccactccacgcca

SEQ ID NO: 22290 - DNA, 406 bp, Homo sapiens
  SIMILAR (167)..(27): 371254mologous to Homo sapiens spliceosomal protein,accession number L35013,Smith-Waterman Score=60.
tttcgtctagtagcggctgtgtatcggtgacgcgggtgtttccccagtttgtggcccctgagtgctggggggggaccgcggtgactgaacctagaaggtggagaggaatcgtcctcggtgcccagaggcggctctgcagccccgtgacggcgaccactgctcccgggccgtgcttccccaagtagtccgatggcagcggctgcgccgaggcgcccgactcaggagaggctcctgagcgctaggtccgcactgtggtgactgaacccagaagtcggggagcagttgtcctccgctgcacagaggctactctggagctctgtgacggcgcccagcgtgacccactcctgggccaggatacggaccgtcgtgcccatatctcctggctggtcgccctatcctcccgact

SEQ ID NO: 22291 - DNA, 551 bp, Homo sapiens
  SIMILAR (163)..(225): 471254mologous to Drosophila melanogaster Mst84Db,accession number X67703,Smith-Waterman Score=46.
tcctgcgtcgacgatttcgtgtcatggaaagtggggaactacactacccagaaagctctgctttaaacgacagccggtcagagccagtgagcactcggaaagaaggcatttccacgtgtgcacgtaacgtaaggccgagacttccggggtctctagtagcggctgtgtatcggcgatgcgggtgtttccccagtttgtggccccctgagtgctggggggggaccgcggtgactgaacctataaggtggagaggaatcgtcctcggtgcccagaggcggctctgcagccccgtgacggcgaccactgctcccgggccgtgcttccccaagtagtccgatggcagcggctgcgccgaggcgcccgactcaggtaattgtggcgccttctgtgccctcaggtcaccccatcgtcacccaggtcctaaaccagcgagggagcggctcctgctcacgggtctgtagccggcacccggcgtatgaacactgaggcgctcgcaggaggggtccctgtgtaactgtccagtgggggtccctgtgtaactgtccagtggc

SEQ ID NO: 22292 - DNA, 545 bp, Homo sapiens
  SIMILAR (69)..(416): 921254mologous to Homo sapiens nuclear RNA helicase (DEAD family),accession number Z37166,Smith-Waterman Score=552.
tcctcaaactcaagacagttggaagaaccccaagctctttgatctcttggatgtgctgagcagaacttcccgccatcgccatccaaccgggcatggcccaggaggagcgcctgtcacgctatcagcagttcaaggatttccagcggcggatcctggtggccaccaatctgtttggccgggggatggacatcgagcgagtcaacatcgtctttaactacgacatgcctgaggactcggacacctacctgcaccgggtggcccgggcgggtcgctttggcaccaaaggcctagccatcacttttgtgtctgacgagaatgatgccaaaatcctcaatgacgtccaggaccggtttgaagttaatgtggcagaacttccagaggaaatcgacatctccacatacatcgagcagagccggtaaccaccacgtgccagagccgcccacccggagccgcccgcatgcagcttcacctcccctttccaggcgccactgttgagaagctagagattgtatgagaataaacttgttattatggaaaaaaaaaaa

SEQ ID NO: 22293 - DNA, 707 bp, Homo sapiens
  SIMILAR (1)..(285): 931254mologous to Homo sapiens Similar to nuclear RNA helicase, DECD variant of DEAD box family,accession number BC001009,Smith-Waterman Score=450.
  misc_feature (1)...(707): n = a,t,c or g
cgcttttccaagtacatgcccagcgtcaaggtgtctgtgttctcgngtggtctctccatcaagaaggatgaagaagtgttgaagaagaactgtccccatgtcgtggtgnggacccgggcccgcatcctggcgctcgtgcggaataggagcttcagcctanagaatgtgaagcactttgtgctggacgagtgtgacaagatgctggagcagctggacatgcggcgggatgtgcaggagatcttccgcctgacaccacacgagaagcagtgcatgatgttcagcgcctgtcacgctatcagcagttcaaggatttccagcggcggatcctggtggccaccaatctgtttggccgggggatggacatcgagcgagtcaacatcgtctttaactacgacatgcctgaggactcggacacctacctgcaccgggtggcccgggcgggtcgctttggcaccaaaggcctagccatcacttttgtgtctgacgagaatgatgccaaaatcctcaatgacgtccaggaccggtttgaagttaatgtggcagaacttccagaggaaatcgacatctccacatacatcgagcagagccggtaaccaccacgtgccagagccgcccacccggagccgcccgcatgcagcttcacctcccctttccaggcgccactgttgagaagctagagattgtatgagaataaacttgttattatg

SEQ ID NO: 22294 - DNA, 575 bp, Homo sapiens
  SIMILAR (11)..(574): 941254mologous to Homo sapiens Similar to nuclear RNA helicase, DECD variant of DEAD box family,accession number BC001009,Smith-Waterman Score=946.
ggcacgaggcgatgaagaggaagagccccaggctcctcaagagagcacaccagctccccctaagaaagacatcaagggatcctacgtttccatccacagctctggcttccgggactttctgctgaagccggagctcctgcgggccatcgtggactgtggctttgagcatccttctgaggtccagcatgagtgcattccccaggccatcctgggcatggacgtcctgtgccaggccaagtccgggatgggcaagacagcggtcttcgtgctggccaccctacagcagattgagcctgtcaacggacaggtgacggtcctggtcatgtgccacacgagggagctggccttccagatcagcaaggaatatgagcgcttttccaagtacatgcccagcgtcaaggatgaagaagtgttgaagaagaactgtccccatgtcgtggtggggaccccgggccgcatcctggcgctcgtgcggaataggagcttcagcctaaagaatgtgaagcactttgtgctggacgagtgtgacaagatgctggagcagctggacatgcggcgggatgtgcaggagatct

SEQ ID NO: 22295 - DNA, 569 bp, Homo sapiens
  SIMILAR (459)..(527): 951254mologous to Homo sapiens Similar to nuclear RNA helicase, DECD variant of DEAD box family,accession number BC001009,Smith-Waterman Score=118.
  misc_feature (1)...(569): n = a,t,c or g
tttggattacgatgaggaggaagagccccaggcccgtcaagagagcacaccagctccccctaagaaagacatcaagggatcctacgtttccatccacagctctggcttccgggactttctgctgaagccggagctcctgcgggccatcgtggactgtggctttgagcatccttctgaggtccagcatgagtgcattccccaggccagcgtcaaggtgtctgtgttcttcggtggtctctccatcaagaaggatgaagaagtgttgaagaagaactgtccccatgtcgtggtggggaccccgggccgcatcctggcgctcgtgcggaataggagcttcagcctaaagaatgtgaagcactttgtgctggacgagtgtgacaagatgctggagcagctgggctcccctccctgaagcgtggctcgaggcgcacgggcacggctgctccgcgccagtancagtgcggcgggatgtgcaggagatcttccgcctgacaccacacgagaagcagtgcatgatgttcagcgcaccctgagcaaggacatccggcctgtgtgcaggaagttcatgc

SEQ ID NO: 22296 - DNA, 441 bp, Homo sapiens
  SIMILAR (242)..(364): 1001254mologous to Homo sapiens nuclear RNA helicase,accession number U90426,Smith-Waterman Score=217.
ggcgcacgggcacggctgctccgcgccagcgtgtaagtggattgcagctcctcccgcgcctgcgctcgctggccaccccccagcccgtcaggcaccaggactggccactcccgcggctcactctgccctcgtcacggtgccactggctccctggcacaggttgggaggggtctgggtctggtctggggtgggggtcctgcatggcagacgctcatgcccacccatgtcttgccctccccacctagacatgcggcgggatgtgcaggagatcttccgcctgacaccacacgagaagcagtgcatgatgttcagcgccaccctgagcaaggacatccggcctgtgtgcaggaagttcatgcaggatgtgagtagggcgagagtggcagctttggccttccccaggggcctggagcctggggccccaggacacccgcacggccc

SEQ ID NO: 22297 - DNA, 1548 bp, Homo sapiens
  SIMILAR (471)..(232): 911254mologous to Escherichia coli Anaerobic dimethyl sulfoxide reductase chain A precursor (EC 1.-.-.-) (DMSO reductase),accession number D90801,Smith-Waterman Score=400.
ctattcaccattcagttgaacgactgcgatcctgttgttgccgctaatcacctgcgaactgtaatgaatcgtcggaatggcatcttcttctatgccagctttcacctgcgcgtgaccgtagactttagcgcaatcgcatagccagacattgttctcttcattaccttcaatactggcaaaatcaaaaaggttgtatacagccgtgtatcgccatggcaaaaacgtgttttcactgttaaatgtggtcaaccataaaaacttgatggggacatccagtttttcttttccacgaacaccatcacgggtcgcggtcatttccgtaccatggtcgatggcatctgtccatgtaaagacggaaatctgcgttttaacaggattctcgagcatcgggaaccattctacccccagatcccagctaccttcgcgtacgcctgagttgccgccgtttatgccgacgttgccggtgaagatttctttgctatcggtaagcccgcggttctgcaaaacagaaccatgaaggcccgataagcgcagcgcatcgggcaatttagcatttggcatcattgattgtccacgctgctgtgccatttcattcaataagcgcaggctgttgaggttggcttcggtaagcattttcggtgtcagaccacgaactttattcccttcacgatgcatccgtgaatcttgcggaatgccgttgagatattttccggtcagcaatcccttggtgctgccattgctgtaggtctggatcatgttctccgccccctgcttcaccttcagctcaatggccaactgcttctccaggcccgccacgcggctcaggttggtggccgagcaggtggggccacccgcaccaggggactgggggccatttttgtgtctgacgagaatgatgccaaaatcctcaatgacgtccaggaccggtttgaagttaatgtggcagaacttccagaggaaatcgacatctccacatacagtaagtgcccgggtctgattgtggccagtgccagacgtggtggaggtgaattctgagtacttgctccccccagcaactaggcaggcccacttccggtattcttcccgaaccctggccccatcccagcacctccatctctctcccacgggctccccctccagaccaccgctgctacctggatcttcggctccagctgccacagcccaattcagcttcatgcgtgcgctgctctgacccatagtgacgttcttgtccccccgctcctggatcatcagggtcagctccgcagcccacggcgcttcctcgggtcccaaagggcgccaatgtgcaagcaccgccgccagggagcgctccctgccggagccccggagaccaaaggttggctccctcccctgtttcccgaaggagtgagggtccgacggcggccacgaacaaagctgcacgctctgcataccccggagatcccctagaaattccgcagaggcctcccctctccgcttgggcacgagtctgcatttatgaagggccatctgcatgcagcagccccgaaaaagaaagccgatgcccat

SEQ ID NO: 22298 - DNA, 1324 bp, Homo sapiens
  SIMILAR (19)..(336): 731254mologous to Caenorhabditis elegans putative RNA helicase,accession number U08102,Smith-Waterman Score=406.
atggcagaacaggatgtggaaaacgatcttttggattacgatgaagaggaagagccccaggctcctcaagagagcacaccagctccccctaagaaagacatcaagggatcctacgtttccatccacagctctggcttccgggactttctgctgaagccggagctcctgcgggccatcgtggactgtggctttgagcatccttctgaggtccagcatgagtgcattccccaggccatcctgggcatggacgtcctgtgccaggccaagtccgggatgggcaagacagcggtcttcgtgctggccaccctacagcagattgagcctgtcaacggacagtcaggccaggtgcacatctttgggcttcatattggcgcccgtgccctcgttatctcagagcacatcctgaaggatgaaggtgctgtggagggctgtggtgtggtccagtgtctgatggcacgggtgacggtcctggtcatgtgccacacgagggagctggccttccagatcagcaaggaatatgagcgcttttccaagtacatgcccagcgtcaaggtgtctgtgttcttcggtggtctctccatcaagaaggatgaagaagtgttgaagaagaactgtccccatgtcgtggtggggaccccgggccgcatcctggcgctcgtgcggaataggagcttcagcctaaagaatgtgaagcactttgtgctggacgagtgtgacaagatgctggagcagctggacatgcggcgggaatgtgcaggagatcttccgccttgacaccacaccgagaaagcagtgcatgatgttcagcgccaccctgaagcaaggacatcccggcctgtgttgcaggaagttcatgcaggatcccatggaggtgtttggtggacgacgagaccaagctcacgctgcacggccctgcagcagtactacgtcaaactcaagaccagtgagaagaaccgcagcctctttgatctcttgggatgtgcctggagtttaaccaggtgactcatcttcgtcaagtcagtgcagcgctgcatggccctggcccagctcctcggtggagcagaacttcccggccattcgccatccaccggggcatggcccaggaggagcgcctgtcacgctatcagcagttcaaggatttccagcggcggatcctggtggccaccaatctgtttggccgggggatggacatcgagcgagtcaacatcgtctttaactacgacatgcctgaggactcggacacctacctgcaccgggtggcccgggcgggtcgctttggcaccaaaggcctagccatcacttttgtgtctgacgagaatgatgc

SEQ ID NO: 22299 - DNA, 1594 bp, Homo sapiens
  SIMILAR (971)..(1453): 411254mologous to Homo sapiens nuclear RNA helicase,accession number U90426,Smith-Waterman Score=142.
tttcgtaggaagcgcagcaactcgtgtctgagcgcccggcggaaaaccgaagttggaagtgtctcttagcagcgcgcggagaagaacggggagccagcatcatggcagaacaggatgtggaaaacgatcttttggattacgatgaagaggaagagccccaggctcctcaagagagcacaccagctcccccctaagaaagacatcaagggatcctacggtttccatccacagctctggcttccgggactttcctgcctgaagccggagctcctgcgggccatcggtggacttgtggcctttgagcatccttctgaggtccagcatgaagtgcattccccagggccatcctggggcatgggacgtcctgttgccaggccaaagtcccgggatgggcaagacagcggtctttcgttgctggccacccttacagcagatttgagcctgtcaacggacaggtgaccggtcctggtcatgttgccacacgagggagctggccttccagatcagcaaggaatatgagcgcttttccaagtacatgcccagcgtcaaggtgtctgtgttcttcggtggtctctccatcaagaaggatggaagaagtgatgaagaagaactgtccccatgtcgtggtggggaccccgggccgcatcctggcgctcgtgcggaataggagcttcagcctaaagaatgtgaagcactttgtgctggacgagtgtgacaagatgctggagcagctggacatgcggcgggatgtgcaggagatcttccgcctgacaccacacgagaagcagtgcatgatgttcagcgccaccctgagcaaggacatccgccctgtgtgcaggaagttcatgcaggatcccatggaggtgtttgtggacgacgagaccaagctcacgctgcacgggctgcagcagtactacgtcaaactcaaagacagtgagcaagacccgcaaggtctttgatctctgggatggtgctggagtttaaccaggttgatattcttcgtcaaggtcagtgcaagcgctgcatggcccttggcccagctccttcgtggagcaaaacttcccggcccaatggccaatcccaccggggcaatggcccccagaaggaacgccctgtcaacgcttatcaagcaagttcaaaggatttcccaagcgggcgggatcccctggtggccacccaaatcttgtttggcccgggggatggacatcgaagcgaagtcaaacatcggtctttaactacggacatgccttgaggactcgggacaccctacctgcaaccgggttggcccggcggggtcgctttggcaccaaaaggccttagccattcacttttgtgtctgacgggaaatgatgcccaaaatcctcaatgacgtcccaggaccggttttgaagttaaatgtgggcagaactttccagaggaaatcgacatctccacatacatcgagcagagccggttaaaccaccagttggccagagccggcccacccggagccgccccgcatgcagcttcacctcccctttccaggcgccactgttgagaagctagagatttgtatgagaataaacttgttattatggaaaaaaaaaaaaaaaaa

SEQ ID NO: 22300 - DNA, 327 bp, Homo sapiens
  SIMILAR (24)..(224): 1001254mologous to Homo sapiens phenylalanyl tRNA synthetase,accession number D84430,Smith-Waterman Score=337.
cggccgctccaacatcagaatggccgactgtcagcgtgaagcgtgatctgctcttccaagccctgggccgcacctacactgacgaagaatttgatgaactatgttttgaatttggtctggagcttgatgaaattacatctgagaaggaaataataagtaaagaacaaggtaatgtaaaggcagcaggagcctctgatgttgttctttacaaaattgacgtccctttctcctcccctagtgtccttaagtcctcctccacagggaacatctatttgggctttgatgtttaataaagtagaaagcactgtcaaaaaaaacctcgtgccg

SEQ ID NO: 22301 - DNA, 847 bp, Homo sapiens
  SIMILAR (585)..(686): 1001254mologous to Homo sapiens phenylalanyl tRNA synthetase,accession number D84430,Smith-Waterman Score=176.
atgaatcagacatctgagaaggaaataataagtaaagaacaaggtaatgtaaaggcagcaggagcttctgatgttgttctttacaaaattgacgtccctgccaatagatatgatctcctgtgtctggaaggattggttcgaggacttcaggtcttcaaagaaagaaatttctttctcacggttctggaggttgagaagtccaagaccaaagtggagcagattcagtgtctgtgctcccaagaagatattgctgataaactaggtgtggatatctctgcaacaaaggcagtccacataagtaatcctaaaacagctgaatttcaggtggcacgcactacccttcttcctggcctcctgaagaccatagcagcaaatcgtaagatgccccttccactgaaactgtttgaaatctctgacattgtaataaaagattctaatacagatgtaggtgcaaaaaactacagacatctctgtgctgtttattacaacaagaatcctgggtttgagatcattcatgggctgctggacagaattatgcagttgctcgatgtgcctcctggtgaagacaaggggggatatgtgatcaaagcgtcgggaagcttggggtccttcatcctgacgttatcaccaaatttgagctgaccatgccctgctcctccctagaaatcaatattggaccctttttgtgaagattggtctctgtggtgtgattctcttcccaggtgtccctttctcctcccctagtgtccttaagtcctcctccacagggaacatctatttgggctttgatgtttaataaagtagaaagcactgtcaaaaaaaaaaaaaaaaaaaaaaaaaaaaaaaa

SEQ ID NO: 22302 - DNA, 2273 bp, Homo sapiens
  SIMILAR (650)..(1723): 621254mologous to Homo sapiens putative phenylalanyl-tRNA synthetase beta-subunit; PheHB,accession number AF042346,Smith- Waterman Score=893.
cggcacgaggccgactgtcagcgtgaagcgtgatctgctcttccaagccctgggccgcacctacactgacgaagaatttgatgaacctatgttttgaatttggtctggagcttgatgaaattacatctgagaaggaaataataagtaaagaacaaggtaatgtaaaggcagcaggagcctctgatgttgttctttacaaaattgacgtccttgccactagatatgatctcctgtgtctggaaggattggttcgaggacttcaggtcttcaaagaaaggataaaggctccagtgtataaacgggtaatgcctgatggaaaaatccagaaattgattatcacagaagagacagctaagatacgtccttttgcgggagcagcagttctccgtaatataaagtttactaaagatccgatatgacagcttcattgaacttcaggagaaattacatcagaatatttgcaggaaaagagcactggttgccattggtacccatgatttggacactttgtcgggcccatttacttatactgcaaagcgtccttcagatatcaaattcaagcctctaaataagaccaaggagtatacagcctgtgaactgatgaacatatacaagactgacaatcacctgaaacattatttacatatcattgaaaacaaacccctgtatccagttatctatgatagcaatgggtgtcgtcctttcaatgcctcccatcatcaatggggatcattccagaataacagtaaatactagaaatatttttattgaatgcacgggaactgactttactaaggcaaaaatagttcttgatattattgtcaccatgttcagtgaatattgtgagaatcaatttacggtcgaagctgctgaagtggtttttcctaatggaaaatcacatacctttccagaattagcttaccgaaaggagatggtgagagctgacctaattaacaaaaaagttggaatcagagaaactccagaaaatcttgccaaacttctgaccaggatgtatttaaaatcagaagtcataggtgatgggaatcagattgagattgaaatccctccaaccagagctgacattatccatgcatgtgatattgtaggaagatgcagctattgcttatgggatataacaacattgcagatgcactctcccgaaaactttacaccataggctaatcaatttcctcttaataaggctcactgaacttctccgacatgacatggcaggccgctggctttcactgaagcactttacctttggccctgtgctcccaaggaagatattggctggataaactaggtgtgggatatctctggcaacaaagggcagtccacataagtaattcctaaaacagctgaatttcaggtggcacgcactacccttcttcctgggcctccctgaagaccataggcagcaaatcgtaaggtggccccttccactggaaactgtttgaaatctctggacattgtaataaaaggattctaataccagatgtaggtgcaaaaaaaactacgagacaatctctggtggctggtttattaccaacaaaaaatcctggggtttgagatcaattcatggggctgctgggacagaattatggcagtttgctccgatgttgcctcctggtggaagacaagggggggatatgtgattcaaagcatcagaagggcctgctttcttccccggggcgatgtgcagagattcttttgccaggggtcaaagccttcgggaagcttgggggtccttcatcctgacgttattcaccaaatttggagctgaccattgccctgctcctccctagaaatcgaatattggaccctttttgtgaagattggtctctgtgggtgtgaatctcttcccaggtgtccctttctcctcaccctagtgtccttaaagtcctccatccacaggagaacatcatatttgggactttgaatgtttatataaagtagaaagcactgtctggctgtgtgggtaaaagaccatcctttccctgcatattaggccagcttgtgccatataccaatgtggtgtctgtgtgtgaagctgcattgttgggtaaaagccccgtggagtgctggagaaatgcactagcagagtgcaggatctgttctgaaaggcagacgtgctcctcagacatcagaacatcacattggaacggattactcctgcataacaagatcccatttctttccttattgataaaacaagataatcgatgagaattcatgttgcatgagttcgagataactgaggggttagcttg

SEQ ID NO: 22303 - DNA, 445 bp, Homo sapiens
  SIMILAR (328)..(92): 361254mologous to Mus sp. alpha 1 (XII) collagen {triple- helical domain COL2},accession number S48406,Smith-Waterman Score= 85.
ttttccatttttttaaacgtttattacttcaagagtgaattatttttcaaagatgataaaactcatttctattccagtagaaaagggtcacaggtttgccccagggtccaggagcgcccggaaggcagggcccccaggcctcttcacctcagcctgggcacctataatctgagggaccctgtgagggggtgggggcagctcgggggcacagcctgcggccacttcggccagagagtgggcggagaccctcgggcagctgcacagggcatcttgtgctcactccattgttttccgaggcctgtgtaaaggcgctttgcctggcctggcaggtagaccaaggccaaagctcgtggccagggcctgggcactgagtccccactgaatttggcacaggaaggcggcactcccagcctggcccgtcctgcatggggagccaccacaccgg

SEQ ID NO: 22304 - DNA, 645 bp, Homo sapiens
  SIMILAR (247)..(642): 991254mologous to Bacteriophage phi-80 cII gene (AA 1 - 132),accession number X13065,Smith-Waterman Score=651.
atggcgatggcccactacgtgaaccatcacccaaatcaagttttttggggtcgaggtgcccccttgtttctctcccatcctcacttcctcaacgccgacccggttctggcagaagcggtgactggcctgcaccctaaccaggaggcacactccttgttcctggacatccacccggcggagccaggtcacgacaaaatccgcgatgcggtccgtgcatggtcgtcgtccctggacaatcaggacgtagtgtcagcgctgatcatcaacgaataccgggagcagggcggtaccgccatcagcttcccagaagacatcagcagggcgcgccagaaactttttcgctttctggataaccgcttcgactccgatcagtaccgcgagaacgttagagaactgaccccggcaatcatggctgttcttcctgttgagtttcgtacacgcctggcgccgcagaacgacaccatgtcgctgatcgcatctgccatgaaggaatgttcagaagcaaagcaagccgttctcctgaacgcgcctgagcaccagaaaatgaaggaggtaagcgagggcatagcgtcattgtttcgcctcatgccggagcaggtaggaccgctgatgacgatggttacatcgatgctgggggttatatga

SEQ ID NO: 22305 - DNA, 423 bp, Homo sapiens
  SIMILAR (1)..(177): 911254mologous to Homo sapiens CLA-1,accession number Z22555,Smith-Waterman Score=290.
  misc_feature (1)...(423): n = a,t,c or g
atgaccttgaggctcatcatgaccttggcattcacnaccctcggcgacgtgcccttcatgaaccgcactgtgggtgagatcatgtggggctacaaggacccccttgtgaatctcatcaacaagtactttccaggcatgttccccttcaaggacaagttcggattatttgctgaggtacgtgtggcctgggattttgccgatttcggaaccaccatcaaacaggattttcgcctgctggggcaaaccagcgtggaccgcttgctgcaactctctcagggccaggcggtgaagggcaatcagctgttgcccgtctcactggaggccgggcagtacgggcatacccaagcctatgcctacagcatccagggtgacggtcccgaggatgacgatgagcgcatgttagatttcatacacggtgcctga

SEQ ID NO: 22306 - DNA, 599 bp, Homo sapiens
  SIMILAR (84)..(287): 1001254mologous to Homo sapiens CLA-1,accession number Z22555,Smith-Waterman Score=351.
ctgcacgagcaccccgtcacggaatcccccatgaactgctctgtgacactgcagctgagcctctacatgaaatctgtcgcagcattggacaaactggcaagattgagcctgtggtcctgccgctgctctggtttgcagagagcggggccatggagggggagactcttcacacattctacactcagctggtgttgatgcccaaggtgatgcactatgcccagtacgtcctcctggcgctgggctgcgtcctgctgctggtccctgtcatctgccaaatccggagccaagtaggtgctggccagagggcagcccgggctgacagccattcgcttttcctccagcctaaactgacatcatcctatggactgagccggccactctcatggccgaagtgagcgcatgctgtgcccccgagctgcccccaccccctcacagggtccctcagattataggtgcccaggctgaggtgaatgagcctgggggccctgcgttccgggcgctcctggaccctggggcaaacctgtgacccttttctactggaatagaaatgagttttatcatctttgaaaaataattcactcttgaagtaataaacgttt

SEQ ID NO: 22307 - DNA, 486 bp, Homo sapiens
  SIMILAR (201)..(272): 1001254mologous to Homo sapiens Human SR-BI class B scavenger,accession number W97900,Smith-Waterman Score=129.
atgttcgtggcagcgggaacagccacggtgaagtttccaaagggagaatgtgcttggctggtgcccttccccttcctggtgcctgtgcggcgcttgtcctgctgctggttattctcccagagcccctgcggtgcccgcttcacactctctatgggggaagggaccctgtggactccatacgcctctggcgtcaggctggggagttcaggcacaaaagcaacatcaccttcaacaacaacgacaccgtgtccttcctcgagtaccgcacctttccagttccagccctccaagtcccacggctcggagagcgactacatcgtcatgcccaacatcctggtcttgaataaacctcggagcacctggatctctgtctgctttgttcacggctgtatcccagcatctagaacggggcccaggacagagtcaatgcacagcaaatccttgtggaaagcctggctagctgcccctggcctccctctgctgtga

SEQ ID NO: 22308 - DNA, 2650 bp, Homo sapiens
  SIMILAR (70)..(942): 771254mologous to Homo sapiens CLA-1,accession number Z22555,Smith-Waterman Score=1107.
  misc_feature (1)...(2650): n = a,t,c or g
cgtcgccgtccccgtctcctgccaggcgcggagccctgcgagccgcgggtgggccccaggcgcgcagacatgggctgctccgccaaagcgcgctgggctgccggggcgctgggcgtcgcggggctactgtgcgctgtgctgggcgctgtcatgatcgtgatggtgccgtcgctcatcaagcagcaggtccttaagaacgtgcgcatcgaccccagtagcctgtccttcaacatgtggaaggagatccctatccccttctatctctccgtctacttctttgacgtcatgaaccccagcgagatcctgaagggcgagaagccgcaggtgcgggagcgcgggccctacgtgtacaagggagttcaaggcacaaaagcaacatcaccttcaacaacaacgacaccgtgtccttcctcgagtaccgcaccttccagttccagccctccaagtcccacggctcggagagcgactacatcgtcatgcccaacatcctggtcttgggtgtgggcggtgatgatggagaataagcccatgaccctgaagctcatcatgaccttgggcattcaccaccctcgggcgaacgtgcctttcatggaaccgcactgtggggtgaggttcatgtggggctacaaggacccccttgtgaatctcatcaacaagtactttccaggcatgttccccttcaagggcgggttcggagtatttgctgagctcaacaactccgactctgggctcttcacggtgttcacgggggtccagaacatcagcaggatccacctcgtggacaagtggaacgggctgagcaaggttgacttctggcattccgatcagtgcaacatgatcaatggaacttctgggcaaatgtggccgcccttcatgactcctgagtcctcgctggagttctacagcccggaggcctgccgatccatgaagctaatgtacaagggagtcaggggtgtttgaaggcatccccacctatcgcttcgtggctcccaaaaccctgtttgccaacgggtccatctacccacccaacgaaggcttctgcccgtgcctggagtctggaattcagaacgtcagcacctgcaggttcagtgcccccttgtttctctcccatcctcacttcctcaacgctgacccggttctggcagaagcggtgactggcctgcaccctaaccaggaggcacactccttgttcctggacatccacccggtcacgattatccccatgaactgctctgtgaaactgcagctgagcctctacatgaaatctgtcgcaggcattggacaaactgggaagattgagcctgtggtcctgccgctgctctggtttgcagagagcggggccatggagggggagactcttcacacattctgacactcagctggtgttggatgcccaaggtgatgcacttatgcccagtacgttccttcctgggcgctgggctggcgtcctgctgctggtccctgttcatcttgccaaatccggagccaagagaaatgctatttattttggagtagtagtaaaaagggctcaaaggataaggaggccattcaggctggttctgaataatccctgatgacatcagctcccaagggctctggtgctgcaggaagcaaaactgtaggggtcctgaaggacaccggtgaagnccagccaaggcctggccgctgggcttgaaccggccccccagcccctacaccccgtttttcccgggattttcccagcgggacagccccccaggccccacagcctgagcctcccagctgccatgtgcctgttgcacaccttgacacacccccctggcacacttacacacatgcgtgcaggcttgtggcagacactcagggatggagcttgctgctgaagggacttgtagggagaggctcgtcaacaagcactgttctggaaccttctttccacggtggcccacaggccttgaccacaggggctgtgggtcctgcgtccccttcctcgggtgagcctggcctgtcccgttcagccgttgggcccaggcttcctcccctccaaggtgaaacactgcagtcccggtgtggtggctccccatgcaggacgggccaggctgggagtgccgccttcctgtgccaaattcagtggggactcagtgcccaggccctgggcaacggagctttggccttggtctaccttccaaggcccaggccaaagcgcctttaacacaggcctcggaaaaaacaatggagtgaagcaacaaagatgccccttgtgcaagcttgcccgaaaggtctccgcccaaccccggcccgggactttgatccccccgaaagtcttcaacagggcactgcatcgtggttgtctggcgcccttttccctcccagcctaaactgacatctatcctatggactgaagccggccactcgtctggccgaagttggccgccaggctgtgcccccgagcttgcccccacccccttcacagggtccctcagattataaggtgcccgaggctgaggtgaagcagcctggggggccctgccttccgggcgctcctgggaccctgggggcaaacctgtgacccttttctactggaatagaaatgagttttatcatctttgaaaaataattccctcttgaagtaataaacgtttaaacaaaatgggaaaaaaaaaaaaaaaaa

SEQ ID NO: 22309 - DNA, 1712 bp, Homo sapiens
  SIMILAR (637)..(1044): 561254mologous to Homo sapiens biphenyl hydrolase-related protein,accession number X81372,Smith-Waterman Score=343.
  misc_feature (1)...(1712): n = a,t,c or g
ggatccacgtcccacgggccggacccgcggccgcgttcggaaatcagcctgagcctgagtaccgctaaggctttaatcacgggtcccgagagccctaagtcttctctttgcttgctgatctcgtaccttaatgtgcaaaagaatcacgttgggaactgaaaattcagaatcctgggcctcactcccagaggatctgatctacatgtgtggagatgcccaggaatctgctttattctcttttgtcctcccacctgtccccccatttcagcacctcggtaacctctgccaaagtggctgtgaatggcgttcagctgcattaccagccactttggagagggagatcacgcagtccatgctacttcctgggatgttaggaagtggagagactgattttggacctcagctcaagaacctcaataagaagctcttcacggtggtcgcctgggatcctccgaggctatggacattccaggcccccagatcgcgatttcccagcagacttttttgaaagggatgcaaaagatgctgttgatttgatgaaggcgctgaagtttaagaaggtttctctgctggggtggagtgatgggggcataaccgcactcattgctgctgcaaaatatccatcttacatccacaagatgggtgatctgggggcgccaacgcctacgtcacttgacgaaagaccagcaggataatatgaggggcatccgaggatggtttctcaaatgggagttgaggggaaaaaggaaagcctctaggaagccctctatgggtatgactactttgccagaacctgtgaaaagtgggtggatggcataagaccagtttaaacatctcccagatggtaacatctgccggcacctgctgcccccgggtccaagtgccccccgcctttgattgtgcacgggtgagaaggatcctctggtcccacggtttcatgccgacttcattcataagcacgtgaaaggctcacggctgcatttgatgccagaaggcaaacacaacctgcatttgcgttttgcagatgaattcaacaagttagcatgaagacttcctacaatgagaatgcccactccagtcttggcgggtccttcttgcggggcttgatcgtgttgcctgccctgttaaacatgatgccctttgaaaactctccgccctttgaaaactttcctacccctccccttcaatccttatccctaacccaaatgaggaataatgacatattggaaaacagcctctaggcttcaggctgggcacggtggctcacagctataatctcagcactttgggaggctgaggtgggagaattgcctgagccccaggagttcaagacccaagnctgtgcaatatagggagactccgggctctacaaaaaaagagtttttcaaaattagccaggcgaagtggcacacatctgtggtcccaggtgctcaggaagctgaggtgggaggatcacttgagcccaattcaaagctgcagtgagctgtaattgcatcactgcactccaaccctgggcaacagagtaagaccttgtcttaaaaaaaaataaaaacataaaaaaaaataaaaaaggaataaagcctctaacttcaatagctatgaaaattaaatccgattttctaagatgaagttgtgacaagttataccattgtcttaacaggtgaattcctgccataatttattttcaaataaattttaggtggagaaaaaaa

SEQ ID NO: 22310 - DNA, 612 bp, Homo sapiens
  SIMILAR (1)..(258): 691254mologous to Mus musculus Pro-Pol-dUTPase polyprotein,accession number Y12713,Smith-Waterman Score=304.
atggacctctttaagtggtcaaaaactgtgaaggcatttgtatcccctgtgaatgctcaccaatgggtaacctcagcagaggaggatattaataatcaagtccataggatgacccgttctgtggacaccattcggcctctatccgcagccacccgtgtcatcgcccaatgggctcatgaacatagtagccatggtggcagtaatggaggtgatgcctgggctcagcaacatggacttccacttaccaaggctgacgtgactattgatgaacgactgcatatgggggggccaatgaccctgttccagattcagttcctgaatagtgttggagatctattggatctgattccctcactctctcccacaaaaaacggcagcctaaaggtttttaagagatgggacatgggacattgctccgctcttatcaaggtggcagatatctacctagcatctcagtacacatcctatgccataagtggtcccacagtacaaggtggcctccctgtttttcgctgggaccgtttcaacaaaactctacatcagggcatgccagaggtctacaactttgattttattaccatgaaaccaattttgaaacttgatataaaatga

SEQ ID NO: 22311 - DNA, 1893 bp, Homo sapiens
  SIMILAR (326)..(1003): 741254mologous to Homo sapiens Human secreted protein encoded by gene 45 clone HTTDS54,accession number W75159,Smith-Waterman Score=777.
  misc_feature (1)...(1893): n = a,t,c or g
ggggccgcctgtatcccgcagaggaaggtcgcggccgtggagcgatgacccgcggcggtccgggcgggcgcccggggctgccacagccgccgccgcttctgctgctgctgctgctgctgcagctgttgttagtcaccgcggagccgccgaaacctgcaggagtctactatgcaactgcatactggatgcctgctgaaaagacagtacaagtcaaaaatgtaatggacaagaatggggacggcttatggcttttacaataactctgtgaaaaccacaggctggggcatcctggagatcagagctggctatggctctcaaaccctgaagcaatgagatcatcatgtttgtggctggctttttggaagggttacctcacttgccccacacatggaatggaccactaacacaaacctcttacccacagctgattcacgaaaccttccatcatggataaagttgcaggattttaatgggagaagcaagataagtggacccggaaaaatatcaaagaatacaagactgattcattttggaagacattacaggctatgtgatggcaccaatagatggcctcctatgtagggagccaagaagagggctatatttagaagggacaaagccaatgaccctgttccagattcagttcctgaatagtgttggagatctattggatctgattccctcactctctcccacaaaaaacggcagcctaaaggtttttaagagatgggacatgggacattgctccgctcttatcaaggttcttcctggatttgagaacatcctttttgctcactcaagctggtacacgtatgcagccatgctcaggatatataaacactgggacttcaacatcatagataaagataccagcagtagtcgcctctctttcagcagttacccagggtttttggagtctctggatgatttttacattcttagcagtggattgatattgctgcagaccacaaacagtgtgtttaataaaaccctgctaaagcaggtaatacccgagactctcctgtcctggcaaagagtccgtgtggccaatatgatggcagatagtggcaagaggtgggcagacatcttttcaaaatacaactctggcacctataacaatcaatacatggttctgggacctgaagaaagtaaagctgaaccacagtctttgacaaagggcactctgttacattgtgggagcaaattcctacatatgtaggaatatttctggaacaaacttgatgtttctacggggaaagggtttttgggccctcctacaatgttcctttccatgaaaaaatctacaactggagtggcctatcccactgttagttcagaaagctgggcttgggacctaccccttatgattttaggccccacgagccaaaaattttccggcgtgacccaagggaaagtgactgatacggcatcccatgaaatatatcatgcgatacaaccaattataaggaaggatccttacagtagaggtgacccccctgtaaatacccatcctgnctgcccgtgaggaccctgaaactcaccctaaccccaagtccccggaggttgttatgaccacaaaggtggcagatatcctaccctagcatcctcagtacacatccctatgcccataagtggtccccacagtacaaggtggcctccctgtttttcgctgggaccgtttcaacaaaactctacatcagggcatggcagaggtctacaactttgattttattaccatgaaaccaattttgaaacttgatataaaatgaaggagggagatgacggactagaagactgtaaataagataccaaaggcactattttagctatgtttttcccatcagaattatgcaataaaatatattaacttgtcactttcaaaaaaaaaaaaaa

SEQ ID NO: 22312 - DNA, 306 bp, Homo sapiens
  SIMILAR (133)..(306): 1001254mologous to Homo sapiens probable carboxypeptidase precursor; 64imilar to P42660 (PID:g1718107),accession number AC005162,Smith-Waterman Score=307.
attatagggggctatgcagaattcctgtaccaaattggcttgttggatgagaagcaaaaaaagtacttccagaagcagtgccatgaatgcatagaacacatcaggaagcagaactggtttgaggcctttgaagaacctgaggatcagctttactatgtgaaatttttgtcactcccagaggtgagacaagccatccacgtggggaatcagacttttaatgatggaactatagttgaaaagtacttgcgagaagatacagtacagtcagttaagccatggttaactgaaatcatgaataattataag

SEQ ID NO: 22313 - DNA, 1793 bp, Homo sapiens
  SIMILAR (242)..(1435): 461254mologous to Homo sapiens Human serine carboxypeptidase MPHGNOT03,accession number W72965,Smith-Waterman Score=666.
gtaagttaaggtccccgtgcctgggtggggctgcctcacttctgcctgatttgggaatcgcttcaaggacaaccggctggggtccttgcgcgccgcggctcagggaggagcaccgactgcgccgcaccctgagagatggttggtgccatgtggaaggtgattgtttcgctggtcctgttgatgcctggcccctgtgatgggctgtttcgctccctatacagaagtgtttccatgccacctaaggggagactcaggacagccattatttctcaccccttacattgaagctggggagatccaaaagggaggagaattgagttcggtctggccctttcccaggactgagcatgaagaggtatcgccggcttcctcaccgtgaataacacttacaacagccacctcttcttctgggtcttcccaactcacatacagccagaagatgccccagtagttctctggctacagggtgggccgggaggttcatccatgtttggactctttgtgggaacatggggccttatgtttgttcacaagtaacatgacctttgcgtgacagagacttaccctggaccacaacgctctccatgctttatcattgacaatccagtgggcacagggcttcagttttactgatgatacccacggatatggcagtcaatgaggacgatgtaggcacgggatttatacagtgcactaatttcagtttttccagatatttcctgaatataaaaataatgacttttatgtcactggggagtcttatgcagggaaatatgtgccagccattgcacacctcatccattccctcaaccctgtgagagaggtgaagatcaacctgaacggaattgctattggagatggatattctgatcccgaatcaattatagggggctatgcagaattcctgtaccaaattggcttgttggatgagaagcaaaaaaaagtacttccagaagcagtgccatgaatgcatagaacacatcaggaagcagaactggtttgaggcctttgaaatacttggataaactacttagatggcgacttaacaagtgatcccttccttacttcccagaatgttacaggatgtagttaattactataactttttgcggtgcacggaacctgaggatcagctttactatgtgaaatttttgtcactcccagaggtgagaccagcccatcccacgttggggaatccagacttttaatggatggacctatagtttgaaaagtaccttgcggagaagataccagtaccagtccagttaagccatgggttaactgaaatccatgaataattatagggttctgatctaccaatggcccaactgggacatccatccgtggcagctgcccctgaccagagcgctcccttgatgggccatggactggaaaggatcccccggaatacaagaaggcagaaaaaaaaagtttggaagatctttaaatcctgacagtgaagtggcctggttacatcccggcaagtgggtgacttcccatcaggtaattattcgaggtggaggacatattttaccctatgaccagcctctgagagcttttgacatgattaatcgattcatttatggaaaaggatgggatccttatgttggataaactaccttcccaaaatgagaacatcaaagagttttcatttgctgaaagagaaaatcggtaaaaacacgaacaatgtcataggaaataaaaaaacttatcttttcaatatctgcaagattttttttcatgcaataaaaattatccttgaaaccacaaaaaaaaaaaaaagggcggccgct

SEQ ID NO: 22314 - DNA, 654 bp, Homo sapiens
  SIMILAR (1)..(213): 1001254mologous to Homo sapiens Human fetal brain cDNA clone vb3_1 derived protein,accession number Y50907,Smith-Waterman Score= 359.
tcagtggcactcaacacccgaaaattgtggagcatgcaccttcatgttcaagcaaagttgctccaagaaatagttcgctctttctctggcacaacctgccagcccattcaacatatgttacggcgtatttgtgttcaattgtgtgaccttgcctcaccaactgcacttctgattatgagaactgtgttggatttgattgtagaagacttgcaaaggtattttcattttgcattaaaaattttttcctcaaattatttttgacacatatattttttcccttacaatttggaaactagggtttggaatgcccagataacatatatacatgtaaatatacacatatacctacatatgcacacatatgaatatatgaatacttgtagacttttaaaattagaaagctttatttcatcatttcatgtgcaagatatcttgaaggtcttgatttgggattttcaaatggtgaatcctaaagaagtactgtgatttaagaaaatatattattagaaacctgaatttataaaatttttgcagtcattgtaaaattccagagaatttgtcattatacccaaggaattaaatgttttatgcaaaatttgtgtaagttgatgtgtattgacaaataaatactagtttaccaatgaaaatatatag

SEQ ID NO: 22315 - DNA, 3378 bp, Homo sapiens
  SIMILAR (1924)..(2643): 991254mologous to Cloning vector pZC320 SopA,accession number U26464,Smith-Waterman Score=1242.
atggacaacttcttcgccccggttttcaccatgggcaaatattatacgcaaggcgacaaggtgctgatgccgctggcgattcaggttcatcatgccgtttgtgatggcttccatgtcggcagaatgcttaatgaattacaacagtactgcgatgagtggcagggcggggcggattttgccgatttcggaaccaccatcaaacaggattttcgcctgctggggcaaaccagcgtggaccgcttgctgcaactctctcagggccaggcggtgaagggcaatcagctgttgcccgtctcactgagaaaacagaacacaagtagaccaccatctatgcatgtggatgactttgttgctgctgaaagtaaagaagtggttcctcaagatggaatacctccaccaaaacggccactcaaagtatcacagaagatttcttcccgtgtggaaaatctgaatacattgaacctgccaaaagagctcatgttgtgccaccaccaagaggaaggggcaggggaggatttggacagggtatacgacctcatgatatttttcgtcagagaaaacagaacacaagtagaccaccatctatgcatgtggatgactttgttgctgctgaaagtaaagaagtggttcctcaagatggaatacctccaccaaaacggccactcaaagtatcacagaagatttcttcccgtggtgggttttcaggcaatagaggaggacggggtgctttccacagtcagaataggtttttcacaccacctgcttcaaaaggctttgcagaactttcagcggtataccggcatacagcatgtgcatcgcataggaatggcggaacgtatgtggtgtgaccggaacagagaacgtcacaccgtcagcagcagcggcggcaaccgcctccccaatccagggccaggcggtgaagggcaatcagctgttgcccgtctcactggtgaaaagaaaacccaccctggcgcccaatacgcaaaccgcctctccccgcgcgttggccgattcattaatgcagctggcacgacaggtttcccgactggaaagcgggcagtgagcgcaacgcaattaatggattttgccgatttcggaaccaccatcaaacaggattttcgcctgctggggcaaaccagcgtggaccgcttgctgcaactctctcagggccaggcggtgaagggcaatcagctgttgcccgtctcactggtgaaaagaaaaaccaccctggcgcccaatacgcaaaccgcctctccccgcgcgttggccgattcattaatgcagctggcacgacaggtttcccgactggaaagcgggcaggattttgccgatttcggaaccaccatcaaacaggattttcgcctgctggggcaaaccagcgtggaccgcttgctgcaactctctcagggccaggcggtgaagggcaatcagctgttgcccgtctcactggtgaaaagaaaaaccaccctggcgcccaatacgcaaaccgcctctccccgcgcgttggccgattcattaatgcagctggcacgacaggtttcccgactggaaagcgggcaggattttgccgatttcggaaccaccatcaaacaggattttcgcctgctggggcaaaccagcgtggaccgcttgctgcaactctctcagggccaggcggtgaagggcaatcagctgttgcccgtctcactggtgaaaagaaaaaccaccctggcgcccaatacgcaaaccgcctctccccgcgcgttggccgattcattaatgcagctggcacgacaggtttcccgactggaaagcgggcaggattttgccgatttcggaaccaccatcaaacaggattttcgcctgctggggcaaaccagcgtggaccgcttgctgcaactctctcagggccaggcggtgaagggcaatcagctgttgcccgtctcactggctatcagagatgccgagaaagcagggcgactcccgcacccggatatggaaattcgaggacgggttgagcaacgtgttggttatacaattgaacaaattaatcatatgcgtgatgtgtttggtacgcgattgcgacgtgctgaagacgtatttccaccggtgatcggggttgctgcccataaaggtggcgtttacaaaacctcagtttctgttcatcttgctcaggatctggctctgaaggggctacgtgttttgctcgtggaaggtaacgacccccagggaacagcctcaatgtatcacggatgggtaccagatcttcatattcatgcagaagacactctcctgcctttctatcttggggaaaaggacgatgtcacttatgcaataaagcccacttgctggccggggcttgacattattccttcctgtctggctctgcaccgtattgaaactgagttaatgggcaaatttgatgaaggtaaactgcccaccgatccacacctgatgctccgactggccattgaaactgttgctcatgactatgatgtcatagttattgacagcgcgcctaacctgggtatcggcacgattaatgtcgtatgtgctgctgatgtgctgattgttcccacgcctgctgagttgtttgactacacctccgcactgcagtttttcgatatgcttcgtgatctgctcaagaacgttatcttaaagggttcgagcctgatggattttgccgatttcggaaccaccatcaaacaggattttcgcctgctggggcaaaccagcgtggaccgcttgctgcaactctctcagggccaggcggtgaagggcaatcagctgttgcccgtctcactggtgaaaagaaaaaccaccctggcgcccaatacgcaaaccgcctctccccgcgcgttggccgattcattaatgcagctggcacgacaggtttcccgactggaaagcgggcaggattttgccgatttcggaaccaccatcaaacaggattttcgcctgctggggcaaaccagcgtggaccgcttgctgcaactctctcagggccaggcggtgaagggcaatcagctgttgcccgtctcactggtgaaaagaaaaaccaccctggcgcccaatacgcaaaccgcctctccccgcgcgttggccgattcattaatgcagctggcacgacaggtttcccgactggaaagcgggcaggattttgccgatttcggaaccaccatcaaacaggattttcgcctgctggggcaaaccagcgtggaccgcttgctgcaactctctcagggccaggcggtgaagggcaatcagctgttgcccgtctcactggtgaaaagaaaaaccaccctggcgcccaatacgcaaaccgcctctccccgcgcgttggccgattcattaatgcagctggcacgacaggtttcccgactggaaagcgggcagtga

SEQ ID NO: 22316 - DNA, 651 bp, Homo sapiens
  SIMILAR (43)..(447): 1001254mologous to Homo sapiens Human signal peptide containing protein HSPP-12 SEQ ID NO:12,accession number Y87235,Smith-Waterman Score=679.
gagtgtctctgcgtctcgacggctgtacgaattcggcacgagcttaaaactatgttaacggaactcctgagaggtggatcctttgagtttaaggacatgcgtgttccttcagcgcttgttactttacatatgctcctgtgctctatccccctctcaggtcgtttggatagtgatgaacagaaaattcagaatgatatcattgatattttactgacttttacacaaggagttaatgaaaaactcacaatctcagaagagactctggccaataatacttggtctttaatgttaaaagaagttctttcttcaatcttgaaggttcctgaaggatttttttctggactcatactcctttcagagctgctgcctcttccattgcccatgcaaacaactcaggtatcacttccatataacatgcatcttataaatgactgcagtaacactttttaaaaagccagtgattctgttaaaaaacaaaaaccctcatctcccttcctcccaaaaagacataaaataaccggatgagggggagataaaactgaaacaagttggtcattgaggaaatatgggggtaaaaattttaaataaatttttgttaaagtgagttttattttgctgttttgtatgtttgtacttacatttttctgttat

SEQ ID NO: 22317 - DNA, 3175 bp, Homo sapiens
  SIMILAR (649)..(1797): 941254mologous to Homo sapiens KIAA1429 protein,accession number AB037850,Smith-Waterman Score=1768.
cgtcagccaacgcgcccccgtacgtgtgtctgaatgttgatgcccaccttcttttgttgaaggtcaccagaaagatctgaagggaggtgttgccgttattcagcttttttctgctgaaggaatggacacgtttattcgagttctgcaaaaattgaacagtattctgactcagccttggaggctccatgtcaacatggggactacccttcacagagttactactatttcaatggctcgctgcacactcactcttcttaaaactatgttaacggaactcctgagaggtggatcctttgagtttaaggacatgcgtgttccttcagcgcttgttactttacatatgctcctgtgctctatccccctctcaggccgtttgaatagtgatgaacagaaaattcagaatgatatcattgatattttactgacttttacacaaggagttaatgaaaaactcacaatctcagaagagactctggccaataatacttggtctttaatgttaaaagaagttctttcttcaatcttgaaggttcctgaaggatttttttctggactcatactcctttcagagctgctgcctcttccattgcccatgcaaacaactcaggttattgagccacatgatatatcagggggcactcaacaccccgaaaattgtggagcatgcaccttcatgttcaagcaaagttgctccaagaaatagttcgctctttctctggcacaacctgccagcccattcaacatatgttacggcgtatttgtgttcaattgtgtgaccttgcctcaccaactgcacttctgattatgagaactgtgttggatttgattgtagaagacttgcaaagcacttcagaagataaagaaaaacagtatactagccaaaccaccaggttgcttgctcttcttgatgctctggcttcacacaaagcttgtaaattagctattttgcatctaattaatggaactattaaaggtgatgaaagatatgcagagatattccaggatcttttagctttggtgcggtctcctggagacagtgttattcgccaacagtgtgttgaatatgtcacatccattttgcagtctctctgtgatcaggacattgcacttatcttaccaagctcttctgaaggttctatttctgaactggagcagctctccaattctctaccaaataaagaattgatgacctcaatctgtgactgtctgttggctacgctagctaactctgagagcagttacaactgtttactgacatgtgtcagaacaatgatgtttcttgcagagcatgattatggattatttcatttaaaaagttctttaaggaaaaacagtagtgctctgcataagttactgaaacgagtggtcagcacatttagtaaggacacaggagagcttgcatcttcatttttagaatttatgagacaaattcttaactctgacacaattgggatgctgtgggagatgataatgggtctcatgggaagtaggaggggagctcatacatcacggacgatgagtattaatgctgcagagttaaaccagcttctacagagcacagaagaaagtccagaggacttgttccttgaactagagaagcttgatttggaacattcaaaagatgatgacaatctgtattctttgttggactagtgacgtggacttaagcagatgctggagtcatcaggtgaccctttacctctcagtgaccaggatgtagaaccagtactttcagctccagaatctcttcagaatctgtttaacaataggactgcctatgtgcttgctgatgtcatgggatgatcagttgaaatctatgtggttcactccatttcaggctgaaggagataggtacagatctggatttggtaaaggttgacttaattgaactctctgaaaaatgctgtagtgactttgatttgcactcagaatttagagcgctcatttttgtcagaaccatcatctccaggaagaaccaagactactaaaggattcaaacttgggaagcacaagcatgagacctttataacgtcaagtggaaaatctgaatacattgaacctgccaaaaaagagttcatgttgtgcccaccaccaagaggaaggggcaggggaggatttggacagggtatacgacctcatgatatttttcggtcagagaaaacagaacacaagtagaccacccatctatgcatgtggatgactttggttgctgctgaaaagtaaagaagtggttcctcaagatggaatacttcccacccaaaccgcccactcaaagtatcacagaggatttcttcccgtgtggggttttcaggcaatagaggaggacggggtgctttccacagtcagaataggtttttcacaccacctgcttcaaaaggaaactacagtcgtcgggaaggaacaagaggctccagttggagtgctcagaatactcctcgaggaaattacaatgaaagtcgtggaggccagagcaattttaacagaggccctcttccacaattaatgaccccttaagttccctacaggttaacccgcccccaagtccctcgggacccgtgcttcctagatggtccgtgggggaccttgggaccttccctgggcttagtgcaaaattagcggcaagtggaggctcaagaggaaagtttgttagtggaggtcagtggtagaggtccgtcatgtacgtctcctttacacgataaaaatccttttgggaacatcttaactgtatatgaacatttcacgaggacaataaaaataagacattgaaggaccaatttagacttagcagttatctggagacatctgagagaatatttttatctgaagaaagcagaatttgtttggatacctaacaagatttcaataaaaatcccaaactttgtatgtacgtttgtatatattttcccttttttgtatgactatttatttagaaaatttctaggtgaaaaactaaatgatgttttgtatttttcttgcctatagcacagatattctcaaactttctcagctcatgacactatttagtgcctcagtacttttttcacagcatacctggtccaaaagaaatatctaatacttgtgtttattaagcagttagatccaacagcttaataagaatgtacatcatcaccactagtaactgtggacactgcatgtctcaaaccttggaatcagt

SEQ ID NO: 22318 - DNA, 3293 bp, Homo sapiens
  SIMILAR (2691)..(2843): 981254mologous to Homo sapiens Human type II GnRH-R protein fragment,accession number W52922,Smith-Waterman Score=277.
gtttttttttttttttttggagacagtcttactctgtcgggggtggggtgggggggaaagagaaaaataatacttcctaatatgttgcaaacaaagacctttaccaatccaagtgttaaaaagaagcctgttgctacagtgccatttacaattaggtttgtttatatgaagcaaattttacatgtggactgggaaattagaagactttttgtttccagtctgccctgttttactttgtttttttctgagtctcggctctactgctaactagctatatgattttggctaaggcacttgaaatcccatgggccacaagatgatgcaatgggaaatgaatttcatcctttcttacagcctgacaatctgacaatatttgcaacctctatttgtttcaatggcaaactggttgtgacatgatacatgtgcgaaaggtgattttttttgttccaaattagtatccttttaggtaaattctgtattgcccatatgctgtaattgtagttaaaatattagtgttaataaaataaaaaatttaataatgtcacgttagagtggtaagggcttaggggtagttataggtagtattaggagtagttagaaattacttatttttgtaggcttgtttccaagttatcagcagttgaaagggatgtttccaaaaggacgtggtaaatggcaataaaacaggataaaggaaagatcaaaacaaggctgtggaccaaactataaatccaagagctttgattattatttttttttttctttttggagacagtcttactctgtcgcccaggctggagtgcaatggcgcaatctctgctcactgcaagctccgcctcccgggctcaggtcattctcctgcctcagcctcccgagttcccaagtagctgggactacaggcacccaccaccacgcccggccagttttttgtatctttagtacagacagggtttcactgtgttagccagggatggtctccatctcctaacctcgtgatccgcccgcctcagcctcccaaagtgctggggattacaggcgtgagccaccgcggcccagccagctttgactatttttatacttcctcacaattcttaaggcacttcttaggcagagcacaaaaacaaaaacaaaaaaaaaaaacttagaaatatatgaatgcaagagatgggaagaggaaagaccatttcccaactagctcagagtaggcctgatcgtaactccaaacagttcacaaaattctcttaggctgaaactattcatctttcctaaatgtccctcatgtctgctaaaatcactttcccaaatgccttgtatctaggaatctgatgcctactgagcataccttttatcaaattaatagtgactcaatctcccattactggaaagcaggcactttaaccttgtagctctaaacagaaatagtttttactgattcagttggaaaacccagcaatttaacaaaaagggggaggggcagcccaatagcatttggaaaatgttaaattttattatttaacattctttaccattatagttactgcacataagactattactactaaaggtcacttcagagtccctgcaaaatggcctggaattttggcagcacccattttacacaatatttctttttccacaaaataacagacataccagggaaaatcatttcagctaaaaatatgagtgaggtggtagaagaaatatcatcccttataaagcgcaatgttaggaataggtacttgaggaaagcagggattgttttaaggttcccaaggattttaaccaaactttactggttcaggcatcatattcaaggcctaaaagggaaggatagggattttcaaggatatatttcccaacttctttaacatggcaccatggatgaaatgtttcctcaagcactgtgctgcttcacttggaaattaaggatgaaattgggaaggagacagtatgacataggtgggtatgttgggtggtgaggggaaccaagttctcaatagtcctcaactccactccagctgttccctgttccacacgggtccactgagctggcccagtccctttcactcagtgtgtcaccaaaggcagcttcaaggctcaatggcaagagaccacctataacctcttcaccttctgctgccctctttctgctgccactgaactgccatggccatctgcctatagcccgcattgtcctcagtgtgtccaggccccagacaaggaaggggagcccatggtgagactccaattccccagggccttaaacccttaaccctagaacctgttgcctctagcatccatttatttatctacctacctaatagctatctaccagtcactaaaccatggtgagattctaaccatgtctagcacctgatgctagagataattttgttgaatcccttcaattataaacagctgagttagctggacaaggactagggaggcaatcagtattatttattcttgaacaccatcaagtctagacttggtggcttcatatttctatcataatccctgggggtaagaaatcatatagtcccaggttgggaaggggaaaacggtttgcaacattcgtcctccttgtaggaggcgagctctgtctcactagctatgcccctccatcaattcaccctatactcagatcagaagctgagtgtctgaattacagtatattttctaaattcctagcccctgctggtgaatttgccctcccccgctcctttgacaattgtccccgtgttcgtctccgggccctgagactggccctgcttatcttgctgaccttcatcctctgctggacaccttattacctactgggtatgtggtactggttctccccccaccatgctaactgaagtccctcccagcctgagccacatccttttcctcttgggcctcctcaatgctcctttggatccctctccctcctatggggccttcacccttggctgccgaagagggcaccaagaacttagtatagactcttctaaagaagggtctgggagaatgctccaagaggagattcatgcctttagacagctggaagtacaaaaaactgtgacatcaagaagggcaggagaaacaaaaggcatttctataacatctatctgatcctaacagagtatgtaggaacagaatagtaagtctttagtgccataagatcttaacatctcacttctactcctgctctcctagttccccccaaaaaagaaatactgaccagtgtctctactttaaaccctacctgaaacttgagactatgtctaatatagaaactcacataactagcc

SEQ ID NO: 22319 - DNA, 409 bp, Homo sapiens
  SIMILAR (238)..(318): 881254mologous to Homo sapiens glutathione reductase (AA 1- 479),accession number X15722,Smith-Waterman Score=118.
ccttgtcttctgcgcagaaagatgatgccaactgagtgtgttctccactgagtggcacagaggcttttaacacatggggcagcataatgacacagggaagggatgactgtcttcggagacattcactcactgcggttgctgttgacagtcagtgattctctgctcggggtgttcagggacagatgccttagttactaactagaaggggaagatcctgtttctgaatactgacttgggtttcattgcagtgttattaaggaaaagcgggatgcctatgtgagccgcctgaatgccatctatcaaaacaatctcaccaaggtgtgtatgctgggtttttaactttgagaaagagctgttcccttcttgagtactcagctaagtcttgccagactgtagccctggttagttg

SEQ ID NO: 22320 - DNA, 1452 bp, Homo sapiens
  SIMILAR (691)..(1176): 981254mologous to Homo sapiens mitochondrial glutathione reductase,accession number AF228703,Smith-Waterman Score=842.
atggccctgctgccccgagccctgagcgccggcgcgggaccgagctggcggcgggcggcgcgcgccttccgaggcttcctgctgcttctgcccgagcccgcggccctcacgcgcgccctctcccgtgccatggcctgcaggcaggagccgcagccgcagggcccgccgcccgctgctggcgccgtggcctcctatgactacctggtgatcgggggcggctcgggcgggctggccagcgcgcgcagggcggccgagctgggtgccagggccgccgtggtggagagccacaagctgggtggcacttgcggcctggggaacttgcggtcctgggttcctgctgagtgtactgattctgtgataagaataaccaggttcctgtggttttggcgagtagtacttaccaatgagagttgggtagtaagggttgatcatgtgacaaaagttcatgattgccaagtcacagtgaactatgctgcacagcagcagttggagaggcctaggggagagagaggtcagctagagcagcagtccccagcctttttggcaccaggaaccagttttgtggaagacaatttttccacggaccagcagtggggcacctggcggtcagggagccctgagctagagaaaggggaaagaaggctgagtgcggtggctcatgcttgtaattccaacttttgggaggctaacgtgaatgttggatgtgtacccaaaaaggtaatgtggaacacagctgtccactctgaattcatgcatgatcatgctgattatggctttccaagttgtgagggtaaattcaattggcgtgttattaaggaaaagcgggatgcctatgtgagccgcctgaatgccatctatcaaaacaatctcaccaagtcccatatagaaatcatccgtggccatgcagccttcacgagtgatcccaagcccacaatagaggtcagtgggaaaaagtacaccgccccacacatcctgatcgccacaggtggtatgccctccacccctcatgagagccagatccccggtgccagcttaggaataaccagcgatggattttttcagctggaagaattgcccggcgtcattgttggtgcaggttacattgctgtggagatggcagggatcctgtcagccctgggttctaagacatcactgatgatacggcatgataagatcaaccatggcacagtgggaacagatgacggcacaaggtctgaatatcgggagagagggatcgttgaggtctgtcttggaggctggctcccactctgctctctatcccccaaaaatccacagtcctcccacatgatgagtacagtgtccacagttattcctatgtcctccagcgactggcctccctccactgccagaggccgtctgggaaaggaagtagaaaggctgtatagagatatgtggtacccaattctcgtcatccagtcaaataagacctag

SEQ ID NO: 22321 - DNA, 2007 bp, Homo sapiens
  SIMILAR (664)..(2004): 941254mologous to Homo sapiens mitochondrial glutathione reductase,accession number AF228703,Smith-Waterman Score=2167.
atggccctgctgccccgagccctgagcgccggcgcgggaccgagctggcggcgggcggcgcgcgccttccgaggcttcctgctgcttctgcccgagcccgcggccctcacgcgcgccctctcccgtgccatggcctgcaggcaggagccgcagccgcagggcccgccgcccgctgctggcgccgtggcctcctatgactacctggtgatcgggggcggctcgggcgggctggccagcgcgcgcagggcggccgagctgggtgccagggccgccgtggtggagagccacaagctgggtggcacttgcggcctggggaacttgcggtcctgggttcctgctgagtgtactgattctgtgataagaataactaggttcttgtggttttggcgagtagtacttaccaatgagagttgggtagtaagggttgatcatgtgacaaaagttcatgattgccaagtcacagtgaactatgctgcacagcagcagttggagaggcctaggggagagagaggtcagctagagcagcagtccccagcctttttggcaccaggaaccagttttgtggaagacaatttttccacggaccagcagtgggtcagaggcgctgaagtcatgtcatgttgctggcatgtaaataggcctctaaaagcagtggaaatccctggaggcctgttcacaggagctggcaaaataggacagtggtatttcagggtcataggcttcctttcaaccagtgccccaggccccaaagtgaatgttggatgtgtacccaaaaaggtaatgtggaacacagctgtccactctgaattcatgcatgatcatgctgattatggctttccaagttgtgagggtaaattcaattggcgtgttattaaggaaaagcgggatgcctatgtgagccgcctgaatgccatctatcaaaacaatctcaccaagtcccatatagaaatcatccgtggccatgcagccttcacgagtgatcccaagcccacaatagaggtcagtgggaaaaagtacaccgccccacacatcctgatcgccacaggtggtatgccctccacccctcatgagagccagatccccggtgccagcttaggaataaccagcgatggattttttcagctggaagaattgcccggcgtcattgttggtgcaggttacattgctgtggagatggcagggatcctgtcagccctgggttctaagacatcactgatgatacggcatgataaggtacttagaagttttgattcaatgatcagcaccaactgcacggaggagctggagaacgctggcgtggaggtgctgaagttctcccaggtcaaggaggttaaaaagactttgtcgggcttggaagtcagcatggttactgcagttcccggtaggctaccagtcatgaccatgattccagatgttgactgcctgctttgggccattgggcgggtcccgaataccaaggacctgagtttaaacaaactggggattcaaaccgatgacaagggtcatatcatcgtagacgaattccagaataccaacgtcaaaggcatctatgcagttggggatgtatgtggaaaagctcttcttactccagttgcaatagctgctggccgaaaacttgcccatcgactttttgaatataaggaagattccaaattagattataacaacatcccaactgtggtcttcagccacccccctattgggacagtgggactcacggaagatgaagccattcataaatatggaatagaaaatgtgaagacctattcaacgagctttaccccgatgtatcacgcagttaccaaaaggaaaacaaaatgtgtgatgaaaatggtctgtgctaacaaggaagaaaaggtggttgggatccatatgcagggacttgggtgtgatgaaatgctgcagggttttgctgttgcagtgaagatgggagcaacgaaggcagactttgacaacacagtcgccattcaccctacctcttcagaagagctggtcacacttcgttga

SEQ ID NO: 22322 - DNA, 1631 bp, Homo sapiens
  SIMILAR (6)..(1556): 781254mologous to Homo sapiens mitochondrial glutathione reductase,accession number AF228703,Smith-Waterman Score=1948.
gagcgccggcgcgggaccgagctggcggcgggcggcgcgcgcttccgaggcttcctgctgcttctgcccgagcccgcggcctcacgcgcgccctctcccgtgccatggcctgcaggcaggagccgcagccgcagggcccgccgcccgctgctggcgccgtggcctcctatgactacctggtgatcgggggcggctcgggcgggctggccagcgcgcgcagggcggccgagctgggtgccagggccgccgtggtggagagccacaagctgggtggcacttgcgtgaatgttggatgtgtacccaaaaaggtaatgtggaacacagctgtccactctgaattcatgcatgatcatgctgattatggctttccaagttgtgagggtaaattcaattggcgtgttattaaggaaaagcgggatgcctatgtgagccgcctgaatgccatctatcaaaacaatctcaccaagtcccatatagaaatcatccgtggccatgcattctttatcgagtgatcccaagcccacaatagaggtcagtgggaaaaagtacaccgccccacacatcctgatcgccacaggtggtatgtcccttccacccctcattgagagccgagatcccgcggtgccagcttatgaataaccagcgatggattttttcagctggaagaaattgtcccggccgcagcgtcattggttggtgcacggttaccattgtctgtggagatggcagggatcctcgtcagccctgggttctaagacatcactgatgatacggcatgattaaggtacttagaagttttgattcaatgatcagcaccaactgcacggaggagctggagaacgctggcgtggaggtgctgaagttctcccaggtcaaggaggttaaaaaggctttggtcgggtttggaagccagcatggttactgcagttcccggtaggctaccagtcatgcccatgattccagatgttgactgcctgctctgggccattggcggggtcccgaataccaaggacctgagtttaaacaaactggggattcaaaccgatgacaagggtcatatcatcgtagacgaattccagaataccaacgtcaaaggcatctatgcagttggggatgtatgtggaaaagctcttcttactccagttgcaatagctgctggccgaaaacttgcccatcgactttttgaatataaggaagattccaaattagattataacaacatcccaactgtggtcttcagccacccccctattgggacagtgggactcacggaagatgaagccattcataaatatggaatagaaaatgtgaagacctattcaacgagctttaccccgatgtatcacgcagttaccaaaaggaaaacaaaatgtgtgatgaaaatggtctgtgctaacaaggaagaaaaggtggttgggatccatatgcagggacttgggtgtgatgaaatgctgcagggttttgctgttgcagtgaagatgggagcaacgaaggcagactttgacaacacagtcgccattcaccctacctcttcagaagagctggtcacacttcgttgagaaccaggagacacgtgtggcgggcagtgggacccctagatcttctgaattgaaacaaataatcacattgac

SEQ ID NO: 22323 - DNA, 464 bp, Homo sapiens
  SIMILAR (93)..(464): 581254mologous to Mus musculus gtf2ird2,accession number AY014963,Smith-Waterman Score=361.
  misc_feature (1)...(464): n = a,t,c or g
ttgacccgtcgcctgagtagaggccctaattccgggctatcaggacgnnnttgcgggcgcgcgcacgcaaggacgtacttcttctatcgtgcctactaaaaccgatccactggccgactcattacaccaggaannnnnnnnnnnnnnnnnnnnnnnnnnnnnnnnnnnnnnnnnnnnnnnnnnnnnnnnnnnnnnnnnnnnnnnnnnnnnnnnnnnnnnagaccgaattccagaaaaggctgtctgatttcaaactctacgaaagcgaactgactctgttcagctccccgttctccacgaagatcgacagtgtgcacgaggagctccagatggaggttatcgacctgcaatgcaacacggtcctgaagacgaaatacgacaaggtgggaataccagaattctacaagtacctctggggtagctacccgaaatacaagcaccattgcgcaaagattctttccatg

SEQ ID NO: 22324 - DNA, 1184 bp, Homo sapiens
  SIMILAR (327)..(1169): 901254mologous to Homo sapiens unknown,accession number AF148856,Smith-Waterman Score=1366.
attccactccgctggtcccttcagaagaaccaaatgaggaccctgaagccgaggtgaaaatcgaaggaaacacaaattcatccagtgttacaaattctgcagcaggtgttgaagatcttaacatcgttcaagtgactgttccagataatgagaaggaaagattatcaagcattgaaaagattaaacagctaagagaacaagttaatgacctctttagccgaaaatttggtgaagcaattggcgtggatttccctgtgaaagttccctacaggaagatcacattcaaccctggctgtgtggtgattgatggcatgcccccgggggtggtattcaaggcccccggctatctggaaatcagttccatgaggaggatcttggaggcagctgagtttatcaaattcacagtcatcagaagctctttaaaatacctaggaatccaacttacaagggatgtgaaggacctcttcaaggagaactacaaaccactgctcaaggaaataaaagaggacacaaacaaatggaagaacattccatgctcatgggtaggaagaatcaatatcgtgaaaatggccatactgcccaaggtaatttacagattcaatgccatccccatcaagctaccaatgactttcttcacagaattggaaaaaactactttaaagttcatatggaaccaaaaaagagcccgcattgccaagtcaatcctaagccaaaagaacaaagctggaggcatcacactacctgacttcaaactatactacaaggctacagtaaccaaaacagcatggtactggtaccaaaacagagatatagatcaatggaacagaacagagccctcagaaataatgccgcatatctacaactatctgatctttgacaaacctgagaaaaacaagcaatggggaaaggattccctatttaataaatggtgctgggaaaactggctagccatatgtagaaagctgaaactggatcccttccttacaccttatacaaaaatcaattcaagatggattaaagatttaaacgttaaacctaaaaccataaaaaccctagaagaaaacctaggcattaccattcaggacataggcgtgggcaaggacttcatgtccaaaacaccaaaagcaatggcaacaaaagacaaaattgacaaatgggatctaattaaacatattatcaaataa

SEQ ID NO: 22325 - DNA, 1015 bp, Homo sapiens
  SIMILAR (350)..(412): 661254mologous to Homo sapiens PRO2550,accession number AF130089,Smith-Waterman Score=65.
agctacaaatgtatttttctttttttaaaaaatattctttatttcttctaaaaaaaaaaagggggggatacatctgcagaatgtgcaggtttgtttcctaggcacatgtgtgccacaatggcttgctgcacctattggcccatcctctaagttccctcccctcacccaaattcaagttttgtttttttttttttgagacggagtcttgctcagtcgcccagtctggagtgcagtggcgcgatctccgctcactgcaagctccacctcccgggttcacgccattctcctgcctcagacacccgagtagctgggactacaggcgcccgccaccacgcccggctaatttttttttgtatttttagtacagactgggcttcaccgtgttagccaggatggtcgcgatctcctgacctttgtgatccacctgcctcagcctcccaaagtgctgggattacaggtgtgagccatcacgcccggcccccaattcaagttttaatgaagaagaagtggttcagcagctcagaagagccaccaaacctgagaagctgtcacttacccagctgactctctggtcctaggaagggtctgcaagaaaagcaacaccattacccagcacggaccaatgaaaaaagcatgacacatctgaacagtcagctctgaaacgcagcaggcgggatgcacgagtgaattaaaattaggctattggtttcatctttaaatgaactgaaggggcgggggtgcagagtgtgtcacctatttatgatgaatgaaatccctgctttgttctccaaaatccatttcagggttgcaaggtcgtaattctcagggtgttgaaaggcaacgccttccggaagcccctgcactaccacagccgactggtctcgcagcatcttctcatagggaacaggcaccatcactgttgtccctaaggctttacctacaagaagacgcaaacgtctttggatggtgtgaacctaacgttctacccgtttttttttgtttgttttttgttttt

SEQ ID NO: 22326 - DNA, 3789 bp, Homo sapiens
  SIMILAR (196)..(1659): 971254mologous to Homo sapiens Bruton's tyrosine kinase- associated protein-135; BAP-135,accession number U77948,Smith- Waterman Score=2479.
atggtgtggggaatgtctcccaacaagacaccttatcaagcgctctctctccactctgctgttcctaccacatattcccaggcagatgatgattattctccaccgtctaagagaccaaaggccaatgagctaccgcagccaccagtcccggaacccgccaatgctgggaagcggaaagtgagggagttcaacttcgagaaatggaatgctcgcatcactgatctacgtaaacaagttgaagaattgtttgaaaggaaatatgcggaagccttggggagcactgaagccaaggctgtaccgtaccaaaaatttgaggcacacccgaatgatctgtacgtggaaggactgccagaaaacattcctttccgaagtccctcatggtatggaatcccaaggctggaaaaaatcattcaagtgggcaatcgaattaaatttgttattaaaagaccagaacttctgactcacagtaccactgaagttactcagccaagaacgaatacaccagtcaaagaagattggaatgtcagaattaccaagctacggaagcaagtggaagagatttttaatttgaaatttgctcaagctcttggactcaccgaggcagtaaaagtaccatatcctgtgtttgaatcaaacccggagttcttgtatgtggaaggcttgccagaggggattcccttccgaagccctacctggtttggaattccacgacttgaaaggatcgtccacgggagtaataaaatcaagttcgttgttaaaaaacctgaactagttatttcctacttgcctcctgggatggctagtaaaataaacactaaagctttgcagtcccccaaaagaccacgaagtcctgggagtaattcaaaggttcctgaaattgaggtcaccgtggaaggccctaataacaacaatcctcaaacctcagctgttcgaaccccgacccagactaacggttctaacgttcccttcaagccacgagggagagagttttcctttgaggcctggaatgccaaaatcacggacctaaaacagaaagttgaaaatctcttcaatgagaaatgtggggaagctcttggccttaaacaagctgtgaaggtgccgttcgcgttatttgagtctttcccggaagacttttatgtggaaggcttacctgagggtgtgccattccgaagaccatcgacttttggcattccgaggctggagaagatactcagaaacaaagccaaaattaagttcatcattaaaaagcccgaaatgtttgagacggcgattaaggagagcacctcctctaagagccctcccagaaaaataaattcatcacccaatgttaatactactgcatcaggtgttgaagaccttaacatcattcaggtgacaattccagatgatgataatgaaagactctcgaaagttgaaaaagctagacagctaagagaacaagtgaatgacctctttagtcggaaatttggtgaagctattggtatgggttttcctgtgaaagttccctacaggaaaatcacaattaaccctggctgtgtggtggttgatggcatgcccccgggggtgtccttcaaagcccccagctacctggaaatcagctccatgagaaggatcttagactctgccgagtttatcaaattcacggtcattagagtcttcctgaaacacagctacacccgtattatccatggctgctttcctgtcacagctcagaggctcaggcaagagctacagatgctcatgaccgaatgtctcacctgggccaggaatggcagcagcaagcaccctctcagcctagcccagaagccagagttcctatttcatcagttgcaaagcagagacaatgccatctgcccgatagcagagcaaaaggcaggtaaagccttagggacaacagtgatggtgtctgttccctatgagaagatgctgcgagaccagtcggctgtggtagtgcaggggcttccggaaggcgttgcctttcaacaccctgagaattacgaccttgcaaccctgaaatggattttggagaacaaagcagggatttcattcatcataaatagacccttcctaggaccagagagtcagctgggtggccctgggatggtaacagatgcggagagatccatagtatcaccaagtgaaagctgcggccccatcaatgtgaaaactgaacccatggaagattctggaagccacccttcttccacaagcaatgaagtaatagaaatggaattaccaatggaagattccactccgctggtcccttcagaagaaccaaatgaggaccctgaagccgaggtgaaaatcgaaggaaacacaaattcatccagtgttacaaattctgcagcaggtgttgaagatcttaacatcgttcaagtgactgttccagaacctgctaaggccatcaaacctattgatcggaagtcagtccatcagatttgctctgggccggtggtactgagtctaagcactgcggtgaagaagatagtaggaaacagtctggatgctggtgccactaatattgatctaaagcttaaggactatggaatggatctcattgaagtttcaggcaatggatgtggggtagaagaagaaaacttcgaaggcttaactctgaaacatcacacatctaagattcaagagtttgccgacctaactcgggttgaaacttttggctttcgggggaaagctctgagctcactttgtgcactgagtgatgtcaccatttctacctgccacgtatcggcgaaggttgggactcgactggtgtttgatcacgatgggaaaatcatccagaaaaccccctacccccaccccagagggaccacagtcagcgtgaagcagttattttctacgctacctgtgcgccataaggaatttcaaaggaatattaagaaggtaattgcgcgacgtattatcgattatcgctacgacatgccctatgtacgggaaacgtatcaggacagcggcctgacttttacgatcgagcagcatgaagatttaaactgtgcgaccttgccattgtacttctccaaagctagtgtcttcaccgctctgcaaaatatggcaaagtcaacggtagctctcatcaccactgcggcccgagaccggagctcggccggcgcgggggcggcggcgcgggcgggccgacaaaagggaggagcccgccaattgcaaggggagcgcgggcgagggagcagcgccgcagagcagcagccgaggggcgagcggcggagcagccggcgcgcgggtgccggcgcggggagcagctggtgttcgctgtaacaaacaacttgccactcaaacgccggtccccgctgcgcatgcgcggtccgcgcgcggcctgccaggacttgtagtccgcctgggggggctcccccggtgctgctgctgctgctgctgttgctgctgttgctgccgcgggggctgggcggccggagctaccggcagcccggtgcacgggaaatgcaggagcgcgggcaccctcaggaccacggggaaggccgaggggaggcacggggcgggtggagccagcctgagcctaggcgcgccctctggcacccactcaggctcggtactaggcgcttggagtgtaaagcgagcaaaccagacgactccggtgctggagaaggcccgagtctgggagcgccaagatgtagggcaatcggtcatgagagtgcagagaagccaaaccaaaaagcttgcacgtgatcttgtcggcccgccttcatcttccactatgataggaggcttcctgcggtcctcactagcagcagatgctggcaccat

SEQ ID NO: 22327 - DNA, 541 bp, Homo sapiens
  SIMILAR (106)..(351): 771254mologous to Mus musculus GTF2I,accession number AF289666,Smith-Waterman Score=295.
  misc_feature (1)...(541): n = a,t,c or g
ccgcgcggggctctcggccgccgccctcggccatcggctgctccccggtggcccaggcctcggactccgcggccggcccggcgcggcccagcgccctcagggatcatggcccaggtagcaagtgtcccaccctgngcctgttgaagaagagatcctccctcagagaccaggatggtggtgacattcctcgtgtctgccctcgaatccatgtgtaaagaactggccaagtccaaggcagaagtggcctgcatcgcagtgtacgaaacagacgtgtttgtcgtcggaaccgagagaggatgcgcttttgttaatgccaggacggattttcagaaagattttgcaaaatactgtaggtgttttaattttatcctttgtattcccaatctcaaaaggatcgcaggcaagacttccacagtattttcttctaagctatcataagcattctcctagaaacgatcctaacacatcttcttggattcagcttaccaaataaacactgcttaacactgcagagtccaagaaaaaaaaaaaaaaaaaattt

SEQ ID NO: 22328 - DNA, 3756 bp, Homo sapiens
  SIMILAR (1369)..(2436): 721254mologous to Mus musculus gtf2ird2,accession number AY014963,Smith-Waterman Score=1267.
atgcctggctaccgtgctgggcctttcgaggaggcatttgacagggaagatgagagacaaattgagtgtcagggaaggggtgttgatagaaaaattacaggagagcacacaactttcagcgggagatcaggtccggaccatgagctgaccctggactcaggcaagggctgtacaagaagcatggtgccagcatctgctgctagtgaggaccgcaggaagcttcctatcatagtggaagatgaaggggggccgacaagatcacgtgcgtgctcgtcccccgcgcggggctctcggccgccgccctcggccatcggctgctccccggtggcccaggcttcggactccgcggccggcccggcgcggcgcaccgcccttcagtcacttagtagctggctcggttatcagatcgaccgtcacagtgtcccagtgtatgtgttcaagtcacccttattttccgtcataatggccccaaagcacaagagtagtgatgctgggaatttggataggccaaagagaagccgtaaagtgcttcctctaagtgaaaaggtgaaagttctcgacttaatcaggaaagacaaaaaatcctatgctgaggttgctaagatctacgggaagaatgaatcttccatccgtgaaattgtgaagaaggaaaaagaaattcgtgctagttttgctgtctcacctccaactgctaaagtgacggccacagtgcgtgataagtgcttagttaagatggaacaggcactgcatttgtgggtggaagagatgaacagaaaacgtgttcccattgacagcaacatgttgcgccagaaagctttgagcctataccaagacttctgcaagggatgctctgaaactgacaccaagccatttactgcgagtaagggatggttacacagattcaggcatagattctcacatcattacaagaagaagaagaaggggatcatggcccaggtagcagtgtccaccctgcctgttgaagaagagtcctcctcagagaccaggatggtggtgacattcctcgtgtctgccctcgaatccatgtgtaaagaactggccaagtccaaggcagaagtggcctgcatcgcagtgtacgaaacagacgtgtttgtcgtcggaaccgagagaggatgcgcttttgataatgccaggacggattttcagaaagattttgcaaaatactgtaaagccttagggacaacagtgatggtgcctgttccctatgagaagatgctgcgagaccagtcggctgtggtagtgcaggggcttccggaaggcgttgcctttcaacaccctgagaattacgaccttgcaaccctgaaatggattttggagaacaaagcagggatttcattcatcataaatagacccttcctaggaccagagagtcaactgggtggccctgggatggtaacagatgcggagagatccatagtatcaccaagtgaaagctgcggccccatcaatgtgaaaactgaacccatggaagattctggaagccacccttcttccacaagcaatgaagtaatagaaatggaattaccaatggaagattccactccgctggtcccttcagaagaaccaaatgaggaccctgaagccgaggtgaaaatcgaaggaaacacaaattcatccagtgttacaaattctgcagcaggtgttgaagatcttaacatcgttcaagtgactgttccagataatgagaaggaaagattatcaagcattgaaaagattaaacagctaagagaacaagttaatgacctctttagccgaaaatttggtgaagcaattggcgtggatttccctgtgaaagttccctacaggaagatcacattcaaccctggctgtgtggtgattgatggcatgcccccgggggtggtattcaaggcccccggctatctggaaatcagttccatgaggaggatcttggaggcagctgagtttatcaaattcacagtcatcaggccgcttccagggcttgagctcagtaatggtgagtattctacagtgggaaaacgcaagatagaccaggagggccgtgtgtttcaagaaaagtgggagagagcgtatttcttcgtggaagtacagaatattccaacatgtctcatatgcaaacaaagcatgtctgtgtccaaagaatataacctaagacgccactatcaaaccaatcacagcaagcattatgaccagtatatggaaagaatgcgtgacgagaagcttcacgagctgaaaaaagggctcaggaagtatctcttaggcttgtcagacaccgagtgtcccgagcaaaaacaagtgtttgcaaacccaagtccaacccagaaatcccccgtgcagcctgtagaggacctagctgggaacttatgggagaagttacgtgaaaaaatcaggtcttttgtggcatattctatcgcaatcgatgagatcacgggtattaaataataccacccagttggccatattcatccgtggtgccgatgagaatttcgatgtgcccgaagaacttctggacacggtgcccatgacgggtacaaaatctggcaacgagatcttttcgcgtgttgagaaaagcctgaaaaacttctgtatcgactggccgaaattatttagcgtggcctccactggcaccccagcgatggtggatgccaataacgggcttgtcacaatactgaagtccagggtggcgacgttctgcaagggtgcggaactgaagtccatctgttgtataattcatccgggaatcacctctgtgctcaagaagttgaagattgggcaacgtcatggacgtggtagtgaagtccgtgaactggatatgctcccggggactgaaccacagcgagttcagaaccttgctctatgagctggacagccagtatggtagcctcctgtactacacggagattaagtggctcagtcgcgggctcgtgctaaagagatttttcgaatccttggaagaaatcgactccttcatgtcatccagagggaaacccctgcctcaactgagctccatagattggatccgagacctggccttcttggttgacatgacgatgcatctgaacgctttgaacatctctctccaaggacactcccaaatcgtcacgcagatgtatgacctgatccgggcgttcctagcaaaactgtgcctctgggagactcatttgactaggaatatatctggcccactttcccaccctgagattggcttccagaaatgaaagcgatggcctgaactacattcccaaaatcgcggaactcaagaccgaattccagaaaaggctgtctgatttcaaactctacgaaagcgaactgactctgttcagctccccgttctccacgaagatcgacagtgtgcacgaggagctccagatggaggttatcgacctgcaatgcaacacggtcctgaagacgaaatacgacaaggtgggaataccagaattctacaagtacctctggggtagctacccgaaatacaagcaccattgcgcatagattctttccatgttcgggagcacctacattctgcgaacagctgttctccattatgaaactgagcaaaacaaaatactgctcccagttaaaggattcccagtgggattctgtactccacatcgcaacgtgatggagagaaaactcctggcagggccctatggtacagctgggtctggcaagctcagcgctcttttggagaaggaatcccagataggctggtttataacgggagttggaggggagtccaggtcttggtggaagtga

SEQ ID NO: 22329 - DNA, 493 bp, Homo sapiens
  SIMILAR (3)..(236): 971254mologous to Homo sapiens vascular endothelial junction- associated molecule,accession number AF255910,Smith-Waterman Score= 401.
ctgtggtagagctacgatgtcaagacaaagaagggaatccagctcctgaatacacatggtttaaggatggcatccgtttgctagaaaatcccagacttggctcccaaagcaccaacagctcatacacaatgaatacaaaaactggaactctgcaatttaatactgtttccaaactggacactggagaatattcctgtgaagcccgcaattctgttggatatcgcaggttcctgggaaacgaatgcaagtagatgatctcaacataagtggcatcatagcagccgtttgtggccttggtgtatgctatgctcagaggaaaggctacttttcaaaagaaacctccttccagaagagtaattcttcatctaaagccacgacaatgagtgaaaatgatttcaagcacacaaaatcctttataatttaaagactccactttagagatacaccaaagccaccgttgttacacaagttattaaactattataaaactctg

SEQ ID NO: 22330 - DNA, 208 bp, Homo sapiens
  SIMILAR (1)..(207): 1001254mologous to Homo sapiens vascular endothelial junction -associated molecule,accession number AF255910,Smith-Waterman Score =357.
caatttaatactgtttccaaactggacactggagaatattcctgtgaagcccgcaattctgttggatatcgcaggtgtcctgggaaacgaatgcaagtagatgatctcaacataagtggcatcatagcagccgtagtagttgtggccttagtgatttccgtttgtggccttggtgtatgctatgctcagaggaaaggctacttttcaa

SEQ ID NO: 22331 - DNA, 581 bp, Homo sapiens
  SIMILAR (140)..(298): 981254mologous to Homo sapiens vascular endothelial junction- associated molecule,accession number AF255910,Smith-Waterman Score= 265.
tttttttttttttttttaggctttaaacttgagtttattaaaagggaaataaatgctttggttactaaatgaactgattagaggaaggtattacacagaaagctacttggattattactaacatcaatgtcttctttttctaaaaggtgattttaaaaatcgagctgagatgatagatttcaatatccggatcaaaaatgtgacaagaagtgatgcggggaaatatcgttgtgaagttagtgccccatctgagcaaggccaaaacctggaagaggatacagtcactctggaagtattaggtgatgtgcatgtatgtgtgtgactacgtctcccactccttctccaccacccagccctgggggcaagcaagcactggtccataaacatgccagcatcaactgggagcctcaaccagtcaagttacagagaccataagcatcaccttcctggcaatctcctggccatttctccccctctcctcattggctgctgaaattttagtaatgcgttatcacaaagtatctctttgttaaaggtggaggcaattcctaatgatcctacaatatacataggagtatctt

SEQ ID NO: 22332 - DNA, 1430 bp, Homo sapiens
  SIMILAR (245)..(601): 1001254mologous to Homo sapiens vascular endothelial junction -associated molecule,accession number AF255910,Smith-Waterman Score =607.
  misc_feature (1)...(1430): n = a,t,c or g
ccacacccccaaaacagaacagacccccatccctgggctggaggacccgcctcttggcagccagctgagaaggcgccccggggagggggaaactgacatcccatctagagccgtccctcctcttcctcccctcccgactctctgctcctttcccgccccagaagttcaagggcccccggcctcctgcgctcctgccgccgggaccctcgacctcctcagagcagccggctgccgccccgggaagatggcgaggaggagccgccaccgcctcctcctgctgctgctgcgctacctggtggtcgccctgggctatcataaggcctatgggttttctgccccaaaagaccaacaagtagtcacagcagtagagtaccaagaggctattttagcctgcaaaaccccaaagaagactgtttcctccagattagagtggaagaaactgggtcggagtgtctcctttgtctactatcaacagactcttcaaggtgattttaaaaatcgagctgagatgatagatttcaatatccggatcaaaaatgtgacaagaagtgatgcggggaaatatcgttgtgaagttagtgccccatctgagcaaggccaaaaacctggaagaggatacagtcactctggaagtattaggtgatgtgcatgtattggctccagcagttccatcatgtgaagtaccctcttctgctctgagtggaactgtggtagagctacgatgtcaagacaaagaagggaatccagctcctgaatacacatggtttaaggatggcatccgtttgctagaaaatcccagacttggctcccaaagcaccaacagctcatacacaatgaatacaaaaactggaactctgcaatttaatactgtttccaaactggacactggagaatattcctgtgaagccccgcaattctgttggataatcggagggtccttgcgaaacgaatgccagtagatgatctcaacataaagtgggcatcataggcagccgtagttagttgtgggccttagttgattttccttttgtgggcctggtgtatggntatggctcagagggaaaggctactttttcaaaagaaacctccttccagaagagtaattcttcatctaaagccacgacaatgagtgaaaatgatttcaagcacacaaaatcctttataatttaaagactccactttagagatacaccaaagccaccgttgttacacaagttattaaactattataaaactctgctttgtccgacatttgcaaagaggtacacgaggaaatggaattggtatttcattttaattttcatgactactaactcacctgaacttgctattttaaacaaatagttctgtcgacacctaaaatataatctggcttcttgtgtctggactaagttaaaagaattaaaatactttgtaatgtcaaaaaaaaa

SEQ ID NO: 22333 - DNA, 382 bp, Homo sapiens
  SIMILAR (26)..(139): 941254mologous to Homo sapiens hypothetical protein,accession number AL133105,Smith-Waterman Score=197.
cccatgacttcttctccccctcaggtgggaggtcaatcccctttactgtgacacagtgaaacagatctacccgtacaacaacagccagcggctcctcaatgtcatcgacatggccatcttcgacttcttgatagcctcagaagtggcggaggtcccagaggacagaaggtaacaggctcccctctcttcaaagaactggaagaagctcaaggggtcgtcactcataaggcaggcatctcaccctgccacgggcctgagtgggcgtcagattggaagctgtatgttcacttcaccaagtgaggggaaaccagggaatatggaccggcaccattatgagatgttcaccaaagttcgggatgatgggttcctattcaccttgaca

SEQ ID NO: 22334 - DNA, 682 bp, Homo sapiens
  SIMILAR (451)..(41): 321254mologous to Homo sapiens Human secreted protein HUSXE77, SEQ ID NO:180,accession number Y86265,Smith-Waterman Score =117.
atgccggggctgcgccgggaccgcctactgactctgctactgctgggcgcgctgctctccgccgacctctacttccacctctggccccaagtacagcgccagctgcggcctcgggagcgcccgcgggggtgcccgtgcaccggccgcgcctcctccctggcgcgggactcggccgcagctgcctcggaccccggcacgatcgtgcacaacttttcccgaaccgagccccggactgaaccggctggcggcagccacagcgggtcgagctccaagttgcaggccctcttcgcccacccgctgtacaacgtcccggaggagccgcctctcctgggagccgaggactcgctcctggccagccaggaggcgctgcggtattaccggaggaaggtggcccgctggaacaggaggctaatgcagacttgttcatatagtggcaacagggttgcaaaagagggtagaagcctccacagcctcttgaagtacaggccagaacctgttaaatgtcatttctgccatactatgttggccaacataaatcaaaggctatctggggagattcaggaatcctggccattgaagagaaagtggtctacacaacttagttctcttctactgagcaaaagctcaagggaaatcccttctgctggtgagttgtccagcagtgggcagacagctgatagtg

SEQ ID NO: 22335 - DNA, 2223 bp, Homo sapiens
  SIMILAR (440)..(1438): 791254mologous to Homo sapiens hypothetical protein,accession number AL133105,Smith-Waterman Score=1295.
gacgggcgaactcctgtgaccccgccacgatcgtgcacaacttttcccgaaccgagccccggactgttcctgtttggcggcagccacagcgggtcgagctccaagttgcaggccctcttcgcccacccgctgtacaacgtcccggaggagccgcctctcctgggagccgaggactcgctcctggccagccaggaggcgctgcggtattaccggaggaaggtggcccgctggaacaggcgacacaagatgtacagagagcagatgaaccttacctccctggaccccccactgcagctccgactcgaggccagctgggtccagttccacctgggtattaaccgccatgggctctactcccggtccagccctgttgtcagcaaacttctgcaagacatgaggcactttcccaccatcagggctgattacaggcaagaagagaaaagccttgctgggggcatgtgactgcacccagattgtgaaacccagtggggtccacctcaagctggtgctgaggttctcggatttcgggaaggccatgttcaaacccatgagacagcagcgagatgaggagacaccagtggacttcttctacttcattgactttcagagacacaatgctgagatcgcagctttccatctggacaggattctggacttccgacgggtgccgccaacagtggggaggatagtaaatgtcaccaaggaaatcctagaggtcaccaagaatgaaatcctgcagagtgttttctttgtctctccagcgagcaacgtgtgcttcttcgccaagtgtccatacatgtgcaagacggagtatgctgtctgtggcaaaccacacctgctggagggttccctctctgccttcctgccgtccctcaacctggcccccaggctgtctgtgcccaacccctggatccgctcctacacactggcaggaaaagaggagtgggaggtcaatcccctttactgtgacacagtgaaacagatctacccgtacaacaacagccagcggctcctcaatgtcatcgacatggccatcttcgacttcttgatagggaatatggaccggcaccattatgagatgttcaccaagttcggggatgatgggttccttattcaccttgacaacgcccagagggttcggacgacactcccatggatgaaatcccaatcctctcgcttctctcccagtgtggcatgataaaaaagaatacacttttgcacctgcaggctgctggcccaagctgactacagactcagcggatgtgatgcgagaatcactgctggaagaccagcttcagccctgtcctcactgaaccccacctccttgccctgggatcgaaggctccaaaccatcctaaggacagtgggaggggtgcatagtgggcccatgggacagcagagtgttcattagttcgacgggcccagtgggaacagttcgggccccagacttttgggccagggttaaattttgacaaggttaaggggctgggcaggagttccagttttcaggaaaataacgctggggagccagaggcagtcgactcgagtgccgaccctgcgtcctcactccccacctgttactgctgggagtcaagtcagctaggaaggaagcaggacattttctcaaacagcaagtggggcccatggaactgaatctttactccttggtgcaccgcttctgtcgtgcgttgccttgctccgtttttcccaaaaagcactggcttcatcaaggccaccgacgatctcctgagtgcactgggaaatctgggtataggtcaggcttggcagccttgatcccaggagagtactaaatggtaacaagtcaaataaaaggacatcaagtggatacctgacttctcaggatccttattctagctacaagtcaaagataactcctggtccagacaaaacacctggcctatcacaagctgactaaaaatctgcactttgggccagcgcaggccaacagtaactctgacaggttcaaattagacctcacgactttctactcatattctagtcactggacccatctgaatcagtaatccctactgcccggtcctggagtaactttttaaagatattataacaagtggcaaaaataaaagagggatttgctaagaatatcagaaaaggagtgttccaatttgaagagtattacaattgaaataacatcaaatatgtcacactaagcagccagtaacagaataaataattacaacg

SEQ ID NO: 22336 - DNA, 424 bp, Homo sapiens
  SIMILAR (107)..(175): 521254mologous to Bos taurus G-protein gamma-12 subunit,accession number U37561,Smith-Waterman Score=60.
  misc_feature (1)...(424): n = a,t,c or g
cggacgcgtgggtgtatctgcagtgatagtacgcgcctggattactcacaaatacagtggcagagactggaatgttaaatgggaggaaaacttgctccatgctgtagcaaagaattataccctcctgcagaccatcccgccttttgaacgccctttcaaagatcatcaagtgtgccttgagtggaacatgggttatatttggaaccttcgggcaaacaggattccacagtgtcctctggaaaatgcttccgggaggatttccattataatgacacagctgggtacttcattattggagggagcaggtatgtggctggcattgaagggttttttggacccctgaagtactatcgccttcgcagtctgcaccccgcccagatttttaatcccctccttgagaagcaacttgctgaacaaataagtn

SEQ ID NO: 22337 - DNA, 496 bp, Homo sapiens
  SIMILAR (44)..(217): 1001254mologous to Homo sapiens Human secreted protein ve13_1, SEQ ID NO:52,accession number Y95006,Smith-Waterman Score= 295.
  misc_feature (1)...(496): n = a,t,c or g
aaaagaaaagaattttcgcncgcctgcaggaactcggcacgagaagaatcccgaagcagcaattgagtggtacgccaagggcgccctggagacggaggatcctgcgttaatctatgactatgccattgtgctattcaagggtcaaggagtaaaaaagaacagacggcttgccttagagctgatgaagaaagcagcttccaagggattgcatcaggcctccccagacactgccacgtccactgcaagtccagctgtgactccagctgcagatgcctctgaccaagaccagcccacagtaactaataacccggagccacgtgggtgaactgtgcactccagttctctccagatgagagagaatcttttcaacagctggtattgggaagctggggccagggcatgatcctgataaacaccttaaatgtcttgtcaactggnnnnnnnnnnnnnnnnnnnnnnnncctcgggggggggccgggacccaatttcccctttt

SEQ ID NO: 22338 - DNA, 317 bp, Homo sapiens
  SIMILAR (82)..(282): 951254mologous to Homo sapiens Human secreted protein ve13_1, SEQ ID NO:52,accession number Y95006,Smith-Waterman Score=348.
agttgtctgtgcagatgtacgcccaagccgccctggatggagactcccagggattttttaacctggccctgctaatcgaggaaggaactgtacgaaaggtgctggagccacagtaacgaggagtccttcagcccctgctccttggcctggctttacctgcacttgcggcttctctggggtgctatcctgcactcagccctgatctactttctgggaacctttctgctatccatattgatcgcctggactgtgcagtatttccagtctgtctcaggtaaagatttataaaaagcgaaagcaatatattaaaaaaaaaa

SEQ ID NO: 22339 - DNA, 351 bp, Homo sapiens
  SIMILAR (49)..(177): 1001254mologous to Homo sapiens Human secreted protein ve13_1, SEQ ID NO:52,accession number Y95006,Smith-Waterman Score= 219.
atgattgcgacatacgatggttgtgaaagtcctggagtatgcaacctgggattttttaacctggccctgctaatcgaggaaggtacgataatcccacaccatatcttggatttcttggaaattgactcaactctccattctaataacatctccattctccaggaactgtacgaaagaggggcgcttatttctgtcgcccaggctggagggcagaaccctgttctcgccatcctgccctctcccccttttggcggacaacgacattcctcggtgccaaccttattgactagcttgttaatctcagactccgtgctcccagacgccgaccaattagctgtctctcttcgataa

SEQ ID NO: 22340 - DNA, 741 bp, Homo sapiens
  SIMILAR (13)..(297): 941254mologous to Homo sapiens Human secreted protein ve13_1, SEQ ID NO:52,accession number Y95006,Smith-Waterman Score=468.
atggtgctattgcactccagcctggttgacagagcatatgttgaaacaattagactaaaagatgatgaaatactcaaggtacaaaccaaagaagatggagatgtctttatgtggttgaagcatgaagctacccgaggcaatgcagcagctcagcaacgattggcccagatgctgttctgggggcagcaaggtgtggccaagaatcccgaagcagcaattgagtggtacgccaagggcgccctggagacggaggatcctgcgttaatctatgactatgccattgtgctattcaagggattgcatcaggcagtcaatggcctgggatggtattaccacaaattcaagaaaaattacgccaaagcagcaaagtactggttaaaagcagaagaaatggggaacccagatgcgtcatacaatcttggagtcctgcatttggatggcatcttccctggagttcctggaaggaatcaactggaggccgcttcagagctggagaccgcttcagagctggagactgtttcagagctggagaccgcttcagagctggagattgtttcagagctggagaccgcttcagagctggagattgtttcagagctggagatcgtttcagagctggagaccgcttcagagctggagatcgcttcagagctggagaccgcttcagagctggagatagcttcagagctggagaccgcttcagagctggagaccgcttcagtcagaactggaagccactag

SEQ ID NO: 22341 - DNA, 510 bp, Homo sapiens
  SIMILAR (82)..(285): 1001254mologous to Homo sapiens Human secreted protein ve13_1, SEQ ID NO:52,accession number Y95006,Smith-Waterman Score= 375.
atgcctacttcatctgggcctctggatctagcagggaccagatttgtgtcactgaaacactcttcaggagtggagatactgactttagctggtgaatatttccataaggctgcgcaaggtggacacatggaagggaccttgtggtgttctctctactatatcacaggcaacctggagacattccctagagatcctgagaaagctgttgtatgggcaaaacatgtagctgagaaaaatggctacttgggccatgtcatccgcaaaggcctcaatgcctacctggaagttcatgcatatttgaagatgggagacctttactactatggccaccaaaaccagtcacaagacctggagttgtctgtgcagatgtacgcccaagccgccctggatggagactcccagcacgcggatttgcttctggggaaacacccctctgccactcgtagtccatacattttggatggtggcaccactgcccttaacttcagagagcccttgtcactgacctaa

SEQ ID NO: 22342 - DNA, 4367 bp, Homo sapiens
  SIMILAR (2217)..(2711): 771254mologous to Homo sapiens Human secreted protein ve13_1, SEQ ID NO:52,accession number Y95006,Smith-Waterman Score=670.
cggccgctctgcctgcgcgctgctcctgctctgctacctgaatgttgtaccatctttgggtaggcagacttccctgacgacatcagtgatacccaaagctgagcagagcgtggcttacaaagactttatttattttactgtctttgaaggaaacgttcgcaacgtttcctgaaagtcctcggttgaagtattttatgcctcctcagcccttgtgttgtccaatttgggaagccagttgtttccatcctgagttccagaagtaggcattccccgtgtacaaaaaaagggtgggaaggaatgaggaaacatcttcacaccaggcagggacacaaataggtacatgtggaaatttccaaggcattatgggtttacaggggatggattattttcatccggacatttccatcttctgtaatctggcagtgatagtacgcgcttgggattactcacaaatacaggggcagagactggaatgttaaatgggaggaaaacttgctccatgctgtagcaaaagaattatacccttctgcagaccatcccgccttttgaacgccctttcaaagatcatcaagtgtgccttgagtggaacatgggttatatttggaaccttcgggcaaacaggattccacagtgtcctctggaaaatgatgtggttgccctgcttggctttccttatgcctccagtggagaaaacacaggcattgtcaagaagttcccgaggtttcggaaccgagagctggaggccactcgacgccagaggatggattacccagtgtttactgtttcattgtggctttatttactccattattgcaaggccaacctctgtgggattctgtactttgttgactctaatgagatgtacggcacaccttctgtatttcttacggaagagggctatttgcatattcagatgcatcttgtcaaaggggaagaccttgctgtaaaaactaaattcatcatacctttgaaggagtggtttcgactggatatctcttttaacggaggccagatagtagtaaccactagcattggacaggatttgaaaagctaccacaatcagaccattagcttccgggaggatttccattataatgacacagctgggtacttcattattggagggagcaggtatgtggctggcattgaagggttttttggacccctgaagtactatcgccttcgcagtctgcaccccgcccagatttttaatcccctccttgagaagcaacttgctgaacaaatcaagttatattatgaaaggtgtgctgaggttcaagaaatagtatctgtgtatgcatctgcagcaaagcacgggggcgagagacaagaagcatgccacctccacaactcctacctggacctccagcgcaggtatgggagaccctcgatgtgcagagccttcccctgggagaaggagctgaaagacaaacaccccagcttgttccaggcattgctggagatggatctgctgaccgtgccaaggaaccaaaatgaatctgtatcagaaatcggtgggaagatatttgagaaggctgtaaagagactctctagcattgatggtcttcaccaaattagctctatccgtcccctttctgacggattccagctgctgtggataccataaagcatcctactaccttgcagtcttttatgagactggattaaatgttcctcgggatcagctgcagggcatgttgtatagtttggttggaggccaggggagtgagaggctgtcttcaatgaatcttgggtataaacactaccagggtattgacaactacccccctggcttggaacttgtggtatgcctactacagcaccattgccaccaagacaccccttgaccagcacacactgcaaaggagatcaggcatatgttgaaacaattagactaaaagatgatgaaatactcaaggtacaaaccaaagaagatggagatgtctttatgtggttgaagcatgaagctacccgaggcaatgcagcagctcagcaacgattggcccagatgctgttctgggggcagcaaggtgtggccaagaatcccgaagcagcaattgagtggtacgccaagggcgccctggagacggaggatcctgcgttaatctatgactatgccattgtgctattcaagggtcaaggagtaaaaaagaacagacggcttgccttagagctgatgaagaaagcagcttccaagggattgcatcaggcagtcaaatggcctgggatggtattaccacaaattcaagaaaaattaccgcccaaagcagccaaagtactgggttaaaagcaggaagaaattggggaacccagatgcgtcatacaatcttggagtcctgcatttggatggcatcttccctggagttcctggaaggaatcaaactttagctggtgaatatttccataaggctgcgcaaggtggacacatggaagggaccttgtggtgttctctctactatatcacaggcaacctggagacattccctatagatcctgagaaagctgttgtatgggcaaaacatgtagctgagaaaaatggctacttgggccatgtcatccgcaaaggcctcaatgcctacctgggaaggttcatgggcatgaagctttgctgtattatgttttagcagcagaaactgggaattgaagtgtcacagacaaatttagcacacatctgtgagggagaggccagacctggccaggagatacttgggtgttaactgtgtttggagatactataaatttctctgtttttcaaatccatgctccttcctttgcatatttgaagatgggagacctttactactatggccaccaaaaccagtcacaagacctggagttgtctgtgcatatgtacgcccaagccgccctgggatggagactcccagggattttttaacctggccctgctaatcgaggaaggtacgataatcccacaccatattcttggatttcttggaaattgactcaactctccattctaataacatctccattctccaggaactgtacgaaaggtgctggagccacagtaacgaggagtccttcagcccctgctccttggcctggctttacctgcacttgcggcttctctggggtgctatcctgcactcagccctgatctactttctgggaacctttctgctatccatattgatcggcttgaactgtgcagtatttccagtctgtctcagcaagcgattccccctccaaagaccatcccagggcctccccagacactgccacgtccactgcaagtccagctgtgactccagctgcagatgcctctgaccaagaccaagcccacagtaactaataaccccggagcccctgtgggtgaactgtgcactccaagttctctccagatgagagagaatcttttcaacagctgggtattgggaaagctgggggccaaggggatgatcctgataaacaccttaaaatgtctttgtcaactggatgcaaattttgcaattggtgtcattttttttaaagtcaaattacaaggaagtacccagattaaggcagtgggtaataccaaaggtcatcaaacacatacaaggaacatcttgatcatagggcatgtggggaagtttactgggccatcacagacttttgttctagtgattgtatgtattaggagtcatagcatgcccctacggcagatctggattcttatacactaagatgtgtcttaagaatcacagtgcgtgcttcatccctttattgaagaacagaaaattatgactactctacaaggtggataatattttggtacctgtggctggccacagccctggttcctcaaagctgaattgatagatttctctttgacttccaagacctagcagttataaggcaccttgaaataaattgttttgtgcctggaaatgccagggagggccaatggctttgtaaattggtttaccatttttctccttgaatttttctagggtcctagtgcttcccgaatccatttaatggccattggtcggatatccttttacatttccaattgccaatcccatgaaattaccatttagaagattcttagtacttaactgtagtcttctcccatgaattacacgttaagaatagactggcagcaacggaatatgcagcaagtaaagcctctagcttctagcttatagtttcatccctacccctcaatgcctgcgtgagtctgtacagggatatgtgtgtgtgtgtgtgtgtgtgtgtgtgtgtgtgttagagaggaagaggaagagcagaatgtctgtatactacatgctgctaaggtagtgaataaatcagtaatgcaatattgtgggtccaaactactctttgcactactttatttacagtagtaaataaaattatttttatac

SEQ ID NO: 22343 - DNA, 153 bp, Homo sapiens; identical to SEQ ID NO: 19392
  SIMILAR (3)..(98): 1001254mologous to Homo sapiens human leukocyte antigen- A*0104N,accession number Z97027,Smith-Waterman Score=171.

SEQ ID NO: 22344 - DNA, 653 bp, Homo sapiens
  SIMILAR (56)..(397): 1001254mologous to Homo sapiens HLA-A protein,accession number M64742,Smith-Waterman Score=600.
accgagccggagttcccgggacgacgatttcgtccgaggatggccgtcatggcgcccccgaaccctggtcctgctactctcgggggccctggccctgacccagacctgggcaggctcccactccatgaggtatttctccacatccgtgtcccggcccggccgcggggagccccgcttcatcgccgtgggctacgtggacgacacgcagttcgtgcggttcgacagcgacgccgcgagccagaggatggagccgcgggcgccgtggatagagcaggaggggccggagtattgggacgaggagacagggaaagtgaaggcccactcacagactgaccgagagaacctgcggatcgcgctccgctactacaaccagagcgaggccggttctcacaccctcttcccacgctgacctgtgctccctccccaatcatctttcctgttgcagagaggtggggctgaggtgtctccatctctgtctcaacttcatggtgcactgagctgtaacttcttccttccctattaaaattagaacctgagtataaatttactttctcaaattcttgccatgagaggttgatgagttaattaaaggagaagattcctaaaatttgagagacaaaataaatggaacacatgagaaccttccagagtcc

SEQ ID NO: 22345 - DNA, 824 bp, Homo sapiens
  SIMILAR (1)..(342): 961254mologous to Gorilla gorilla Mhc class I heavy chain,accession number X60256,Smith-Waterman Score=570.
atggcggtcgtggcgccccgaaccctcctcctgctactctcgggggccctggccctgacccagacctgggcgggctcccactccatgaggtatttctccacatccgtgtcccggcccggcagtggagagccccgcttcagcgcagtgggctacgtggacgacacgcagttcgtgcggttcgacagcgacgccgcgagccagaggatggagccgcgggcgccgtggatggagcaggaggagccggagtattgggaccggcagacagagatctccaagaccaacgcacagattgacctagagagcctgcggatcgcgctccgctactacaaccagagcgaggacgacccccccccaagacacatatgacccaccaccccatctctgaccatgaggccaccctgaggtgctgggccctgagcttctaccctgcggagatcacactgacctggcagcgggatggggaggaccagacccaggacacggagctcgtggagaccaggcctgcaggggatggaaccttccagaagtgggcgtctgtggtggtgccttctggacaggagcagagatacacctgccatgtgcagcatgagggtctgcccaagcccctcaccctgagatgggagccgtcttcccagcccaccatccccatcgtgggcatccttgctggcctggttctctttggagctgtgatcgctggagctgtggtcgctgctgtgatgtggaggaggaagagctcagatagaaaaggagggagctactctcaggctgcaagcagtgacagtgcccagggctctgatgtgtctctcacagcttgtaaagtgtga

SEQ ID NO: 22346 - DNA, 1717 bp, Homo sapiens
  SIMILAR (22)..(855): 351254mologous to Homo sapiens lymphocyte antigen,accession number L18898,Smith-Waterman Score=244.
  misc_feature (1)...(1717): n = a,t,c or g
aattcccgggtcgacgatttcgtggccgtcatggcgccccgaacccttcctcctgctactctcgggggccctggccctgacccagacctgggcgggctcccactccatgagggatttgcttcacatccgtgtcccggcccggtgcgctgagagccccgcttcatcgcagtgggctacgtggacgacacgcagttcgtgcggtttcgacagcgacgccgcgagccagaggatggagccgcgggcgccgtggatagagcaggaggggccggagtattgggaccaggagacacggaatatgaaggccccactcacagactgaccgagagaacctgcggatcgcgcttccgctaacttacaaccagagcgaggccggttcttcacaccctccagatgatgtttggctgcgaacgtgggggttcggacggggcgctttccttccgcgggttaccaccagttacggcttacgaacggcaaaggatttacattcgccctgaacgaggaacttgcgctcttggacccgcggcggacatggcggctcagatcacccagcgcaagtgggagactccgcccatgtggcggagcagcaagaagaagcctacctggaagggcacgtgcgttgaacgggctccgcagataccttggagaacgggaaggaagacgctgcagcgcaacggaccccccccaagacacatatgacccaccaccccatctcttgaccatgaaggccactctgaagatgctggggccctgggctttctacccctgcggagatcacacctgaccctggcagcgggatgggggaggaccagacccaaggacacggagcttgttggagaccaggcctgcaggggatggaaccttcccacaagtgggcggctgtggtggtgccttctggagaggagtcagagataacacctgccaatgtgcagcaatgaagggtcttgcccaagcccctcaccctgaagatggggagccatcttccccagcccacccatcccccatcgtggggcatcatttgcttgccctggttcttccttgggagcttttgatcacttgaagctgtgggtcgctgctgtgatgttgaaggaaggaacagctcaggtggggaaggggtgaaagatagaaaagggggggagctactcttcaaggctgccaagccagtgaccagtccccaggggctctgaatgtgtctctccacaagctttgtaaaagtgtgaagaaaaacctgcccttgtgtggggacctgagaggccaaagagtttgttccctgcccctttccccttttgtgaactttgaaggaaccctgaactttgttttctgcaaaaggcaccctgccatgtgtctgtgttccgtgtaggcattaatgtgaaggaggtgggggagacccacccccaccccccatgtcccacccatgaccctcttccccacgctgacctgtgctccctccccaatcatctttccctgttcccagagaggtggggctgaaggtgtctccatcttctgtcttcaacttcatgggtgcaatgnagctgtaacttcttccttccctgattatagattagaacctgagtataaatttactttctcgaaattcttggccatgaggaggtttatgagttaattaaagggagaggaattcctaaaaatttgaagagacaaaataaatggaagacatgacgaacctttcaaaaaaaaaaaaaaaaaaaattgcggcgaa

SEQ ID NO: 22347 - DNA, 487 bp, Homo sapiens
  SIMILAR (18)..(167): 1001254mologous to Homo sapiens caveolin-2,accession number AJ133269,Smith-Waterman Score=270.
ggcggtgaattcctgcgatggggctggagacggagaaggcggacgtacagctcttcatggacgacgactcctacagccaccacagcggcctcgagtacgccgaccccgagaagttcgcggactcggaccaggaccgggatccccaccggctcaactcgcatctcaaggattttaatgccttttgtaaagacctgcctaatggttctgccttcagtgcagacaatatggaagagtgtgacagatgttatcattgctccattgtgtacgagcgtaggacgatgcttctcttctgtcagcctgcaactgagccaggattgaatacttggaccccaggtctgggagattgggatactgtaatacttctttgttattataacataaaagcaccactgttctgttcatttcctagctgttctaattaagaaaactattaagatgagcaaccacatgtagaaatgtttattgacaggtcttttcaaataatgct

SEQ ID NO: 22348 - DNA, 2108 bp, Homo sapiens
  SIMILAR (187)..(519): 371254mologous to Homo sapiens caveolin-2,accession number AJ133269,Smith-Waterman Score=93.
tgcgtccgcgcaccaaggctgcgatggggctggagacggagaaggcggacgtacagctcttcatggacgacgactcctacagccaccacagcggcctcgagtacgccgaccccgagaagttcgcggactcggaccaggaccgggatccccaccggctcaactcgcatctcaagctgggcttcgagggatgtgatcgcagagccggtgactacggcactcctttgacaaagtgtgggatctgcagccatgccctctttgaaatcaggcaaataccgtatggtacaggtccctgacaggtgttcctggggcattccccctgggctttcatttgcggggaattctcttttgccaccctcaagctgtctggcacatctgggattttaatggccttttgtaaatgacctgcctaatgggttcttgccttcagtgcagacaatatgggaagagtgttgacagatggttaatcattggctccattgtgtaacgagcgtagggacgatgctttctctttctgttcagcctggcaactgagcccaggaatgggatacttggaccccaggtctggagattgggatactgtaatacttcctttgttattataacataaaagcaccactgttctgttcatttcctagctgttctaattaagaaaactattaagatgagcaaccacatttagaaatgtttattgacaggtcttttcaaataatgcttttctaattaatagccaaagatttcatatctaactttgtaaccagaattatacagtaagttgacaccacttagatttaaaggcagacagttttgctttagtacaaaaagtatacattttaaacagaatgaacttataatgattaagggacatttctataaaaatactacaatagttttatgcacaacttcccattaaaaatgagatttcttatttgtttgtctgtttttactctggggggtaatactttttaaattacctttacatatatagtcactggcatactgagaatatacaatgatcctgggaaatagcaggtaacaacaagctccacaccggtttatagtagctataagatgcaatacgacgaataaatgtgaaagtagattccatgaaaatgtattcctttaaaatattgtttccctacaggcctatttaacaagatgtttcattttactgtatattttgtagttaatataaatgttgctctaatcagattggcttaaaagcatttttattatatttatgttgttgaactaatatatgaaataagtaaatgtagctcccacaaggtaaacttcattgggtaagtttgcactgttctgattatgtaagcatttgtacatcttctttggaaataaaagataaaagagcgatacacaaagctttcttttctaacttttccaagcaaaatctaaaatgttttatgacatttttctggctgtgatcttaaaataattcatatctaaatagtattttgtctaggagatgctttctctctagtagttagaaattaaatctgtgtcagcattcctattaatgtctcactttactttcaagtaatattggtgctatttaacattttacagtaaatgttacttctgatactttagtacaatttcaactacagtgattcatgtagagagacaggggagttgtcaacttgggctactgaactacatgcataaactaaaaactaacagctacaaacttttaagatttctctaatattggtatgtaacacaggataaagttattcttgtcattttgaactgtagagtcctatttcagtgtgatggaatcactgtttgcttttgaaaaatctccatttatttctgggggccgggcatgggtggctcacccctgtaattccccggcacttttgggaggccaaggcgggtggatcatgaggtcaggagatccaagaccatcctggccaacatggtgataccccgtctctactaaaaatacaaaaaaattagttgggcatggtggcatgcacctgtagtcccagctacctgggaggctgaggcaggagaattgcttgaacctgggaggcagaggttgcagtgagccaaaatcatgccactgcactcccgcctgggcaacagagcaa

SEQ ID NO: 22349 - DNA, 432 bp, Homo sapiens
  SIMILAR (122)..(343): 311254mologous to Human herpesvirus 6 DR4,accession number X83413,Smith-Waterman Score=77.
tggagcacggattcctcaagctcggctcatgcccttcctcctcctcctcacgccctggtgcgacctccgcaggtacgcttcaacctccgcacggcgctgagccacaagagaccagctaaaagcaaaaccagaaaacttacttggctccatatcaagagactcgggacggacgcaggaaggaattcccgcccgggtcccgtatcccccgccgccactacgcgcgaacctccacagtccacgtaaccagggaggaacggactcctcgggtgtctcgggggcggcgccccgcgcccaggctggctggactcggaagctggaggagcgcccgcgttccactgccccgggtgatgcccacgccggcacaggagagggggcacacggttaaaacagctcccacctcccccaaccacagtccacgaccagcctctcaga

SEQ ID NO: 22350 - DNA, 1485 bp, Homo sapiens
  SIMILAR (580)..(326): 961254mologous to Homo sapiens Amino acid sequence of a human phosphorylation effector PHSP-4,accession number Y68772,Smith- Waterman Score=409.
tttttttttcagcccaaactcatgttctcaactttattccccatcccagtggtggctcttctgtacagtggagaaagaagggggaccccaccagggctatggagagacagtagaggcaggactgaaccgtccagcaaagattacaaggatgacctgaggctggcaaccacaaaaaccaaaaagccagcgggggctgccccttccaagtctcaccaatgacccagagcaggttccagagcccaaaggcccaaaagtgcaattcccaaaagccaagggctggggacccttcaaggatctcccagagatcccagcgacgtttcagaggggcaagggtgtctttgatgagcctgcgcatgggtgggtgggtgactgaggtgcccagggcatcagtgatctggaaggagatcttgtacaggtagggctgcacgtcccgcaagcctgtgtcaaacacgttatccacctccgactgtgtgggcatcttgggcaagtactcatgccgattcatcacctccacgatgttgatgatcttctcgcagagtttctcacccaccttctcccggcagatctgccgctcctgctccggtggccagggctaccacatgcaccttgaccgtccacacttcccatgggatgcactcgtctgagaatggccagcgagacttcttcttctggtagaactccaaggacatctgccccagcccatcgccaccagagttgcgcggtgcatccttgaactccccacaaaccttgcgcagggcacgatccagttcctcagaagagacacgcacattaagtgaaagtcgatgaagtcacagtcaaacatcttggttgccaacggtgccaatggagtaggtgccctccttcttgtagtggaacttgcctgtgctgcggtgcagaagcaccgtgtgcagcacagccagcatggcctcctccacctgccgcccctccaccgacacctccagcacctccgagcgacaagttcatcctgcacccagtaacccacaccaaggtgtggaacttaggataaagacaaggggatcttcaccctacccaagggccacccttgagtgtagagtttggagcacggattcctcaagctcggctcatgcccttcctcctcctcctcacgccctggtgcgacctccgcaggtacgattcaacactccgcacggcgctgagccacaaagagaccagctcccacagtccacgtaacccagggaggaacggactcctcgggtgtcctcgggggcggcgccccgcgcccaggctggctggactcggaagctggaggagcgcccgcgttccactgccccgggggatgcacacgccggcacagaagagggggcacacggttaaaacagctcccacctcccccaaccacagtccacgaccagcctttcagatgccaccactctcccggcaggctcaagaccacctgggtcgaaggctgagccgcgcacgcgtgggcggcccgtatctcaagac

SEQ ID NO: 22351 - DNA, 1501 bp, Homo sapiens
  SIMILAR (60)..(980): 651254mologous to Homo sapiens unnamed protein product,accession number AX061636,Smith-Waterman Score=929.
gtggctccaattgccctctcaggcaggcagacccagggcctccccgccacaccttgttcatggattttgtcgctggagccatcggaggcgtctgcggtgttgctgtgggctaccccctggacacggtgaaggtcaggatccagacggagccaaagtacacaggcatctggcactgcgtccgggatacgtatcaccgagagcgcgtgtggggcttctaccggggcctctcgctgcccgtgtgcacggtgtccctggtatcttccgtgtcttttggcacctaccgccactgcctggcgcacatctgccggcttcggtacggtaaccctgacgccaagcccaccaaggccgacatcacgctcttgggatgcggcctccggactcgtccgcgtgttcctgacgtcgcccactgaggtggccaaagtccgcttgcagacgcagacacaggctttttaagcagcagcggcggctttcggctctcggcgcttttggctgcgccccccatgtgtcctgtgcccccagcctgcccagagcccaagtaccgcgggccactgcactgcctggccacggtagcccagtgaggaggggctgtgcggcctctacaagggcagcttggccctggtcttacgggacggccactcctttgccacctactttctttcctacgcggtcctctgcgagtggctcagccccgctggccacttccggccagatgtcccgggcgtgctggtggccgggggctgtgcaggagtcctggcctgggctgtggccacccccatgggacgggatcaaatcgagactggaagcaaacgggcagggccagaagcggctaccggggtctcctgcactgtatggtgaccagcgttcgagaggagggaccccgggtccttttcaaggggctggtactcaattgctgccgcgccttccctgtcaacatggtggtcttcgtcgcctatgaggcagtgctgaggcttcgcccggggtctgctcaccatagccggtccccaacgcccaggggggccacccaccaacaacttgtttgagggtggtaatgggttggaggaaggaaaggggtagttgtggcttgggttccgggaaccccaacaaggcccttttgcccaggagaatgaggagcctccctgcagtgttgtcggccgaggcctgagctcgccctgcccagctactgacctcaggtcgaggggcccgccagccatcagccagggttggcctagggtggcaggagccagggaggagtgggcctcttttgatgaaagcgttgagttgcatggagccggttgttcattccagcctccccatgggcccttcccttccatggtctttgaaaccacccctcccaggagatcaagtggtgtggtcaaaccaccccttttggcccctttccttaaaaccttacccccccaccactggtttctggtggttttaacgaaactgggtccctttacagggcaaggagctttcccccccaggcattgggagggccccg

SEQ ID NO: 22352 - DNA, 453 bp, Homo sapiens
  SIMILAR (65)..(184): 411254mologous to Arabidopsis thaliana putative cell wall- plasma membrane disconnecting CLCT protein,accession number AF098631,Smith-Waterman Score=76.
  misc_feature (1)...(453): n = a,t,c or g
taatcgcangagcccgtattnctgatatttgcngncccgttttcatctatccaagaaaaatatgatgtctccatccctagccttactcttattcttaaatgtatgtatttttgtttgtggagaagctgtacaaggtaactgtgtacatcattctacggactcttcagtagttaacattgtagaagatggatctaatgcaaaagatgaaagtaaaagtaatgatactgtttgtaaggaagactgtgaggaatcatgtgatgttaaaactaaaattacacgagaagaaaaacatttcatgtgtagaaatttgcaaaattctattgtttcctacacaagaagtaccaaaaaactactaaggaatatgatggatgagcaacaagcttccttggattatttatctaatcaggtaatgtgtgacatggattacagaggaggtggatggactgtgataca

SEQ ID NO: 22353 - DNA, 427 bp, Homo sapiens
  SIMILAR (287)..(412): 451254mologous to Rattus norvegicus tenascin-X,accession number U24489,Smith-Waterman Score=106.
ctatctattgaagtgctgtatctatccaagaaaaatatgatgtctccatcccaagcctcactcttattcttaaatgtatgtatttttatttgcggagaagctggacaaggtaactgtgtacatcattctacggactcttcagtaattaacattgtagaagatggatctaatgcataagatgaaaggaaaagtaatgatactgtttgtaaggaagactgtgaggaatcatgcgatgttgaaactaaaattacacgagaagaacaacatttcatgtgtagcaatgtgagacatggattacagacgaggtggatggactgtgatacatagaaaaattggtgggagaatcgatttccagagggtgcggtgagattatctgcatggatacgcagatcttttacgagaattttggctctgactggcaaagatt

SEQ ID NO: 22354 - DNA, 427 bp, Homo sapiens
  SIMILAR (124)..(375): 351254mologous to Conus arenatus conotoxin scaffold VI/VII precursor,accession number AF215070,Smith-Waterman Score=72.
atgcccaagctgctgaagtggaactatgaagggggagcttgctggggaaatctatggaaactgccgaatgtggaacgactctgcttttctgaagctactgtcttcaggtctgcagcccagtgcctggtggtcggcctagggctgctgttggtcagcagggcctgtagtcatgaagatgctatagagtggagaggagactcttcagtagttaacattgtagaagatggatctaatgcaaaagatgaaagtaaaagtaatgatactgtttgtaaggaagactgtgaggaatcatgtgatgttaaaactaaaattacacgagaagaaaaacatttcatgtgtatcttccacaatgttcagtcactgggaacagtctgcggggagaaaggcattgatgtgaacaccatggtggatgcaggaggtacagcag

SEQ ID NO: 22355 - DNA, 1004 bp, Homo sapiens
  SIMILAR (483)..(530): 501254mologous to Homo sapiens dJ595C2.2 (angiopoietin Y1),accession number AL355520,Smith-Waterman Score=40.
ggtcgacccacgcgtccgatttgaagaagtgttttcatctatccaataaaaatatgatgtctccatcccaagcctcactcttattcttaaatgtatgtatttttatttgtggagaagttgtacaaggtaactgtgtacatcattctacggactcttcagtagttaacattgtagaagatggatctaatgcaaaagatgaaagtaaaagtaatgatactgtttgtgaaggaagactgtgaggaatcatgtgacgttaaaactaaaattacacgagaagaaaaacatttcatgtgtagaaatttgcaaaattctattgtttcctacacaagaagtaccaaaaaactactaaggaatatgatggatgagcaacaagcttccttggattatttatctaatcaggttaacgagctcatgaatagagttctccttttgactacagaagtttttagaaaacagctggattccttttctctcacagaccctgtcccagtacacctggtttagattgcactgatattaaggataccattggctctgtacaccaaaacaccgagtggtttatacataattcacccagaaggatctagctacccatttgaggtaatgtgtgacatggattacagaggaggtggatggactgtgatacagaaaagaattgatgggataattgatttccagaggttgtggagcgattatctggatggatttggagatcttgtaggagaattttggctaggactgaaaaagattttttatatagtaaatcagaaaaataccacttttatgctgtatgtgggtttggaatcggaagacgaccctcctgcttatgccttatatgataatttttcgggctgaggatgaaacgagatttttttaaaatgcccttaagacggtattcaggaaaatgcttgtgatgcctttcggggttctcaaaaaggaagataatcaaaatgcaatgccttttagcacatcagaagttgaataatggagggggccgccctgcg

SEQ ID NO: 22356 - DNA, 1682 bp, Homo sapiens
  SIMILAR (608)..(751): 561254mologous to Homo sapiens Human 35 kDa opsonin protein P35 fragment (II) residues 96-313,accession number R94178,Smith- Waterman Score=158.
tgcctatactcattatagggctggaccggccggtcggacaggtgaagaagtgttttcatctatccaagaaaaatatgatgtctccatcccaagcctcactcttattcttaaatgtatgtatttttatttgtggagaagctgtacaaggtaactgtgtacatcattctacggactcttcagtagttaacattgtagaagatggatctaatgcaaaagatgaaagtaaaagtaatgatactgtttgtaaggaagactgtgaggaatcatgtgatgttaaaactaaaattacacgagaagaaaaacatttcatgtgtagaaatttgcaaaattctattgtttcctacacaagaagtaccaaaaaaactactaaggaatatgatggatgagcaacaagcttccttggattatttatctaatcaggttaacgagctcatgaatagagttctccttttgactacagaagtttttagaaaacagctgtatccttttcctcacagacctgttcagtcacatggtttagattgcactgatattaaggataccattggctctgtcaccaaaacaccgagtggtttatacataattcacccagaaggatctatttatcccatttgaggtaatgtgtgacatggattacagaggaggtggatggactgtgatacagaaaagaattgatgggataattgatttccagaggttgtggtgtgattatctggatggatttggagatcttctaggtgatgcattcctttgtcttataaaaagaagataatcaaaatgcaatgccttttagcacatcagatgttgataatgatgggtgtcgccctgcatgcctggtcaatggtcagtctgtgaagagctgcagtcacctccataacaagaccggctggtggtttaacaagtgtggtctagcaaatctaaatggcattcatcacttctctggaaaattgcttgcaactggaattcaatggggcacggggaaccaaaaacaacttacctggcaagaataaatctgtttcaatgaaaattagaagaatgtacaatccatattttaaataatctcatttaacattgtaatgcaagttctacaatgataatatattaaagatttttaaaagtttatcttttcacttagtgtttcaaacatattaggcaaaatttaactgtagatggcatttagatgttatgagtttaattagaaaacttcaattttgtagtattgctataaaagaaaacatggcttattgtatgtttttacttctgactatattaacaatatacaatgaaatttgtttcaagtgaactacaacttgtcttcctaaaatttatagcgatgttaaagggatttggccttttcttttgaagccatttttaaacccttaatatgttggtaagggaaaaattgaagggaatattttacttatttttatactttatatgattatataatctacagataatttctactgaagacagttacaataaataactttatgcagattaatatataagctacacatgatgtaaaaaccttactatttctaggtgatgccataccattttaaaagtagtaagagtttgctgcccaaatagtattttcttgttttcatatctaatcatggttaactattttgttattgtttgtaataaatatatgtacttttatatcctgtaaaaaaaaa

SEQ ID NO: 22357 - DNA, 3282 bp, Homo sapiens
  SIMILAR (337)..(2211): 841254mologous to Canis familiaris ZO-3,accession number AF023617,Smith-Waterman Score=2639.
atgagccaccgcgcccggccctgccctgccccctttcttttctggatgctgggtgtgaagacagagcccgcaggccaagaccgcaggaaaaaggcacgcagccgctgttgtatcttcagagtccacgcctctggcctctggggcctccggttcccctctgtggaatggggcaaaccttccagagataaggcacagctctcagaatcccctccccaatcggtgtatttgttcgctgaaaccgccctctctgccattgttcctggagatggggtggcggggggggggggcacaggggacggcggcccgggagccccgtacccgggggcggtggctgacatggaggagctgaccatctgggaacagcacacggccacactgtccaaggacccccgccggggctttggcattgcgatctctggaggccgagaccggcccggtggatccatggttgtatctgacgtggtacctggagggccggcggagggcaggctacagacaggcgaccacatcgtcatggtgaacggggtttccatggagaatgccacctccgcgtttgccattcagatactcaagacctgcaccaagatggccaacatcacagtgaaacgtccccggaggatccacctgcccgccaccaaagccagcccctccagcccagggcgccaggactcggatgaagacgatgggccccagcgggtggaggaggtggaccagggccggggctatgacggcgactcatccagtggctccggccgctcctgggacgagcgctcccgccggccgaggcctggtcgccggggccgggccggcagccatgggcgtaggagcccaggtggtggctctgaggccaacgggctggccctggtgtccggctttaagcggctgccacggcaggacgtgcagatgaagcctgtgaagtcagtgctggtgaagaggagagacagcgaagagtttggcgtcaagctgggcagtcagatcttcatcaagcacattacagattcgggcctggctgcccggcaccgtgggctgcaggaaggagatctcattctacagatcaacggggtgtctagccagaacctgtcactgaacgacacccggcgactgattgagaagtcagaagggaagctaagcctgctggtgctgagagatcgtgggcagttcctggtgaacattccgcctgctgtcagtgacagcgacagctcgccattggaggacatctcggacctcgcctcggagctatcgcaggcaccaccatcccacatcccaccaccaccccggcatgctcagcggagccccgaggccagccagaccgactctcccgtggagagtccccggcttcggcgggaaagttcagtagattccagaaccatctcggaaccagatgagcaacggtcagagttgcccagggaaagcagctatgacatctacagagtgcccagcagtcagagcatggaggatcgtgggtacagccccgacacgcgtgtggtccgcttcctcaagggcaagagcatcgggctgcggctggcagggggcaatgacgtgggcatcttcgtgtccggggtgcaggcgggcagcccggccgacgggcagggcatccaggagggagatcagattctgcaggtgaatgacgtgccattccagaacctgacacgggaggaggcagtgcagttcctgctggggctgccaccaggcgaggagatggagctggtgacgcagaggaagcaggacattttctggaaaatggtgcagtcccgcgtgggtgactccttctacatccgcactcactttgagctggagcccagtccaccgtctggcctgggcttcacccgtggcgacgtcttccacgtgctggacacgctgcaccccggccccgggcagagccacgcacgaggaggccactggctggcggtgcgcatgggtcgtgacctgcgggagcaagagcggggcatcattcccaaccagagcagggcggagcagctggccagcctggaagctgcccagagggccgtgggagtcgggcccggctcctccgcgggctccaatgctcgggccgagttctggcggctgcggggtcttcgtcgaggagccaagaagaccactcagcggagccgtgaggacctctcagctctgacccgacagggccgctacccgccctacgaacgagtggtgttgcgagaagccagtttcaagcgcccggtagtgatcctggggacccgtggccgacattgctatgcagaagttgactgctgagatgcctgaccagtttgaaatcgcagagactgtgtccaggaccgacagcccctccaagatcatcaaactagacaccgtgcgggtgattgcagaaaaagacaagcatgcgctcctggatgtgaccccctccgccatcgagcgcctcaactatgtgcagtactaccccattgtggtcttcttcatccccgagagccggccggcccttcaaggcactgctgccagtggctggcccttgccttcccgccgcagcacccgtcgcctcttacgcacaagcccagaagctggcgaaaacacagcagccacctttttacagccaccattcccttttgatgggcacgagttgacacctgggtaccaggagttcaaaggccatcatttcgagagcagcagacgcgccccatctggacggcgaaagatcagctggatggctccttggaggacaacctagacctccctcaccacggcctgggccaacagcttccgctgaaccttcagcttgcgacagccgcgtttaacagcgattacggaggacggacggcgaggggcggcgcgttacacggatgggcgagggttacacagacgggcgaggggggggccttacacggatgtggatgatgagcccccggctccagccctggcccggtccctcggagcccgtgcaggcagataagtccccaaagcccgagcggatcgtgggaaaatctcggctcatcagggggcccccaggtggacagccgccacccccagggacagtggcgacaggacagcatgcgaacctatgaacgggaagccctgaagaaaaagtttacgcgagtccatgatgcggagtcctccgatgaagacggctatgactggggtccggccaatgacctttgaccttctcgcaggctgccagctggtccgtcctccttctccctccctggggctgggactcagtttcccatacagaacccacaaccttacctcccacccgcctggtctttaataaacagagtattttccaaaaaaaagaggaaaaggaaaaaaaaaacc

SEQ ID NO: 22358 - DNA, 335 bp, Homo sapiens
  SIMILAR (3)..(95): 1001254mologous to Homo sapiens inositol 1,3,4-trisphosphate 5/6-kinase,accession number U51336,Smith-Waterman Score=169.
  misc_feature (1)...(335): n = a,t,c or g
acaggatctgctcgccacccttcatggagctcacgagcctgtgcggggatgacaccatgcggctgctggagaagaacggcttgactttcccattcagtgcgtaccatcccagctccacctgagggcaggcgttgtagaccgcaggccagcataggggaggggctgggtttatagtgccctctggatttaagctcacccgaggatggatgagcacatggccctgggtcccacctccacccactcctcccgcttcatccctctcaagtaatggctcagctaataaaggcgcacatgactccnnnnnnnnnnnnnnannannnaaanaaaaataaggg

SEQ ID NO: 22359 - DNA, 657 bp, Homo sapiens
  SIMILAR (630)..(496): 1001254mologous to Homo sapiens Protein cognate of protein kinase C-theta (clone 3-1 product),accession number W15776,Smith- Waterman Score=232.
cccccccccccgctcttctgaggatccggcaaagatggcagaagtagagcacgaagaaggaagcggacccttccgcaagttcaccttaccggcggccgtggacctcggaccagccgcctggacatttcctacgaccagctggagcagccgatgcaggctgtaccagtggcgcgcccagcggccggcggcctgaacccgggggcctgcgggcggaagcagccactcccctgcttgaaagcgcctgctgcaagggccaagcaagggaggcgccgccccatgtcataagccggaagctggtgaagacgccaccctgcgggactatgatcattcctacccgagatgtggggcagccatggtgggcgtctaccacaggaaagaccttcaaaccaggtggaagatcaaggtgtgtgcggccgtccctgccggctggggtgggctggggtcgcctgatgcaggcgggatcagctgacacccagctttgctcttggtctcccgcagcccgagatgatcggccactacctgggcgagttctccatcacctacaagcccgtaaagcatggccggcccggcatcggggccacccactcctcccgcttcatccctctcaagtaatggctcagctaataaaggcgcacatgactccaaaaaaaaaaaaaa

SEQ ID NO: 22360 - DNA, 527 bp, Homo sapiens
  SIMILAR (12)..(428): 921254mologous to Homo sapiens Similar to chordin- like,accession number BC002909,Smith-Waterman Score=735.
ggtcgacgatttcgttgtattgtggtctcaagacttgccccaaattaacctgtgccttcccagtctctgttccagattcctgctgccgggtatgcagaggagatggagaactgtcatgggaacattctgatggtgatttcttccggcaacctgccactagagaagcaagtcattcttgccaccgctctcactatgatcctccaccaagccgacaggctggaggtctgtcccgctttcctggggccagaagtcaccggggagctcttatggattcccagcaagcatcaggaaccattgtgcgatttgtcctcaataacaaacacaagcatggacaagtgtgtgtttccaatggaaggacctattctcatggcgagtcctggcacccaaacctcagggcttttggcattgtggagtgtgtgttatgtactcccacccccatcgattgtgccgcaaggcgattaaggaaagtgtcgccacgggtgtcccaccctacactatgtcgactagctgcctaagtatactagatc

SEQ ID NO: 22361 - DNA, 1979 bp, Homo sapiens
  SIMILAR (121)..(636): 941254mologous to Homo sapiens Human chordin related protein (Clone dw665_4),accession number Y82777,Smith-Waterman Score=920.
gtcgactccacgcgtccggagcgccccggggagctcggagcgcgtgcacgcttggcagacggataaggccagtgcccagcttgaagggtctgtcaccttttgcagaggcccaaatgagaaaaaaagtggaaaatgggaggcatgaaatacatcttttcggtggtggtctttcttttgctagaaggaggcaaaacagagcaagtaaaacattcagagacatattgcatgtttcaagacaaaaagtacagagtgggtgagagatggcatccttacctggaaccttatgggttggtttactgcgtgaactgcatctgctcagagaatgggaatgtgctttgcacccgagtcagatgtccaaatgttcattgcctttctcctgtgcatattcctcatctgtgctgccctcgctgcccagaagactccttaccctcagtgaacaataaggtgcccagcaagtcttgcgagtccaatgggacaacttaccaacatggagagctgttcgtagcggaagggctcattcagaatcggcaacccaatcaatgcacccagtgcagctgttcggagggaaacgtgtattgtggtctcaagacttgccccaaattaacctgtgccttcccagtctctgttccattttctccttatttctttttaataaacaggagatggagaactgtcatgggaacattctgatggtgatatcttccggcaacctgccaacagagaagcaagacattcttaccaccgctctcactatgatcctccaccaagccgacaggctggaggtctgtcccgctttcctggggccagaagtcaccggggagctcttatggattcccagcaagcatcaggaaccattgtgcaaattgtcatcaataacaaacacaagcatggacaagtgtgtgtttccaatggaaagacctattctcatggcgagtcctggcacccaaacctccgggcatttggcattgtggagtgtgtgctatgtacttgtaatgtcaccaagcaagagtgtaagaaaatccactgccccaatcgatacccctgcaagtatcctcaaaaaatagacggaaaatgctgacaaaattctacttgcttcctgattccagaagaacttccaggccaaagctttgacaataaaggctacttctgcggggaagaaacgatgcctgtgtatgagtctgtattcatggaggatggggagacaaccagaaaaatagcactggagactgagagaccacctcaggtcatttgctccactttttgcttggccctagggcattctccagcacttccatattgagaagatctccaagaggatgtttgaggagcttcctcacggccactttgcgtttgtttgccttttaggccagtggaagatcttcaccgaaggagaagctcagatcagccagatgtgttcaagtcgtgtatgcagaacagagcttgaagatttagtcaaggttttgtacctggagagatctgaaaagggccactgttaggcaagacagacagtattggatagggtaaagcaagaaaactcaagctgcagctggactgcaggcttattttgcttaagtcaacagtgccctaaaactccaaactcaaatgcagtcaattattcacgccatgcacagcataatttgctcctttgtgtggagtggtgtgtcagcccttgaacatctcctccaaagagactagaagagtcttaaattatatgtgggaggaggagggatagaacatcacaacactgctctagtttcttggagaatcacatttctttacaggttaaagacaaacaagaccccagggtttttatctagaaagttattcaagtgaaagaaagagaagggaattgcttagtaggagttctgcagtatagaacaattacttgtatgaaattatacctttgaattttagaatgtcatgtgttcttttaaaaaaattagctccccattcccccactccagataaagcttcagtta

SEQ ID NO: 22362 - DNA, 480 bp, Homo sapiens
  SIMILAR (363)..(226): 1001254mologous to Escherichia coli Oligopeptide transport ATP-binding protein OppF,accession number D90763,Smith-Waterman Score=243.
atggatccgccggcgggagccgctcgccgcctgctctgccccgcgctgctgctgctgctgctgctgctgacgccggcgctcctgccgccgccggcgccgcccgcgaacgccaggctcgccgccgccgtcgaccccccaggtagaatacacatcttatatcaccctgacactgagtacgcccggccttctttcatcagcggccgtccgccaatcgcggatcggccagcgaagagtgacaccatcgacggctttgagcgttttcggcggttgccagaaccactgtttgccatctttgatttcaaagtgcactttaagatcggcgatttcaaggaggacttttcttccttcagttacagcattcataacagttcctccaccggtttaaagcaagcacgcagacggccaggcgtaaactcttccagcggcgcaaataaagatggagctcctaaccagcgccagattgtgaagagctttgagtga

SEQ ID NO: 22363 - DNA, 297 bp, Homo sapiens
  SIMILAR (52)..(135): 1001254mologous to Bos taurus procollagen I N- proteinase,accession number X96389,Smith-Waterman Score=140.
atgaaggatcagggtgaacatacaaccaaagcgggccaaggagtaggcaaggtcaatgaaatctaccatgacgagtccttgggtgcccacatcaacgtggtcctggtgcggatcatcctcctgagctatggaaaggaacacgaacggtcaagaatggctgagacagctgcggaacccaagcaaggaagagacatcctccaaaggaacatgaacggtcaagcatggctgagacagctgcggaacccaagcaaggaagagacttcctccaaagcaacatggacggtcaagaatggctga

SEQ ID NO: 22364 - DNA, 4043 bp, Homo sapiens
  SIMILAR (226)..(3363): 911254mologous to Bos taurus procollagen I N- proteinase,accession number X96389,Smith-Waterman Score=5282.
atgggccggattgatttctggatggatctgacgacttacaaccgaaagcaaatgagtattctttacaagcatgggggagcatttacaaaaattgatcccggcctcccctgcctgcctggcctgaatcccccaagcctgtcagccgtagcctcccaccccacctgcctggcaatgcagaaacctgagattgctgcttctcggcaccaagaaccaagaggtgaagttggcgggcccctggggcacggagcggagcgcatcctggcggtgcccgtgcgcactgacgcccagggccgcttggtgtcccacgtggtgtcggcagctacgtccagagcaggggtacgagcccgcagggccgccccggtccggaccccgagcttccccggaggcaacgaggaggagcctggcagtcacctcttctacaatgtcacggtctttggccgagacctgcacctgcggctgcggcccaacgcccgcctcgtggcgcccggggccactatggagtggcagggcgagaagggcaccacccgcgtggagcccctgctcgggagctgtctctacgtcggagacgtggccggcctagccgaagcctcctctgtggcgctcagcaactgcgatgggctggctggtctgatccggatggaggaggaggagttcttcatcgaacccttggagaaggggctggcggcgcaggaggctgagcaaggccgtgtgcatgtggtgtatcgccggccacccacgtcccctcctctcggggggccacaggccctggacacaggggcctccctggacagcctggacagcctcagccgcgccctgggcgtcctagaggagcacgccaacagctcgaggcggagggcacgcaggcatgctgcagacgatgactacaacatcgaggtcctgctgggcgtggatgactctgtggtgcagttccacgggaaggagcacgtacagaagtacctgctgacactcatgaacattgtcaatgaaatctaccatgacgagtccttgggtgcccacatcaacgtggtcctggtgcggatcatcctcctgagctatggaaagtccatgagcctcatcgagatcgggaacccctctcagagcctggagaatgtctgccgctgggcctacctccagcagaagccagacacgggccacgatgaataccacgatcacgccatcttcctcacacggcaggactttgggccttccggcatgcaaggctatgctcctgtcaccggcatgtgccatccggtccgcagctgcaccctgaaccatgaggacggcttctcctcagcgtttgtggtggcccatgagactggccacgtgctgggcatggagcacgacgggcagggcaaccgctgtggcgacgaggtgcggctgggcagcatcatggcgcccctggtgcaggccgccttccaccgcttccactggtcccgctgcagccagcaggagctgagccgctacctgcactcctatgactgcctgctggatgaccccttcgcccacgactggccggcgctgccccagctcccgggactgcactactccatgaacgagcaatgccgctttgacttcggcctgggctacatgatgtgcacggcgttccggacctttgacccctgcaagcagctgtggtgcagccatcctgacaacccctacttttgcaagaccaagaaggggccccccttggacgggactatgtgtgcacctggcaagcattgttttaaaggacactgcatctggctgacacctgacatcctcaaacgggacggcagctggggcgcttggagtccgtttggctcctgctcacgtacctgtggcacgggcgtgaagttcaggacccgccagtgtgacaacccacacccggccaacgggggccgcacctgctcgggccttgcctacgacttccagctctgcagccgccaggactgccccgactccctggctgacttccgcgaggagcagtgccgccagtgggacctgtacttcgagcacggcgacgcccagcaccactggctgccccacgagcaccgggatgccaaggagagatgccacctgtactgcgagtccagggagaccggggaggtggtgtccatgaagcgcatggtgcatgatgggacgcgctgctcctacaaggacgccttcagcctctgtgtgcgcggggactgcaggaaggtgggctgtgacggtgtgatcggctccagcaagcaggaagacaagtgtggcgtgtgcggaggggacaacagccactgcaaagtggtcaagggcacgttcacacggtcacccaagaagcatggttacatcaagatgtttgagatccctgcaggagccagacacctgctcattcaggaggtagacgccaccagccaccatctggccgtcaagaacctggagacaggcaagttcatcttaaatgaagagaatgacgtggatgccagttccaaaaccttcattgccatgggcgtggagtgggagtacagagacgaggacggccgggagacgctgcagaccatgggccccctccacggcaccatcaccgttctggtcatcccggtgggagacacccgggtctcactgacgtacaaatacatgatccatgaggactcactgaatgtcgatgacaacaacgtcctggaagaggactctgtggtctacgagtgggccctgaagaagtggtctccgtgctccaagccctgtggcggagggtcccagttcaccaagtatggctgccgccggaggctggaccacaagatggtacaccgtggcttctgtgccgccctctcgaagcccaaagccatccgcagagcgtgcaacccacaggaatgctcccagccagtgtgggtcacaggcgaatgggagccatgtagccagacctgtgggcggacaggcatgcaggtgcgctccgtgcgctgcattcagccgctacacgacaacaccacccgctccgtgcacgccaagcactgcaatgacgcccggcccgagagccgccgggcctgcagccgcgagctctgccctggtcgttggcgagccgggccctggtcccagtgctcagtaacctgtggcaacggcacccaggagcggccagtgccctgccgcaccgcggacgacagcttcggcatctgccaggaggagcgtcctgagacagcgaggacctgcaggcttggcccctgtccccgaaacatctcagatccctccaagaagagctacgtagttcagtggctgtcccgcccggaccccgactcgcccatccggaagatctcgtcaaagggccactgccagaggcgacaagtcaatattctgtaggatggaagtcttgtcacgctattgctccatccaaggctacaaaagcgttgttgcaaaagtcctgtaacctgtacaacaaccccaccaacgtggagggcaggatagagccaccgcctgggaagcacaacgacattgacgtgttcatgcctaccctcccagtgcccactgtagccatggaggtgcggccatcaccaagcacccccctggaggtccctctcaatgcctccagcaccaatgccacagaggatcacccagaaaccaatgccgtagatgaaccctacaaaatccatggcctggaagatgaagtccagccacccaacctaatccctcgacgaccgagcccctatgaaaagaccagaaaccaaagaatccaagagctcattgatgagatgcggaagaaagagatgctcggaaaagatattccatgggatagcaaatcctgtgtcatggagatgaagtcaaaattcctgattccaaaaggttttgagaaaacaaagagggggaatgactccatgagcctcatcgagatcgggaacccctctcagagcctggagaatgtctgccgctgggcctacctccagcagaagccagacacgggccacgatgaataccacgatcacgccatcttcctcacacggcaggactttgggccttccggcatgcaagactctcgactcgagaagctaactgctgtaagactcaccgagaacatcagacccaaccagataaggtctgaatga

SEQ ID NO: 22365 - DNA, 1415 bp, Homo sapiens
  SIMILAR (728)..(1027): 541254mologous to Homo sapiens CGI-132 protein,accession number AF151890,Smith-Waterman Score=181.
tcctattttttctaaggtgtgactgcctcgataggggtgggacgacaacaggagaaaaggtgagaggtaaattaattctggttaacgagaaggataaagtaaaatctagtcacttacaatccttctcctagtctcggccctgacactacctcctctgtgaagtcttccttagcaagcactaggtttgccttctctgctcgctgtccttgcgctgagtactactgatcgcgctagtttctctgctgtcatctcacggtctccccagcggactgtgagctccacgaggaaagaacagcgccctttagtatttgcgttctcagcgttgcgcctcggcaccaacgcttgcaagatggatggcttttgtagcactttccttggcgcgcctgggattcgcctaaaacttctgactccagcagggactcacaagtctgagagggatcgcaccgccactcccacaagacaccacgagaaacgcctcttttgcagcagtttaagtatagggcggcaagcggaggaggcgtggcgagcggatcatccgcttccggagtcgaggttgttcgggcttgtaccgcttggcggtgcggcctggtgtcggcttgcaggttctttctgtgtttgttctctgcgcctgccaaggccgatagagctggtgcgtgcggctagcggggctctcctaggagccgtacgccggcggaaccatggtccacctcactgcttttctacagctactctcctctgcaaggcctaccgtgggggccacttaaccatccgccttgcccttggttggcgcacccaatcggccgttctaccgcattgtggctgctcaaaacaagtgtcccagggatggcccgttcccgtagagcaagctgggccccccctatgatccccattgccccccaacagtcatggagaaaaaactccgtgccccctcaaccctagacaggatcccgtcattggattggcctgcggggccccacctctcctaagccctatggaaaagcttctgggtcttgctggctttttcccctctgcatccctatgatgatcacaaatgctgagagactgcgaaggaaacgggcacgtgaagtcctgttagcttctcagaaaacagatgcagaagctacagatacagaggctacagaaacataaatgagctgacttcagtgagcatagcagtgggaacaaggtcaaggtccttttgaaacactgcagcgatcttaattttgttagatttggagttcaataaatggagtatcactgaaaaaaaaactctcccaatgctgagtgcttgaagagaggaaagaacacagccctggagtcagagaccggggtttaagttcgtgctccacctcttattagctagctatggactcctgtttgagcctcgattccctcttttgtgaagtggggtaatg

SEQ ID NO: 22366 - DNA, 5675 bp, Homo sapiens
  SIMILAR (415)..(4983): 1001254mologous to Homo sapiens son-a,accession number X63753,Smith-Waterman Score=7710.
ggcgggggcaacgacagcgctggagttgccggggcagccttcggtgactggggtgccagagttgccagggctgccttcggcaactagggcactggagttgtcggggcagcctgtggcaactggggcactagagttgcctgggccgctcatggcagctggggcactggagttctcggggcagtctggggcagctggagcactggagcttttggggcagcctctggcaacaggggtgctggagttgccagggcagcctggggcgccagagttgcctgggcagcctgtggcaactgtggcgctggagatctctgttcagtctgtggtgacaacatcggagctgtcaacgatgaccgtgtcgcagtccctggaggtgccctcgacgacagcgctggaatcctataatacgaacgttccatgatgtcatcttacgaacgctctatgatgtcttatgagcggtctatgatgtcccctatggctgaacgctctatgatgtcagcctacgagcgctctatgatgtcagcctacgagcgctctatgatgtcccctatggctgagcgctctatgatgtcagcttatgaacgctccatgatgtcagcttatgaacgctccatgatgtccccaatggctgatcgatctatgatgtccatgggtgctgaccggtctatgatgtcgtcatactctgctgctgaccggtctatgatgtcatcgtactctgcagctgaccgatctatgatgtcatcttatactgctgatcgttcaatgatgtctatggctgctgattcttacaccgattcttacactgacacatatacagaggcatatatggtgccacctttgcctcctgaagagcccccaacaatgccaccgttgccacctgaggagccaccaatgacaccaccattgcctcctgaggaaccaccagagggtccagcattgcccactgagcagtcagcattaacagctgaaaatacttggcctacagaggtgccatcattaccatctgaagagtctgtatcgcagcctgagcctcctgtgagtcaaagtgagatttcggagccttcagcagtgcctactgattattcagtgtcagcatcagatccctcagttttagtatcagaggctgctgtgactgttccagaaccaccaccagagccagaatcttcaattacgttaacacctgtagagtctgcagtagtagcagaagaacatgaagttgttccagagagaccagtgacttgtatggtatctgaaactcccgccatgtcagctgaaccaactgtgttagcatcagagcctcctgttatgtcagagacagcagaaacatttgattccatgagagcctcaggacatgttgcctcagaagtatctacatccttgttggttccagcagtaactactccagtgctggcagagagcattctggagccgccagccatggctgccccagagtcttcagctatggctgtcctggagtcttcggctgtgaccgtcctggagtcttcgactgtgactgtcctggagtcttcgactgtaactgtcctggagccttcggttgtgactgtcccggagcctcctgttgtggctgagccagactctgttaccattcctgtgccagttgtttctgcgctggagccttctgtgcctgttctggaaccagcggtgtcagtccttcaaccttctatgattgtttcagaaccatctgtttctgtccaggaatcgactgtgacagtttcagagcctgctgtcacagtctcagagcagactcaagtaataccaactgaggtggctatagagtccacaccaatgatactggaatctagtatcatgtcatcacatgttatgaaaggaattaatctatcctctggtgatcaaattcttgctccagagattggcatgcaggagattgcattgcattcaggtgaagaaccacatgctgaggaacacctgaaaggtgacttttacgaaagtgaacatggtataaatatagaccttaatataaatagtcatttaattgctaaagagatggaacataatacagtgtgtgctgctggtactagtcctgttggggaaattggtgaagagaaaattttgcccaccagtgagactaaacagcgcacagtattggatacctaccctggtgttagtgaagctgatgcaggagaaactctatcttctactggtccttttgctctggaacctgatgcaacaggaactagtaagggtattgaatttaccacagcatctactctcagtttagttaataaatatgatgttgatttatctttaactactcaagatactgaacatgacatggtaataatttccaccagtcctagtggtggtagtgaagctgacattgaagggcctttgcctgctaaagatattcatcttgatttaccatctaataataaccttgttagtaaggatacagaagaaccattacctgtaaaagagagtgaccagacaatagcagccttgctcagccctaaagaaagtagtggaggagaaaaagaagtacctccccctcctaaagagacactgcctgattcaggattttctgccaatattgaggatattaatgaagcagatttagtgagaccgttacttcctaaggacatggaacgtcttacaagccttagagctggcattgaaggacctttacttgcaagtgatgttggacgtgacagatctgctgccagcccggttgtaagtagtatgccagaaagagcttcagagtcttcttcagaggaaaaagatgattatgaaatttttgtaaaagttaaggacactcacgaaaaaagcaagaaaaataagaaccgtgataagggggagaaagagaagaaaagagatcctcatttaagatctcgaagtaagcgttccaaatcttctgaacacaaatcacgcaagcgtaccagtgaatctcgttctagggcaagaaagagatcatctaagtccaagtctcatcgctctcagacacgttcacggtcacgttcaagacgcaggaggagaagcagcagatcaagatcaaagtctagaggaagaagatctgtatcaaaagagaagcgcaaaagatctccaaagcacagatccaagtctagggaaagaaaaagaaaaagatcaagctccagggataaccgaaagacagttagagctcgaagtcgaaccccaagtcgtcggagtcggagtcatactccaagtcgtcgacgaaggtctagatctgtgggtagaagaaggagctttagcatttccccaagccgccgcagccgcacccccagccgccgcagccgcacccccagccgccgcagccgcacccccagccgccgcagccgcacccccagccgccggagccgcacccctagccgtcggagccgcaccccaagccgccggagaagatcaaggtctgtggtaagaagacgaagcttcagtatctcaccagtcagattaaggcgatcaagaacacccttaagaagaaggtttagcagatctcccatccgtcgtaaaagatccaggtcttctgaacgaggcagatcacccaaacgtctgacagatttggataaggctcaattacttgaaatagccaaagctaatgcagctgccatgtgtgctaaggctggtgtccctttaccaccaaacctaaagcctgcacctccacctactatagttgagaaagttgctaaaaagtcaggaggagctactatagaagaactaactgagaaatgtaaacagatcgcacagagtaaagaagatgatgatgtaatagtgaataaacctcatgtttcggatgaagaggaagaagaacctcctttttatcatcatccctttaaactcagtgaatttaaacctatttttttcaatctgaatattgctgcagcaaaaccaactccaccaaaaagccaggtaacattaacaaaagaattccctgtatcatctggatctcaacatcggaaaaaagaagcggatagtgtttatggagaatgggttcctgtggagaaaaatggtgaagaaaacaaagatgatgataatgttttcagcagcaatttgccctcagagcctgtggacatctctacagcaatgagtgaacgggcacttgctcagaaaagactcagtgagaatgcatttgatcttgaagccatgagcatgttaaatagagctcaggaaaggattgatgcctgggctcagctgaactctattcctggccagttcacaggaagtacaggagtacaggttttgacacaagaacagttggccaatactggtgcccaagcctggattaaaaaggatcagttcttaagagcagccccggtaactggaggaatgggagccgttttgatgagaaaaatgggctggagagaaggagaaggattaggaaaaaacaaagaaggcaacaaggaacccatcctagttgattttaagacagaccgaaaaggtcttgttgcagtaggagaaagagcacaaaagaggtctgggaacttctctgctgcaatgaaagatctgtcaggcaaacatcctgtgtctgctttgatggagatctgtaataaaagaaggtggcaaccacctgaatttctattggtccatgatagtggccctgatcatcgcaaacattttctctttagggtattgataaatggaagcgcttaccagcccagctttgccagccctaataagaagcatgctaaagccacagcagctactgtggttcttcaagcaatgggccttgtaccaaaggacctcatggctaatgcacttgcttcaggagtgcctcacgtagatagattgaggttttataataatcatttcagaattttactctgcatcacaatgtatttcctctttaatgttgtaaatatttggcaatttaagacattgtgtaaaaagcaatctgtaaaaacatctccaggctttgatttttgtaccatggaaattgtatttaaccatacagggttttggtatgtttatattgtttaccttagtgatgtatttgtttaagtggctaacatccaaacgactgtttgaaggcatcagagtaatcttcagtgtggaatgttaaataacgcttttatactgtattttgtactatgatgtaactccccttccttatggctaggctactgtaacacttgcctgtaatcagtgaagggctgtgcaccttgtactatttcacaatgggttctgctggacagataatgggccagtgttattgaggtgatcaagatctgttccacagggctaatgcaccatctcccctcaaaattttgtagaggttctaaaaagaaagtggtatgttgtgtgatgatcagcactaagtcctgcattcctgttaaagccacttgggtcataagaagggagtaaaaaatgaagtctgactagaattctattggcagaggccaagtacatttagtatggcattgagttgtgatatagttttactttgatgtgcattttgaatttcagctacacctagatagacgtaaaatgataattaaaatgctgtaaccaacttatctaataaaattggcaaccagccactattttgttgactatgagaaagttaaaagtttatgttaatttttagggtctgatagaatatttcatgtgtattacagtggtattcatatgctatgtctctaaactttattttcaaaagcttaaggcccaaatacaaacttctctggaat

SEQ ID NO: 22367 - DNA, 469 bp, Homo sapiens
  SIMILAR (48)..(167): 1001254mologous to Homo sapiens son-a,accession number X63753,Smith-Waterman Score=208.
tttagatatcatattgagctttaattaagaaacactttattttttagattgctgcagcaaaaccaactccaccaaaaagccaggtaacattaacaaaagaattccctgtatcatctggatctcaacatcggaaaaaagaagcggatagtgtttatggagaatgggttctatagattagttgtcatcgcctcttgcccttggtttccaaagcccagacttttgccaaggactggactaggtatctgatgcccatctggacatttttcttgcagttcttggatatgtagatcagagacacctgtactcttcactgtaggttcccttccttggcttggccatatcatcatcttccagtaaacacctccaattctacaaataaatcctttctttctttggataggatcagttcttaagagcagccccggtaactggaggaatgggagccgttttgatgagaaaaatgggtttg

SEQ ID NO: 22368 - DNA, 814 bp, Homo sapiens
  SIMILAR (27)..(122): 711254mologous to Homo sapiens BASS1,accession number AF139897,Smith-Waterman Score=111.
taattaagaaacactttattttttagattgctgcagcaaaaccaactccaccaaaaagccaggtaacattaacaaaagaattccctgtatccatctggacctcaacatcggaaaaaagaagcggatagtgtttatggagaatgggttcctgtggagaaaaatggtgaagaaaacaaagatgatgataatgttttcagcagcaatttgccctcagaggtaagtaggaggaatattatgtatttttccttttttatacctgaatctgcccatttcattgttatgttatgtctgatttgggattctgtttcactcttccttagggccggggttaaacggcagggccgggtttaggacggacagatggaaacaacccgcagcttctcattttgacagtaactcggatggcaattcactttgtgggaaccaaggccacaaagtggaaaaggcttcgatttgcagagaacagtgttattcacatccctacccaacattgggccctccctgcacttgtgggaaggtagtccttggtactccattcccttctccttcccctctttgctactattaaaagtcggagaagtggaattcaaacgttgaaatttccacggggctatagttgtatcttaataatgccaagtgtcaaaacaaccccattaaaatgccgcctgattaaataatgtgctgctaaatatagtgcacatgaaaacagcaagactgtatatatatgtaaatatatatatatatctgtatctttgtatgtatctctgtatctgtacctttgctgtatcttttaataaacagtttacttttattt

SEQ ID NO: 22369 - DNA, 6149 bp, Homo sapiens
  SIMILAR (9)..(2960): 661254mologous to Mus musculus SON protein,accession number AF193606,Smith-Waterman Score=3029.
tttcgtctgagttgccagggccctctgtgacaccagtgccacagttgtcgcaggaattgccagggcttccagcaccatccatggggttggagccaccacaggaggtaccagagccacctgtgatggcacaggagttgccagggctgcctttggtgacagcagcagtagagttgccagagcagcctgcggtaacagtagcaatggagttgaccgaacaacctgtgacgacgacagagttggagcagcctgtggggatgacaacggtggaacatcctgggcatcctgaggtgacaacggcaacagggttgctggggcagcctgaggcaacgatggtgctggagttgccaggacagccagtggcaacgacagcgctggagttgccggggcagccttcggtgactggggtgccagagttgccggggctgccttcggcaactagggcactggagttgtcggggcagcctgtggcaactggggcactagagttgcctgggccgctcatggcagctggggcactggagttctcggggcagtctggggcagctggagcactggagcttttggggcagcctctggcaacaggggtgctggagttgccagggcagcctggggcgccagagttgcctgggcagcctgtggcaactgtggcgctggagatctctgttcagtctgtggtgacaacatcggagctgtcaacgatgaccgtgtcgcagtccctggaggtgccctcgacgacagcgctggaatcctataatacggtagcacaggagctgcctactacattagtgggggagacttctgtaacagtaggagtggatcccttgatggccccagaatcccatatattagcttctaacaccatggagacccatatattagcatccaacaccatggactcccaaatgctagcgtccaacaccatggactcccagatgctagcatccaacaccatggactcccagatgttagcgtctagcaccatggactcccagatgttagcaactagctccatggactcccagatgttagcaactagctccatggactcccagatgttagcaactagcactatggactcccagatgttagcaaccagttccatggactcccagatgttagcaaccagctccatggactcccagatgttagcaaccagctccatggactcccagatgttagcaaccagctccatggactcccagatgttagcaaccagcaccatggattctcagatgttagcaaccagcaccatggactcccagatgttggcaactagctcaatggattcccagatgttagcatctggcactatggactctcaaatgttagcttctggcaccatggatgctcagatgttagcgtctggtaccatggatgcccagatgttagcgtctagtacccaagactctgctatgttgggttcaaaatctcctgatccctataggttagctcaggatccttacaggttagctcaggatccctataggttgggccatgacccctatagattaggtcatgatgcttacaggttaggacaagacccttatagattaggccatgatccctacagactaactcctgatccctataggatgtcacctagaccctacaggatagcacccaggtcctatagaatagcacccaggccatataggttagcacctagacccctgatgttagcatctagacgttctatgatgatgtcctatgctgcagaacgttccatgatgtcatcttacgaacgctctatgatgtcttatgagcggtctatgatgtcccctatggctgaacgctctatgatgtcagcctacgagcgctctatgatgtcagcctacgagcgctctatgatgtcccctatggctgagcgctctatgatgtcagcttatgaacgctccatgatgtcagcttatgaacgctccatgatgtccccaatggctgatcgatctatgatgtccatgggtgctgaccggtctatgatgtcgtcatactctgctgctgaccggtctatgatgtcatcgtactctgcagctgaccgatctatgatgtcatcttatactgctgatcgttcaatgatgtctatggctgctgattcttacaccgattcttacactgacacatatacagaggcatatatggtgccacctttgcctcctgaagagcccccaacaatgccaccgttgccacctgaggagccaccaatgacaccaccattgcctcctgaggaaccaccagagggtccagcattgcccactgagcagtcagcattaacagctgaaaatacttggcctacagaggtgccatcattaccatctgaagagtctgtatcgcagcctgagcctcctgtgagtcaaagtgagatttcggagccttcagcagtgcctactgattattcagtgtcagcatcagatccctcagttttagtatcagaggctgctgtgactgttccagaaccaccaccagagccagaatcttcaattacgttaacacctgtagagtctgcagtagtagcagaagaacatgaagttgttccagagagaccagtgacttgtatggtatctgaaactcccgccatgtcagctgaaccaactgtgttagcatcagagcctcctgttatgtcagagacagcagaaacatttgattccatgagagcctcaggacatgttgcctcagaagtatctacatccttgttggttccagcagtaactactccagtgctggcagagagcattctggagccgccagccatggctgccccagagtcttcagctatggctgtcctggagtcttcggctgtgaccgtcctggagtcttcgactgtgactgtcctggagtcttcgactgtaactgtcctagagccttcggttgtgactgtcccggagcctcctgttgtggctgagccagactatgttaccattcctgtgccaggttgtttctgcgctggagccttctgtgcctgttctggaaccagcggtgtcagtccttcaaccttctatgattgtttcagaaccatctgtttctgtccaggaatcgactgtgacagtttcagagcctgctgtcacagtctcagagcagactcaagtaataccaactgaggtggctatagagtccacaccaatgatactggaatctagtatcatgtcatcacatgttatgaaaggaattaatctatcctctggtgatcaaaatcttgctccagagattggcatgcaggagattgcattgcattcaggtgaagaaccacatgctgaggaacacctgaaaggtgacttttacgaaagtgaacatggtataaatatagaccttaatataaataatcatttaattgctaaagagatggaacataatacagtgtgtgctgctggtactagtcctgttggggaaattggtgaagagaaaattttgcccaccagtgagactaaacagtgcacagtattggatacctaccctggtgttagtgaagctgatgcaggagaaactctatcttctactggtccttttgctctggaacctgatgcaacaggaactagtaagggtattgaatttaccacagcatctactctcagtttagttaataaatatgatgttgatttatctttaactactcaagatactgaacatgacatggtaatttccaccagtcctagtggtggtagtgaagctgacattgaagggcctttgcctgctaaagatattcatcttgatttaccatctaataataaccttgttagtaaggatacagaagaaccattacctgtaaaagagagtgaccagacattagcagctctgctcagccctaaagaaagtagtggaggagaaaaagaagtacctccccctcctaaagagacactgcctgattcaggattttctgccaatattgaggatattaatgaagcagatttagtgagaccgttacttcctaaggacatggaacgtcttacaagccttagagctggcattgaaggacctttacttgcaagtgatgttggacgtgacagatctgctgccagcccggttgtaagtagtatgccagaaagagcttcagagtcttcttcagaggaaaaagatgattatgaaatttttgtaaaagttaaggacactcacgaaaaaagcaagaaaaataagaaccgtgataagggggagaaagagaagaaaagagactcttcattaagatctcgaagtaagcgttccaaatcttctgaacacaaatcacgcaagcgtaccagtgaatctcgttctagggcaagaaagagatcatctaagtccaagtctcatcgctctcagacacgttcacggtcacgttcaagacgcaggaggagaagcagcagatcaagatcaaagtctagaggaagaagatctgtatcaaaagagaagcgcaaaagatctccaaagcacagatccaagtctagggaaagaaaaagaaaaagatcaagctccagggataaccgaaagacagttagagctcgaagtcgaaccccaagtcgtcggagtcggagtcatactccaagtcgtcgacgaaggtctagatctgtgggtagaagaaggagctttagcatttccccaagccgccgcagccgcacccccagccgccgcagccgcacccccagccgccgcagccgcacccccagccgccgcagccgcacccccagccgccggagccgcacccctagccgtcggagccgcaccccaagccgccggagaagatcaaggtctgtggtaagaagacgaagcttcagtatctcaccagtcagattaaggcgatcaagaacacccttaagaagaaggtttagcagatctcccatccgtcgtaaaagatccaggtcttctgaacgaggcagatcacccaaacgtctgacagatttggataaggctcaattacttgaaatagccaaagctaatgcagctgccatgtgtgctaaggctggtgtccctttaccaccaaacctaaagcctgcacctccacctactatagaagagaaagttgctaaaaagtcaggaggagctactatagaagaactaactgagaaatgtaaacagatcgcacagagtaaagaagatgatgatgtaatagtgaataaacctcatgtttcggatgaagaggaagaagaacctcctttttatcatcatccctttaaactcagtgaacccaaacctatttttttcaatctgaatattgctgcagcaaaaccaactccaccaaaaagccaggtaacattaacaaaagaattccctgtatcatctggatctcaacatcggaaaaaagaagcggatagtgtttatggagaatgggttcctgtggagaaaaatggtgaagaaaacaaagatgatgataatgttttcagcagcaatttgccctcagagggccgggttaaacggcagggccgggttagacgacagatgaaacaacccgcagcttctcatttgacagtaactcgatgcaattcactttgtggaaccaagccacaaaatgaaaaagcatcgaaatgcagaagaacagtgttatcacatccctacccaacattgggccctccctgcacttgtggggaaggtagtccaaggtacaactattttagcttcccgattttgctttcaaggctctatagctctagattttggtggtagcaaatttatcgggtggagggattgatcggagagggcagatcctcaggttcaacacaagaactggattggaaaaggtcattgtaggttgatgtgagcatcttgggtacatagcccattgcccttaatgatggtttcttactgtttctctgggttgtttgtcagatagcctttaattttaattatttttccttccctttgctaccttggcccttttaaattcttgtgtttaacctaatgctcagccttggtactccattcccttctccttcccctctttgctactattaaaagtcggagaagtggaattcaaacgttgaaatttccacggggctatagttgtatcttaataatgccaagtgtcaaaacaaccccattaaaatgccgcctgattaaataatgtgctgctaaatatagtgcacatgaaaacagcaagactgtatatatatgtaaatatatatatatatctgtatctttgtatgtatctctgtatctgtacctttgctgtatcttttaataaacagtttactttt

SEQ ID NO: 22370 - DNA, 6370 bp, Homo sapiens
  SIMILAR (1021)..(4527): 981254mologous to Homo sapiens son-a,accession number X63753,Smith-Waterman Score=5718.
atggccccagaatcccatatattagcttctaacaccatggagacccatatattagcatccaacaccatggactcccaaatgctagcgtccaacaccatggactcccagatgctagcatccaacaccatggactcccagatgttagcgtctagcaccatggactcccagatgttagcaactagctccatggactcccaaatgctagcgtccaacaccatggactcccagatgctagcatccaacaccatggactcccagatgttagcgtctagcaccatggactcccagatgttagcaactagctccatggactcccagatgttagcaactagctccatggactcccagatgttagcaactagcactatggactcccagatgttagcaaccagttccatggactcccagatgttagcaaccagctccatggactcccagatgttagcaaccagctccatggactcccagatgttagcaaccagctccatggactcccagatgttagcaaccagcaccatggattctcagatgttagcaaccagcaccatggactcccagatgttagcaactagctcaatggattcccagatgttagcatctggcactatggactctcaaatgttagcttctggcaccatggatgctcagatgttagcgtctggtaccatggatgcccagatgttagcgtctagtacccaagattctgctatgttgggttcaaaatctcctgatccctataggttagctcaggatccttacaggttagctcaggatccctataggttgggccatgacccctatagattaggtcatgatgcttacaggttaggacaagacccttatagattaggccatgatccctacagactaactcctgatccctataggatgtcacctagaccctacaggatagcacccaggtcctatagaatagcacccaggccatataggttagcacctagacccctgatgttagcatctagacgttctatgatgatgtcctatgctgcagaacgttccatgatgtcatcttacgaacgctctatgatgtcttatgagcggtctatgatgtcccctatggctgaacgctctatgatgtcagcctacgagcgctctatgatgtcagcctacgagcgctctatgatgtcccctatggctgagcgctctatgatgtcagcttatgaacgctccatgatgtcagcttatgaacgctccatgatgtccccaatggctgatcgatctatgatgtccatgggtgctgaccggtctatgatgtcgtcatactctgctgctgaccggtctatgatgtcatcgtactctgcagctgaccgatctatgatgtcatcttatactgctgatcgttcaatgatgtctatggctgctgattcttacaccgattcttacactgacacatatacagaggcatatatggtgccacctttgcctcctgaagagcccccaacaatgccaccgttgccacctgaggagccaccaatgacaccaccattgcctcctgaggaaccaccagagggtccagcattgcccactgagcagtcagcattaacagctgaaaatacttggcctacagaggtgccatcattaccatctgaagagtctgtatcgcagcctgagcctcctgtgagtcaaagtgagatttcggagccttcagcagtgcctactgattattcagtgtcagcatcagatccctcagttttagtatcagaggctgctgtgactgttccagaaccaccaccagagccagaatcttcaattacgttaacacctgtagagtctgcagtagtagcagaagaacatgaagttgttccagagagaccagtgacttgtatggtatctgaaactcccgccatgtcagctgaaccaactgtgttagcatcagagcctcctgttatgtcagagacagcagaaacatttgattccatgagagcctcaggacatgttgcctcagaagtatctacatccttgttggttccagcagtaactactccagtgctggcagagagcattctggagccgccagccatggctgccccagagtcttcagctatggctgtcctggagtcttcggctgtgaccgtcctggagtcttcgactgtgactgtcctggagtcttcgactgtaactgtcctggagccttcggttgtgactgtcccggagcctcctgttgtggctgagccagactctgttaccattcctgtgccagttgtttctgcgctggagccttctgtgcctgttctggaaccagcggtgtcagtccttcaaccttctatgattgtttcagaaccatctgtttctgtccaggaatcgactgtgacagtttcagagcctgctgtcacagtctcagagcagactcaagtaataccaactgaggtggctatagagtccacaccaatgatactggaatctagtatcatgtcatcacatgttatgaaaggaattaatctatcctctggtgatcaaattcttgctccagagattggcatgcaggagattgcattgcattcaggtgaagaaccacatgctgaggaacacctgaaaggtgacttttacgaaagtgaacatggtataaatatagaccttaatataaatagtcatttaattgctaaagagatggaacataatacagtgtgtgctgctggtactagtcctgttggggaaattggtgaagagaaaattttgcccaccagtgagactaaacagcgcacagtattggatacctaccctggtgttagtgaagctgatgcaggagaaactctatcttctactggtccttttgctctggaacctgatgcaacaggaactagtaagggtattgaatttaccacagcatctactctcagtttagttaataaatatgatgttgatttatctttaactactcaagatactgaacatgacatggtaataatttccaccagtcctagtggtggtagtgaagctgacattgaagggcctttgcctgctaaagatattcatcttgatttaccatctaataataaccttgttagtaaggatacagaagaaccattacctgtaaaagagagtgaccagacaatagcagccttgctcagccctaaagaaagtagtggaggagaaaaagaagtacctccccctcctaaagagacactgcctgattcaggattttctgccaatattgaggatattaatgaagcagatttagtgagaccgttacttcctaaggacatggaacgtcttacaagccttagagctggcattgaaggacctttacttgcaagtgatgttggacgtgacagatctgctgccagcccggttgtaagtagtatgccagaaagagcttcagagtcttcttcagaggaaaaagatgattatgaaatttttgtaaaagttaaggacactcacgaaaaaagcaagaaaaataagaaccgtgataagggggagaaagagaagaaaagagactcttcattaagatctcgaagtaagcgttccaaatcttctgaacacaaatcacgcaagcgtaccagtgaatctcgttctagggcaagaaagagatcatctaagtccaagtctcatcgctctcagacacgttcacggtcacgttcaagacgcaggaggagaagcagcagatcaagatcaaagtctagaggaagaagatctgtatcaaaagagaagcgcaaaagatctccaaagcacagatccaagtctagggaaagaaaaagaaaaagatcaagctccagggataaccgaaagacagttagagctcgaagtcgaaccccaagtcgtcggagtcggagtcatactccaagtcgtcgacgaaggtctagatctgtgggtagaagaaggagctttagcatttccccaagccgccgcagccgcacccccagccgccgcagccgcacccccagccgccgcagccgcacccccagccgccgcagccgcacccccagccgccggagccgcacccctagccgtcggagccgcaccccaagccgccggagaagatcaaggtctgtggtaagaagacgaagcttcagtatctcaccagtcagattaaggcgatcaagaacacccttaagaagaaggtttagcagatctcccatccgtcgtaaaagatccaggtcttctgaacgaggcagatcacccaaacgtctgacagatttggataaggctcaattacttgaaatagccaaagctaatgcagctgccatgtgtgctaaggctggtgtccctttaccaccaaacctaaagcctgcacctccacctactatagaagagaaagttgctaaaaagtcaggaggagctactatagaagaactaactgagaaatgtaaacagatcgcacagagtaaagaagatgatgatgtaatagtgaataaacctcatgtttcggatgaagaggaagaagaacctcctttttatcatcatccctttaaactcagtgaacccaaacctattttttttcaatctgaatattgctgcagcaaaaccaactccaccaaaaagccaggtaacattaacaaaagaattccctgtatcatctggatctcaacatcggaaaaaagaagcggatagtgtttatggagaatgggttcctgtggagaaaaatggtgaagaaaacaaagatgatgataatgttttcagcagcaatttgccctcagagcctgtgggacatctctacagcaatgagtgaacgggcacttgctcagaaaagactcagtgagaatgcatttgatcttgaagccatgagcatgttaaatagagctcaggaaaggattgatgcctggggcttcagctggaactctattcctgggccagttcacagggaagtacaggagtacaggtttttgacacaaggaacagttgggccaattactggttgcccaagcctgggtttaaaaaggatcagttcttaagagcagccccggtaactggaggaatgggagccgtttttgatgagaaaaatgggctggaggagaaggagaagggattaggaaaaaacaaagaaggcaacaagggaacccatcctagttgattttaagacagaccgaaaaggtctttgttgcagtaggagaaagagcacaaaagaggtctggggaacttctctgcttgcaatgaaagatcttgttcaggcaaacatcctgtgttctgctttgatggagatctgtaataaaagaaggtggcaaccacctgaatttctattggtccatgatagtggccctgatcatcgcaaacattttctctttaagggtattgataaatgggaagcgcttaccagcccaattgtatgtttttcttgaataggtattgataaatggaagcgcttaccagcccagctttgccagccctaataagaagcatgctaaagccacagcagctactgtggttcttcaagcaatgggccttgtaccaaaggacctcatggctaatgccacttgcttcaggagtgcctcacgtagatagattgaggttttataataatcatttcagaattttactctgcatcacaatgtatttcctctttaatgttgtaaatatttggcaatttaagacattgtgtaaaaagcaatctgtaaaaacagtctccaggctttgatttttgtacccatggaaattgtatttaaccatacagggttttggtatgtttatattgtttaccttaagtgatgtaattggtttaagtgggctaaccatccaaaccgactgggtttggaaggccatcagagtaaccctccagtgtggaatgttaaataacgcttttatactgtattttgtactatgatgtaactccccttccttatggctaggctactgtaacacttgcctgtaatcagtgaagggctgtgcaccttgtactatttcacaatgggttctgctggacagataatgggccagtgttattgaggtgatcaagatctgttccacagggctaatgccaccatctcccctcaaaatttgtagaggttctaaaaagaaagtggtatgttgtgtgatgatcagcactaagtcctgcattcctgttaaagccacttgggtcataagaagggaagtaaaaaatgaagtctgactagaaattctattgcagaggccaagtacatttagtatggcattgagttgtgatatagttttcatttgatgtgcattttgaatttcagctacacctagatagacgtaaaatgataattaaaatgctgtaaccaacttatctaataaaattggcaaccagccactattttgttgactatgagaaagttaaaagtttatgttaatttttagggtctgatagaatatttcatgtgtattacagtggtattcatatgctatgtctctaaactttattttcaaaagcttaaggcccaaatacaaacttccttta

SEQ ID NO: 22371 - DNA, 7657 bp, Homo sapiens
  SIMILAR (39)..(3173): 721254mologous to Mus musculus truncated SON protein,accession number AF193607,Smith-Waterman Score=3517.
aatcagcgaggaggagttgagagaacggagcggacgccatggcgaccaacatcgagcagatttttaggtctttcgtggtcagtaaattccgggaaattcaacaggagctttccagtggaaggaatgaaggccagctgaatggtgaaacaaatacacccattgaaggaaaccaggcgggtgatgcagctgcctctgcccaggagtctaccaaatgaagaaatagtgcagaagatagaggaagtactttgctggggtcttagatacagaactacgatataagccagacttgaaagagggctccagaaaaagtagatgcgtatctgtacaaacagatcctactgatgaaattgcccactaaaaagtcaaagaagcataaaaagcacaaaaacaaaaagaagaaaaagaagaaagaaaaggaaaaaaaatataaaagacagccagaagaatctgagtcaaagacgaaatctcatgatgatgggaacatagatttagaatctgattcctttttaaagtttgattctgaaccttcagctgtggcgctggagcttcctacaagagcatttggcccatctgagaccaatgaatcccctgcagttgtgctagaacctcctgtagtatcaatggaggtatcagagccacacatcttagaaactctgaagccagctacaaaaactgcagaactgtcagttgtatctacatcagtaatctcagagcagtcagagcagtctgtggcagtaatgccagaaccatccatgacaaagattctggattcctttgcagcagcaccagtgcctactacaacactggtgttgaagtcatctgagccagttgtaacaatgtcagtggagtatcagatgaagtctgtgctgaaatctgtggagagcacatctccagagccatcaaagatcatgttggtagagcccccagtagcaaaagtgttagagccttcagaaacccttgtggtatcatcagagacacctactgaggtgtaccctgagccaagcacatcaacaacaatggattttccagagtcatctgcaattgaagcgctaagattgccagagcagcctgtagacgtaccatcggagattgcagattcatccatgacaagaccgcaggagttgccggagctgcctaagaccacagcgttggagctgcaggagtcgtcggtggcctcagcgatggagttgccggggccacctgcgacctccatgccggagttgcaggggccccctgtgactccagtgctggagttacctgggccctctgctaccccggtgccagagttgccagggcccctttctaccccagtgcctgagttgccagggccccctgcgacagcagtgcctgagttgccagggccctctgtgacaccagtgccacagttgtcgcaggaattgccagggcttccagcaccatccatggggttggagccaccacaggaggtaccagagccatctgtgatggcacaggagttgccagggctgcctttggtgacagcagcagtagagttgccagagcagcctgcggtaacagtagcaatggagttgaccgaacaacctgtgacgacgacagagttggagcagcctgtggggatgacaacggtggaacatcctgggcatcctgaggtgacaacggcaacagggttgctggggcagcctgaggcaacgatggtgctggagttgccaggacagccagtggcaacgacagcgctggagttgccggggcagccttcggtgactggggtgccagagttgccagggctgccttcggcaactagggcactggagttgtcggggcagcctgtggcaactggggcactagagttgcctgggccgctcatggcagctggggcactggagttctcggggcagtctggggcagctggagcacttggagcttttggggcagcctcttggaaacaggggtgcttggagtttgccagggcagcctggggcgcccagagtttgcctgggcagcctgttgcaacttgtggcgcttggagatctctgttcagtctgtggtgacaacattcggagctgtcaacgatgaccgtgtcgcagtccctggaggtgccctcgacgacagcgctggaatcctataatacggtagcacaggagctgcctactacattagtgggggagacttctgtaacagtaggagtggatcccttgatggccccagaatcccatatattagcttctaacaccatggagacccatatattagcatccaataccatggactcccaaatgctagcgtccaacaccatggactcccagatgctagcatccaacaccatggactcccagatgttagcgtctagcaccatggactcccagatgttagcaactagctccatggactcccagatgttagcaactagctccatggactcccagatgttagcaactagcactatggactcccagatgttagcaaccagttccatggactcccagatgttagcaaccagctccatggactcccagatgttagcaaccagctccatggactcccagatgttagcaaccagctccatggactcccagatgttagcaaccagcaccatggattctcagatgttagcaaccagcaccatggactcccagatgttagcaactagctcaatggattcccagatgttagcatctggcactatggactctcaaatgttagcttctggcaccatggatgctcagatgttagcgtctggtaccatggatgcccagatgttagcgtctagtacccaagattctgctatgttgggttcaaaatctcctgatccctataggttagctcaggatccttacaggttagctcaggatccctataggttgggccatgacccctatagattaggtcatgatgcttacaggttaggacaagacccttatagattaggccatgatccctacagactaactcctgatccctataggatgtcacctagaccctacaggatagcacccaggtcctatagaatagcacccaggccatataggttagcacctagacccctgatgttagcatctagacgttctatgatgatgtcctatgctgcagaacgttccatgatgtcatcttacgaacgctctatgatgtcttatgagcggtctatgatgtcccctatggctgaacgctctatgatgtcagcctacgagcgctctatggatgtcagcccacgagcgctctatgatggcccctatggctgagcgctctatgatgtcagcttatgaacgctccatgatgtcagcttatgaacgctccatgatgtccccaatggctgatcgatctatgatgtccatgggtgctgaccggtctatgatgtcgtcatactctgctgctgaccggtctatgatgtcatcgtactctgcagctgaccgatctatgatgtcatcttatactgctgatcgttcaatgatgtctatggctgctgattcttacaccgattcttacactgacacatatacagaggcatatatggtgccacctttgcctcctgaagagcccccaacaatgccaccgttgccacctgaggagccaccaatgacaccaccattgcctcctgaggaaccaccagagggtccagcattgcccactgagcagtcagcattaacagctgaaaatacttggcctacagaggtgccatcatcaccatctgaagagtctgtatcgcagcctgagcctcctgtgagtcaaagtgagatttcggagccttcagcagtgcctactgattattcagtgtcagcatcagatccctcagttttagtatcagaggctgctgtgactgttccagaaccaccaccagagccagaatcttcaattacgttaacacctgtagagtctgcagtagtagcagaagaacatgaagttgttccagagagaccagtgacttgtatggtatctgaaactcccgccatgtcagctgaaccaactgtgttagcatcagagcctcctgttatgtcagagacagcagaaacatttgattccatgagagcctcaggacatgttgcctcagaagtatctacatccttgttggttccagcagtaactactccagtgctggcagagagcattctggaagccgccagccatggctgccccagagtcttcagctatggctgtccctggaagtcttcgggctggtgaccgtcctggaagtcttcgactgtgactgtcctggagtcttcgactgtaactgtcctggaagctctcggttgtgactgtcccggagcctcctgttgtggctgagccagactattgttaccattcctgtgccagttgtttctagcgctggagccttctgtgcctgttctggaaccagcggtgtcagtccttcaaccttctatgattgtttcagaaccatctgtttctgtccaggaatcgactgtgacagtttcagagcctgctgtcacagtctcagagcagactcaagtaataccaactgaggtggctatagagtccacaccaatgatactggaatctagtatcatgtcatcacatgttatgaaaggaattaatctatcctctggtgatcaaaatcttgctccagagattggcatgcaggagattgcattgcattcaggtgaagaaccacatgctgaggaacacctgaaaggtgacttttacgaaagtgaacatggtataaatatagaccttaatataaataatcatttaattgctaaagagatggaacataatacagtgtgtgctgctggtactagtcctgttggggaaattggtgaagagaaaattttgcccaccagtgagactaaacagcgcacagtattggatacctaccctggtgttagtgaagctgatgcaggagaaactctatcttctactggtccttttgctctggaaccctgatgcaacagggaactagtaagggtattgaatttaccacagcatctactctcagtttagttaataaatatgatgttgatttatctttaactactcaagatactgaacatgacatggtaatttccaccagtcctagtggtggtagtgaagctgacattgaagggcctttgcctgctaaagatattcatcttgatttaccatctaataataaccttgttagtaaggatacagaagaaccattacccgtaaaaagagatgtaccagacattagcagctctgctcagccctaaagaaaagtagtggagagaaaaaagaagtacctcccccctcctaaagagagcacttgcctgaattcaggatttctgcccaatattgaggatattaatgaagcagatttagtgagaccggtttcttcccctaggacatggaacgtccttccaagccctagagctggcctttgaagggccttttacttgcaagtgattttggaccggtacagaatctttattccagccccggttgtaaagtagtatgccaggaaagagcttccgggtctttcttcgggggaaaaaggtggttagtgaaatttttgtaaaagttaaggacactcacgaaaaaagcaagaaaaataagaaccgtgataagggggagaaagagaagaaaagagactcttcattaagatctcgaagtaagcgttccaaatcttctgaacacaaatcacgcaagcgtaccagtgaatctcgttctagggcaagaaagagatcatctaagtccaagtctcatcgctcttcagacacgttcacggtcacgttccaagaccgcaggaggagaagcagcagatcaagatcaaagtctagaggaagaagatctgtatcaaaagagaagcgcaaaagatctccaaagcacagatccaagtctagggaaagaaaaagaaaaagatcaagctccagggataaccgaaagacagttagagctcgaagtcgaaccccaagtcgtcggagtcggagtcatactccaagtcgtcgacgaaggtctagatctgtgggtagaagaaggagctttagcatttccccaagccgccgcagccgcacccccagccgccgcagccgcacccccagccgccgcagccgcacccccagccgccgcagccgcacccccagccgccggagccgcacccctagccgtcggagccgcaccccaagccgccggagaagatcaaggtctgtggtaagaagacgaagcttcagtatctcaccagtcagattaaggcgatcaagaacacccttaagaagaaggtttagcagatctcccatccgtcgtaaaagatccaggtcttctgaacgaggcagatcacccaaacgtctgacagatttggataaggctcaattacttgaaatagccaaagctaatgcagctgccatgtgtgctaaggctggtgtccctttaccaccaaacctaaagcctgcacctccacctactatagaagagaaagttgctaaaaagtcaggaggagctactatagaagaactaactgagaaatgtaaacagatcgcacagagtaaagaagatgatgatgtaatagtgaataaacctcatgtttcggatgaagaggaagaagaacctcctttttatcatcatccctttaaactcagtgaacccaaacctatttttttcaatctgaatattgctgcagcaaaaccaactccaccaaaaagccaggtaacattaacaaaagaattccctgtatcatctggatctcaacatcggaaaaaagaagcggatagtgtttatggagaatgggttcctgtggagaaaaatggtgaagaaaacaaagatgatgataatgttttcagcagcaatttgccctcagagggccgggttaaacggcagggccgggtgtagacgacagatgaaacaacccgcagcttctcatttgacagtaactcgatgcaattcactttgtggaaccaagccacaaagtgaaaagcatcgaattgcagagaacagtgttatcacatccctacccaacattgggccctccctgcacttgtgggaagcaaatttatcgggtggagggattgatcggagagggcagatcctcaggttcaacacaagaactggattggaaaaggtcattcctgtggacatctctacagcaatgagtgaacgggcacttgctcagaaaagactcagtgagaatgcatttgatcttgaagccatgagcatgttaaatagagctcaggaaaggattgatgcctgggctcagctgaactctattcctggccagttcacaggaagtacaggagtacaggttttgacacaagaacagttggccaatactggtgcccaagcctggattaaaaaggatcagttcttaagagcagccccggtaactggaggaatgggagccgttttgatgagaaaaatgggctggagagaaggagaaggattaggaaaaaacaaagaaggcaataaggaacccatcctagttgattttaagacagaccgaaaaggcaaacatcctgtgtctgctttgatggagatctgtaataaaagaaggtggcaaccacctgaatttctattggtccatgatagtggccctgatcatcgcaaacattttctctttagggtattgataaatggaagcgcttaccagcccagctttgccagccctaataagaagcatgctaaagccacagcagctactgtggttcttcaagcaatgggccttgtaccaaaggacctcatggctaatgccacttgcttcaggagtgcctcacgtagatag

SEQ ID NO: 22372 - DNA, 2342 bp, Homo sapiens
  SIMILAR (132)..(2033): 741254mologous to Mus musculus fidgetin-like 1,accession number AF263914,Smith-Waterman Score=2394.
gttcgatttctgataccattcataactggctgtgtgatctcaaataagaaaactgaagaaccagctgggcgcggtagtcacgcctgtaatcccagcactttgggaggctgaggcgggtggattacctgagaacctctaaaatgcagacctccagctctagatctgtgcacctgagtgaatggcagaagaattacttcgcaattacatctggcatatgtaccggaccgaaggcagatgcataccgtgcacagatattacgcattcagtatgcatgggcaaactctgagatttcccaggtctgtgctaccaaactgttcaaaaaatatgcagagaaatattctgcaattattgattctgacaatgttgaatctgggttgaataattatgcagaaaacattttaactttggcaggatctcaacaaacagatagtgacaagtggcagtctggattgtcaataaataatgttttcaaaatgagtagtgtacagaagatgatgcaagctggcaaaaaattcaaagactctctgttggaacctgctcttgcatcagtggtaatccataaggaggccactgtctttgatcttcctaaatttagtgtttgtggtagttctcaagagagtgactcattacctaactcagctcatgatcgagaccggacccaagacttcccggagagcaatcgtttgaaactccttcagaatgcccagccacctatggtgactaacactgctaggacttgtcctacattctcagcacctgtaggtgagtcagctactgcaaaattccatgtcacaccattgtttggaaatgtcaaaaaggaaaatcacagctctgcaaaagaaaacataggacttaatgtgttcttatctaaccagtcttgttttcctgctgcctgtgaaaatccacagaggaagtctttttatggttctggcaccattgatgcactttccaatccaatactgaataaggcttgtagtaaaacagaagataatggcccaaaggaggatagcagcctgcctacatttaaaactgcaaaagaacaattatgggtagatcagcaaaaaaagtaccaccaacctcagcgtgcatcagggtcttcatatggtggtgtaaaaaagtctctaggagctagtagatcccgagggatacttggaaagtttgttcctcctatacccaagcaagatgggggagagcagaatggaggaatgcaatgtaagccttatggggcaggacctacagaaccagcacatccagttgatgagcgtctgaagaacttggagccaaagatgattgaacttattatgaatgagattatggatcatggacctccagtaaattgggaagatattgcaggagtagaatttgctaaagccaccataaaggaaatagttgtgtggcccatgttgaggccagacatctttactggtttaaggggaccccctaaaggaattttgctctttggtcctcctgggactggtaaaactctaattggcaagtgcattgctagtcagtctggggcaacattctttagcatctctgcttcatccttaacttctaaatgggtaggtgagggggagaaaatggtccgtgcattgtttgctgttgcaaggtgtcagcaaccagctgtgatatttattgacgaaattgattccttgttatctcaacggggagatggtgagcatgaatcttctagaaggataaaaacagaatttttagttcaattagatggagcaacaacatcttctgaagatcgtatcctagtggtgggagcaacaaatcggccacaagaaattgatgaggctgcccggagaagattggtgaaaaggctttatattcccctcccagaagcttcagccaggaaacagatagtaattaatctaatgtccaaagagcagtgttgcctcagtgaagaagaaattgaacagattgtacagcagtctgatgcgttttcaggagcagacatgacacagctttgcagggaggcttctcttggtcctatttcggcagtttacaaactgctgacattgctaccataacaccggatcaagttcgacccatagcttacattgattttgaaaatgcttttataactgtgcgacctatagtttctccaaaagatttatagctttatgaaaactggaacaaaactttatgttgtggaaagtaagtgggatacttgtaatcaaggcatctctgtattcagtcttctttattttttagcatataaagtttgggtgtgttaatatgatttttaagactatcttctaaatactgtacttgaccatatatcacagattttacatctgattgacatagtgtatgttaacgtacgttaggcatcg

SEQ ID NO: 22373 - DNA, 652 bp, Homo sapiens
  SIMILAR (43)..(501): 411254mologous to Homo sapiens HL23 ribosomal protein,accession number X55954,Smith-Waterman Score=134.
  misc_feature (1)...(652): n = a,t,c or g
ttttttttttcttttttccggcgttcaagatgtcgaagcgagggccgtgggtgggtcccttctgggtgccgaaaattcccggattttcccttgggtcttcccggtagggancctgtaatccaattggtgcttgacaaacaccaggagcccaaaaaaccctgtatatccatctcccgtgaagggggaatcaaggggaccggcttgaccagacttccccgcctgcctggtgtgggtgaacatggtgatggcccacagttcaagaaaggcaaacccagagcttcagaaaaaagggtacatcccagcaagtggtcattcgacaacgaaaagtcattaccgtaggaaaacgatggcgttgtttctttatttttgaagattaatgcaggagtcataggggaccaataaaggcggagatgaaaggttttgccattacaggaacccagagcaaaggagtgtgcagacttgtggccccgggattgcatccaaatgctgggcagcattgcatggttctcccagtatattttgtaaaaaataaaaaaaaaaactaaacccattacaaaaaaactaaaaaaaacctcgggggggggccggtgccccaattagccttatcgggaggcgttttacaattatgtggccgaccttttacaaggtagga

SEQ ID NO: 22374 - DNA, 1553 bp, Homo sapiens
  SIMILAR (236)..(601): 341254mologous to Mus musculus proline-rich salivary protein,accession number M19419,Smith-Waterman Score=138.
atggcccatcggcttcggtttcattttggctctggtcgcagcaacacagcccccgaatcagacatcctagaccaggagagagaagacgacttcttcatggcattccacaccctaccgcggagaagcagcccgcaccccttcgcccagaacggaggggaggacggcggcggaggcctgcagggaggcgtgggtgcgcttaagcggagctcgtccatgttcatcccgcagctcttgaccagcatcgacgcccgccccacgtgcagctcctccgtgcagatctccctgcagcgcaaggccacggacggggccacggacgggtgcgggccgcccgagggcgccgacgatgggcctccatgcgcaacgcccgaccccagggaccaggcctccgccactgccaccacgagggcctcgccccagagtggctcccgggagccctcgccgagggacacccccgggagctcccctccgagggcagcccgggacccagggctccaggtcaacggcacgtgcggccgccgcgtgcggtgctccggccccgtggactgcgcggaggaggctgccccgggcctgcgcatccagcaccgcgcctccagcgccgacgtgcgccaggtgaggctgctgcccctgggccccgatggccagggcggcccggccgcggcagagcccaggcgctggtccctgcagcacgttccagatgcttctggaagctctgggaagcggtgttttgtcttccagttgcagcagccccaacaaggcgcttcggggccaggcagcgacctcaactttggcttcacgggcacaaagggggacaggttggtgaggtatcctcgcattcggctggagaggagcacctcgtaccccacgcagccccgaagcgagcgagggagccccacggaagatcggggagccctggaggcatcgcctcgagctggcaggatggctcctgaaatccgcaggacgaactccgcggagaggactccgcagggccaggggtgcacatttaagatcaggcaggatcagaacgcggggcagcagcattttagaattcttgtaacccgggggccggaagaagctccccagaatcccgaggagaaaagcgccaaaagccctgtttccacgggagctgacaccacggttagctatcctaaatacgtttttacctttttaactcttaattatattaagccatttgcaagaatgggaaaaagcaggaaattcataggtggtgttgaaattgctgattctacacaaaggtaccagaatgtctacatttcctctgtaaatgtcaaaggaaactttggaaacccacctcagagttggctggtgattattcggacaggttatcatcctgtctgcaaccttctagttctcttagttcataccaagcagcatgatattccatgtcctgcacaaaggagagcaccaaaacagccttcacctgctgcgtatgccccactctgaataaaaaaattagaaggccaaggacacgatgtgtaatattagcaaaagcagaatggagatgctatcattctgggccagggggattatgaaga

SEQ ID NO: 22375 - DNA, 1816 bp, Homo sapiens
  SIMILAR (40)..(825): 1001254mologous to Homo sapiens 23-OCT-1992 Human CD40-L type II transmembrane protein coding sequence,accession number Q63959_cd1,Smith-Waterman Score=1336.
cttctctgccagaagataccatttcaactttaacacagcatgatcgaaacatacaaccaaacttctccccgatctgcggccactggactgcccatcagcatgaaaatttttatgtatttacttactgtttttcttatcacccagatgattgggtcagcactttttgctgtgtatcttcatagaaggttggacaagatagaagatgaaaggaatcttcatgaagattttgtattcatgaaaacgatacagagatgcaacacaggagaaagatccttatccttactgaactgtgaggagattaaaagccagtttgaaggctttgtgaaggatataatgttaaacaaagaggagacgaagaaagaaaacagctttgaaatgcaaaaaggtgatcagaatcctcaaattgcggcacatgtcataagtgaggccagcagtaaaacaacatctgtgttacagtgggctgaaaaaggatactacaccatgagcaacaacttggtaaccctggaaaatgggaaacagctgaccgttaaaagacaaggactctattatatctatgcccaagtcaccttctgttccaatcgggaagcttcgagtcaagctccatttatagccagcctctgcctaaagtcccccggtagattcgagagaatcttactcagagctgcaaatacccacagttccgccaaaccttgcgggcaacaatccattcacttgggaggagtatttgaattgcaaccaggtgcttcggtgtttgtcaatgtgactgatccaagccaagtgagccatggcactggcttcacgtcctttggcttactcaaactctgaacagtgtcaccttgcaggctgtggtggagctgacgctgggagtcttcataatacagcacagcggttaagcccaccccctgttaactgcctatttataaccctaggatcctccttatggagaactatttattatacactccaaggcatgtagaactgtaataagtgaattacaggtcacatgaaaccaaaacgggccctgctccataagagcttatatatctgaagcagcaaccccactgatgcagacatccagagagtcctatgaaaagacaaggccattatgcacaggttgaattctgagtaaacagcagataacttgccaagttcagttttgtttctttgcgtgcagtgtctttccatggataatgcatttgatttatcagtgaagatgcagaagggaaatggggagcctcagctcacattcagttatggttgactctgggttcctatggccttgttggagggggccaggctctagaacgtctaacacagtggagaaccgaaacccccccccccccccccgccaccctctcggacagttattcattctctttcaatctctctctctccatctctctctttcagtctctctctctcaacctctttcttccaatctctctttctcaatctctctgtttccctttgtcagtctcttccctcccccagtctctcttctcaatccccctttctaacacacacacacacacacacacacacacacacacacacacacacacacacacacacacacacacagagtcaggccgttgctagtcagttctcttctttccaccctgtccctatctctaccactatagatgagggtgaggagtagggagtgcagccctgagcctgcccactcctcattacgaaatgactgtatttaaaggaaatctattgtatctacctgcagtctccattgtttccagagtgaacttgtaattatcttgttatttattttttgaataataaagacctcttaacattaaaa

SEQ ID NO: 22376 - DNA, 2994 bp, Homo sapiens
  SIMILAR (517)..(2313): 571254mologous to Homo sapiens dJ967N21.5 (novel MCM2/3/5 family member),accession number AL035461,Smith-Waterman Score=1396.
  misc_feature (1)...(2994): n = a,t,c or g
gacagatctgcgcgtatcctggagccggcccagttgtgaactaggagagctttgggacctctgtcccaagcaagagagatgaatggagagtatagaggcagaggatttggacgaggaagatttcaaagctggaaaaggggaagaggtggtgggaacttctcaggaaaatggagagaaagagaacacagacctgatctgagtaaaaccacaggaaaacgtacttctggtaggtgaggtcaatgattgttcaatttttttcacttaaggaagcaattcacgtctatcatacaaggcggtttccagaaagtagtaattcaggaagcagcaaccatccttatggctaagagactaaaagaagttctgaggttaccagaatgtgggaattcaaaggttggagaggtcacagcatagctgttattttgacttttgaggggcaccctacaaagctatgcttggacttctgtgataccagatatagcaactgaactaagagatgcacctgagaaaaccttggcttgcatgggtttggcaatacatcaggtaactatttgtcttatgcatacttttgtctaaacttttttaatgtttgcacacacatgcacaccttgtctaacaatggtaaatgtgccacatattcatgcaaggtgaggaatttgatgtattaaagtattacttagaatgggacattgaaggccatttaagaatgaaaacgctcatagagggacagtggttcgtgtcagtaatataaagcctctttgcaccaagatggcttttctttgtgctgcatgtggagaaattcagagctttcctcttccagatggaaaatacagtcttcccacaaaggtaatacgttctttaactgcttctttatttatcttggtaaagaaggcaaatcagaatacagaaaacatttcccggcagtcaatcaagtaagcgatcagactgttacataaaaggcaggctttagatgtcacactgttgagaaaatccataattttactgcatgatcttgtggatagctgtgtcccgggagacacagtgactattactggaattgtcaaagtctcaaatgcggaagaaggtagggtacaactcttttcattatttgtctctcaataatgattcatcaacgttcatcttttctaagatgctcccccccacatccttgttgttggagatccaggcctaggaaaaagtcaaatgctacaggtagacaatcagtcatttagtgtttgttcttttgcttgtaaaatgcgttaataattcacaagtgaattttctcctctttcaaaagatagttcctctggagattttgctttggaagctggtgccctggtacttggtgatcaaggtgagaggccaaagggaataattagtgattctgggactttttgaaaagccttttccttttcagttaatttcttaagtattagtcttgctaaggctggtgtggtttgtagccttcctgcaagaacttccattattgctgctgcaaatccagttggaggacattacaataaagccaaaacagtttctgagaatttaaagtaagtctcttcaaatatttatacctttaatgtattgaatcactttaattcaataagaaaaagaaatagttcacacttactctctgaacatgtgattgcaataagagctggaaagcagagaaccattagcagtgccacagtagctcgtatgaatagtcaagattcaaatacttccgtacttgaagtagtttctgagaagccattatcagaaagactaaaggtataaatgtttcttctccttattcagtttggttctgtttgaatgtcaaagttcagtgtgtggcttattgtagatgtgtacccaaggctatccacagaagctgctcgagttcttcaagatttttaccttgagctccggaaacagagccagaggttaaatagctcaccaatcactaccaggcagctggaatctttgattcgtctgacagaggtttgtttctttttatggtcatgctttttttggcttaaaggggaagggtgtgccttgacttctcttttgaagtataggtaagataaaaatttcaaattgttttaaatgaaataccagttatcttcccatctcaaattaggtaataggccaaacaggtcaacagcgaaaagatttatttctgctctcaacaacgttgctgaaagaacttataataatatatttcaatttcatcaacttcggcagattgccaaagaactaaacattcaggttgctgattttgaaaattttattggatcactaaatgacccagggttacctcttgaaaaaaggcccaaaagtttacccagcttcaaactatgtaaaagggacttcacccaagttagggcctcctgggtttattgcaagattaaagccatctcagtgaagagtagtgcgtgcacgcacagacagacagacacacacacacacacacacacacacacacacacacacacacacacacagtcaaatactgttctctgaaaaatgatgtcccaaaagtattataataggaaaaaagcgattaaatataataaactaatttaagaagtgataaagtctccagatgcagtagctcacactgtaatgcacagtgactcaggaggctgaggtgagaggattccttgaggccagggttcgagaccaaccttgggcaacatggcaagaccccatttcttaaaaaaaaaaaaaaaaaaatttaaacttagctgggtatggtggcacatgcctgtggtctcagctacttgtgaggctgaggcaggaggattctttgggcccagggagtttaaggttacggtgagccacaatcacaccaatcactgcactccagcctgggcaattaaagttaactctttggactcaaaaaaataaaaaaaattgtagtggtagccatgtgttnattgtttaaataaattctcccaaagggcttaaaagtaattactttttaatttttttattagtttgtattttttngaccct

SEQ ID NO: 22377 - DNA, 472 bp, Homo sapiens
  SIMILAR (103)..(171): 391254mologous to Equus caballus transferrin,accession number AF185730,Smith-Waterman Score=36.
cactgtggggagcagcagcggtagctccaccacgtgggtcttctgatggtatgtgtggtgaggcaagtgtgagtcagctcatgggacagacccacaccagcctctcacttccaaactcaccccctaccagggagggcgagctccgtggccagccagggaggcagggcaggggcctcaaaggcatacagtggtggcaggctccccagtacttgttgagcctacaaaagtgcagaggtgtttaggggagaggcagagacatggtagctgctgtcaccaaagtctctaactctgctccaatcaatcaccttttgggaagacaacatttacgggataacaaaacgagcagaagctactagctcaaaagtgtgtcgtccccattcacatcctatacaaattctggaaatccaccatttttaacttgaggtgatgtgttgggaaggttaacaggcattttcccccccctcctgcctcc

SEQ ID NO: 22378 - DNA, 503 bp, Homo sapiens
  SIMILAR (1)..(501): 1001254mologous to Homo sapiens Human death inducer- obliterator 1 (DIO-1) polypeptide,accession number Y67579,Smith- Waterman Score=898.
gggaggcttttggaaaggaatggggaagactatatctgcccaaactgcaccattctgcaagtgcaggatgagactcattcagaaacggcagatcagcaggaagctaaatggagacctggagatgctgatggcaccgattgtacaagtataggaacaatagagcagaagtctagcgaagaccaagggataaagggtagaattgagaaagctgcaaatccaagtggcaagaagaaactcaagatcttccagcctgtgatagaggcgcctggtgcctcaaaatgtattggccccgggtgctgtcacgtggcgcagcccgactcggtgtactgcagtaatgactgtatcctcaaacacgccgcagcgacaatgaagtttctaagctcaggtaaagaacagaagccaaagcctaaagaaaagatgaagatgaagccagagaagcccagtcttccgaaatgcggtgctcaggcaggtattaaaatctcttctgtgcacaagagaccagc

SEQ ID NO: 22379 - DNA, 2986 bp, Homo sapiens
  SIMILAR (601)..(987): 771254mologous to Homo sapiens Human death inducer- obliterator 1 (DIO-1) polypeptide,accession number Y67579,Smith- Waterman Score=481.
gagagagtaagttggagggaaaggcggctcaggacatcaaagatgaggagcctggagacttgggccgaccgaagcctgaatgtgagggttacgaccccaacgccctgtattgcatttgccgccagcctcacaacaacaggtttatgatttgctgtgaccgctgtgaagaatggtttcatggcgattgtgtgggcatttctgaggctcgagggaggcttttggaaaggaatggggaagactatatctgcccaaactgcaccattctgcaagtgcaggatgagactcattcagaaacggcagatcagcaggaagctaaatggagacctggagatgctgatggcaccgattgtacaagtataggaacaatagagcagaagtctagcgaagaccaagggataaagggtagaattgagaaagctgcaaatccaagtggcaagaagaaactcaagatcttccagcctggtcccgggcctgtccccacccagctgcctgtcctctggcaggtattggaaattgctgtgtctagaagcatctctgccttcacactcttgcactgcattagctgcaaggtgatagaggcgcctggtgcctcaaaatgtattggccccggggtgctgtcacgtggcgcagccccgactcggtgtactgcaggtaatgactgtatcctcaaacacgccgcaagcgacaatgaagtttctaagctcaggtaaagaacagaagccaaagcctaaagaaaagatgaagatgaagccagagaagcccagtcttccgaaatgcggtgctcaggcaggtattaaaatctcttctgtgcacaagagaccagctccagaaaaaaaagagaccacagtgaagaaggcagtggtggtccctgcgcggagtgaagcactcgggaaggaagcagcttgtgagagcagcacgcccgtcgtgggcgagccgatcacaattacaatgcaagtaaagccagaaaagactgctgctccctcgcccgtcactgttgtataaatccacgaaggaagacaggaggtccgaggagaaagcggcagccacggcagcctcaaagaaaacagcccctccaggctccacggtgggcaagcagcctgcacctagaaacctcgtgccaaagaagtcttcttttgctaatgtggcagcagccacaccagccattaaaaagccaccctcaggtttcaagggcaccatccccaagaggccatggctctccgctaccccatcgagtggtgcttcagctgccaggcaggccggaccggcacctgcagcggcgacggctgcctccaagaagttccctggctccgctgctttggtgggagccgtaaggaagccagtggtaccttctgttccaatggcctcgccagccccaggacgccttggggctatgagtgctgcaccatcgcagccaaattcacaaattcggcaaaatatcagacgctccttaaaagagattttgtggaaaagagtcaatgacagcgatgacttaatcatgacagaaaacgaagtaggaaaaattgccctccatattgagaaggagatgtttaacttgtttcaagttacagataatcgctacaagagtaaatatcgcagcatcatgttcaacctgaaggaccctaaaaatcagggactcttccatcgtgttctgcgtgaggaaatctctttggcgaaacttgtgagactgaagccagaagaacttgtatctaaagagctttccacgtggaaagagaggccagcgagatctgtgatggagtccagaactaaactgcacaatgaaagcaagaagacggcccccaggcaggaggccatccccgatctggaggactctccgccagtgtcggattcagaggaacagcaagagtcagcacgtgctgtccctgagaagagcacagcgccgcttctcgacgtcttcagcagcatgttgaaagacaccaccagtcagcaccgcgcacacctcttcgatctcaactgtaaaatttgcacaggccaggttccctccgcagaagatgagccagctccgaaaaaacaaaaattgtcagcttctgttaagaaagaagacttaaaatcaaagcatgacagctctgcacctgacccagctccggattcagctgatgaggtgatgccggaggctgtgcctgaagttgcctctgagccaggcctagaaagtgcttctcatccaaatgtggacagaacgtatttccctgggcctccaggagatggccatcccgagccctccccgctggaagacctgtccccctgcccagcctcctgtgggagcggggtggtcaccaccgtcacagtgtccggccgggaccccaggaccgctccaagcagttcatgcacagccgtggcctccgcagcatcccgcccagacagcacccacatggtggaagccagacaggatgtgccgaagcctgtcttgacttctgtgatggtgcccaagtccatactagctaagccatcctcatctcctgacccaagatacctgtcagttcctccgtcaccaaatatcagcacttcagaatcacgttcccctccagagggagacacgaccctctttttgtctcgactcagcaccatttggaaaggatttattaacatgcagagtgtggcaaaatttgtcactaaggcgtatcctgtctctgggtgttttgattacctcagtgaggatttgcctgacacaattcacattggtgggaggatcgcaccgaagacagtttgggattatgttggcaaactcaagtcttctgtgtctaaggagctctgtctgatccgcttccaccccgccacagaggaagaggaggtcgcctatatctctctctactcctatttcagcagccgtggccgctttggtgttgtagctaataacaacaggcacgtcaaggacctctacctgatcccgctgagcgcccaggaccctgttccatccaaactcttgccctttgagggaccaggtaagcgccggctttctgggtggaggtga

SEQ ID NO: 22380 - DNA, 2332 bp, Homo sapiens
  SIMILAR (1031)..(1573): 571254mologous to Homo sapiens Human death inducer- obliterator 1 (DIO-1) polypeptide,accession number Y67579,Smith- Waterman Score=521.
atggcggccgcggaagggaaggagcgggcgggcgggcgggcgagcgggcggggccggtcagagccgccgcggcctggggcgcgggcctcagacgccggccctggtgggctgcgtgaggtcgaggggactggcgagcactcggtggtcgcggctggaacggttccgagggtgggagtcggggcggccgctcgcggggaagagcgcagggctggcctgggcgagtgcggcccggggctcgggggctgcgtagctggcttgatttcagggaaaagtgtccaagctttcagtgttggagcagggaggtggcccctgctgcgcgtgtttggcggcaatgtcaccttttgttctgtggtcagttggtcactatgtgcttacactttaccgctaggtatggacgacaaaggcgacccgagcaatgaggaggcacctaaggccatcaaacccaccagcaaagagttcaggaaaacatggggttttcgaaggaccactatcgccaagcgagagggcgcaggggacgcggaggctgacccactggagccgccacccccacagcagcagctgggcctgtccctgcggcgcagtgggaggcagcccaagcgcactgagcgcgtggagcagttcctgaccattgcgcggcgccgcggcaggaggagcatgcctgtctccctggaggattctggtgagcccacgtcctgccccgccacagacgccgagacagcctccgagggcagcgtggaaagcgcttctgagaccagaagcggcccccagtctgcttccacagctgtgaaggaacgaccagcctcttctgaaaaggtgaaaggaggggatgaccacgatgacacctccgatagtgacagcgatggcctgaccttgaaagagcttcagaatcgccttcgcaggaagcgggaacaggagcccactgagaggcccctgaaagggatccagagtcgcctgcggaagaagcgccgggaggagggtcccgccgagactgtgggctccgaggccagtgacactgtggagggcgtcctgcccagtaagcaggagcccgagaacgatcagggggttgtgtcccaggctgggaaagatgacagagagagtaagttggagggaaaggcggctcaggacatcaaagatgaggagcctggagactttgggccgaccgaagcctgaatgtgagggttacgaccccaacgccctgtattgcatttgccgccagcctcacaacaacaggtttatgatttgctgtgaccgctgtgaagaatggtttcatggcgattgtgtgggcatttctgaggctcgagggaggcttttggaaaggaatggggaagactatatctgcccaaactgcaccattctgcaagtgcaggatgagactcattcagaaacggcagatcagcaggaagcttaaatgggagacctgggagatgcttgatggcaccgatttttacaagtatagggaacattaggagcagaagtcttagccgaagacccaaggggttaaagggtagaattgagaaagctgcaaatccaagtggcaagaaggaactcaagatctttccagcctgtattggaaattgctgtgtctagaagcatctctgccttcacactcttgcactgcattagctgcaaggtgatagaggcgcctggtgcctcaaaatgtattggccccgggtgctgtcacgtggcgcagcccgactcggtgtactgcagtaatgactgtatcctcaaacacgccgcagcgacaatgaagtttctaagctcaggtaaagaacagaagccaaagcctaaagaaaagatgaagatgaagccagagaagcccagtcttccgaaatgcggtgctcagcctgtccagtggctgctgctcctgtcatcttggcaacttggcacctcatcagggttgcaggtgactctgtgccagccgcccttcacggagcacaagtggttgaagttctcagttttgcacggggaaactgcgggcccaccgcgggcccaccgaatacgcaagctcaacaagtactggggagcctgccaccactgtatgcctttgaggcccctgccctgcctccctggctggccacggagctcgccctccctggtaggggctggatccctgccccggcatgcggtgcacctcaacgagccctgtcccctggccatctgtcccctggcacgccgtctgtcccctgctcgagggcctttgggctctgacgatctcacatggggttataaggtgtggctgctcttcctgtggttcaggtgtatgccagctttccatatttttattaatggcatcgcctccaatggactccagtctggaaggacaacgaagtga

SEQ ID NO: 22381 - DNA, 2004 bp, Homo sapiens
  SIMILAR (173)..(361): 851254mologous to Rattus norvegicus stathmin-like-protein splice variant RB3'',accession number AF026530,Smith-Waterman Score =300.
ggagcgagcagtggtgctgatgttgagagaagcccagggtaccactaattgagggagtgaggaagagagcagctcgcttctaactggactgcacgttggtgacagcgtcccaagctggtgacagacccactctgtaactttcagctagattcagccaccagatcccagaaacatgacccttgctgcctacaaagagaagatgaaggagctcccgctggtgtccttgttctgctcctgcttcctggccgatcccctgaataagtcgtcctacaaatatgaaggctggtgtgggagacagtgtaggaggaaggatgaaagccagcggaaagacagtgctgactgggagagaaagaagagctcaggcagacacggttggacctgaattggtgcgtcatttccgacatggaagtcatcgagctgaacaaatgcacctcgggccaatcctttgaagtcatcctgaagccaccctcctttgatggggttcccgagttcaacgcctccctgccaaggcggcgagacccatccctggaagagatccagaagaaactagaagcggctgaggagcgaaggaagcgtggcccagacttggtgatatacgaaatacactcccctgcttctctcccctttcactcctctgatgcctctgtcctcggagatattcccccaaccacttactctaacatatcaaattcgaatcaggagctgctcctgatgggaggatcccctgcccccgagcagccccactatgaagccaacattttagaaagatcagaaacgacctcgtatgacaacggctcagatgcagcacaatctttcaaggtggatggcagatgtgtcttctacataaacattcccattccctctaacgagggaaaagttctgtggaaagcccctgaaatagcaacagccaaggagccgacatggagtccactcggctccactgggcccagaccctgccaaatacttgtcgtcaagtcaccagtcgtacatgggaagggaccagtgctcagcggctgtggcttagacttactggagcagcccacttttgcactttgctttttggtggccggggctgtcactattacatttctgtcctgcagtggtgaggaggcaagagaagagtctgcacccaaagccatgagtgaaagacaagcacgccgaggaggtgcggaaaaacaaggagctgaaggaagaggcctccaggcagtgactactccagaattaccatataggatgggattaggagcagcatttctgttgaaagagaggtcgggggtcttacctggaagcttcatttgtgaggactttactgcagcactgaagcaggatgaggaaatagggacaatgaagggcaaaataagagaggcatattttaaatcctttgttcctacaccagtggctttcagtgggggtgtaatgcttcccacagggggcactttggaaatgtgtggcaataattttggtggacacaaggagcaggcaggcacagtgcttccagcctttgccatcgcactaagagttacaccatcagcttccttggtcctaaggcctttgaatttggaccaagccatgctacagggatccctgggtctccagcttgcagatggattattttgggacttagcctccataatggactggacagcatccaggattcagcccagtgtttcttcatccatgaagatttgtcaggcatttcctggcagacctcttgccattctcttggcacaatgtgcctacgtttatgggacgtggatgaagctggaagccatcatcctcaccaaactaacacaggaacagaaaacaaaacaccacttgttctcactcccctgttgcatgcctgctgatatctcctaccgacagcgctgccttggagaacctccgcactgtaccgtttggaacaggcatttggaaagtctggtaatgatgtccaacagcaccacctccccatgctcagagctgctgatctttgaagtgcccccagtggctccggagcagaaatga

SEQ ID NO: 22382 - DNA, 1697 bp, Homo sapiens
  SIMILAR (560)..(988): 361254mologous to Homo sapiens RB3 protein,accession number AJ303455,Smith-Waterman Score=132.
tttcgtattccctctttctttcttcctctccgccctcacccctctggttctccagctccacaggcagcagagaaagcaggctctttgtctgacatcatctttcactccctggcctgctaagagttactcactcaggcaatccctgctccaccagaggagactgtccaattgccaagcaacccactgctggccaatcacagagcttggaggtgatgtcatggcaagagcgagcagtggtgctgatgttgagagaagcccagggtaccactaattgagggagtgaggaagagagcagctcgctttctaactggactgcacgttggtgacagcgtcccaagctggtgacagacccactctgtaactttcagctagattcagccaccagatcccagaaacatgacccttgctgcctacaaagagaagatgaaggagctcccgctggtgtccttgttctgctcctgcttcctggccgatcccctgaataagtcgtcctacaaatatgaagcagacacggtggacctgaattggtgcgtcattttccgacattggaaggtcatcgaagctgaacaaatgcaccttggggccaattcctttgaagtcatcctgaagccaccctcctttgatggggttcccgagttcaacgcctccctgccaaggcgggcgagacccattccctgggaagagattccagtaaggaaactaggaaggcggctgagggagcgaagggaagttaccagggaagcggatccttgaaaacaacttgcagagaaacggggaacatgaggagagaggtgattccaaaagggcatttagggaaacaaccactttcatcaagatggctaagggaaaaacttggcccagaagatggaatccaacagggagaacagggaggcccacctcgccgccatgttggaacggctgcaagagaaaggacaagcacgccgaggaggtgcggaaaaacaaggagctgaaggaagaggcctccaggtaaagcctagaggccaaagaactttccaggtcagccggacagctccagcagctccacgttccaggcagcctcgccccgccggctgcgctcccagcactggggtttgggggaaggggggtggccaaggggcgttttccctctgcttttggtgtttgtaacatgtttaaaaaattgacccattgaaagcccatccctatttgtttcccggggaaacaatgaacggggtgggaaaaggggagaggagagaagtttgggaaagggagatggagaagaactcaagggacaattgcaaacccctgcccggcgcaagatctgattttcacatctcctaccctggacattgaagcctcccaggcacccatgttgaggagagatgaaaacccagggcggtagaacttcagggtgaaaggacagagtccctgggtggggcagcggctgcagggcgctcctgagatacccagccagagggtgttgagctaccagtggtgttgcttctaccttgcagcaggtgggatgatgtctgtgtgtgtgtgtgatccttcattttttgatcatcatgaccaatgaaacattgactccaagtgtccagttctttattttccaaatgtggcctttgggtaattgttaaaaaggtctcgaaacctgggtttcatccatttgaagggagaagcccctttgcttccttaattctgccattcaagcatctggg

SEQ ID NO: 22383 - DNA, 1110 bp, Homo sapiens
  SIMILAR (571)..(1107): 891254mologous to synthetic construct chloramphenicol acetyltransferase,accession number A02739,Smith-Waterman Score=868.
atgcggtcagctgcgggacacgcagccgaggctctccaggaagggttgattcagaatcatgagcgcccccatgcggtaggcaccattatggtccccatttggctgatgaggaagcgaaggcccacagaagtgcaatcatttgtgcaagatcccgcgggcgaaccggagggtgtgggattcacccacacagttgggttgggtctgtgctcgacggagcagacacctggatgctattcaccccagtgtggcactcttctgcgcaaaacagctgatgccattgaagtaaggagaacaaaagcatcaaactgtgtgaaactgagtggagaaaagaaacactttctgggtggacggcacgtggattatgtggtagatcaagttgttggtaaactgattgaagtagttaagaaaaagaacaaagctggtgtatcagtgaaaccatttcaagtaaaaaaccatatatgggtttttattaattgccttattgaaaatccaacttttgattctcagactaaggaaaacatgactctgcagcccaaaagttttgggtctaaatgccagctgtcagaaaaattttttaaagcagaaaaaaagtataaaaaccctgagtacttctcagactcagtaagtggttactcacttgcccgttctgagaatgctcatccggagttccgtatggcaatgaaagacggtgagctggtgatatgggatagtgttcacccttgttacaccgttttccatgagcaaactgaaacgttttcatcgctctggagtgaataccacgacgatttccggcagtttctacacatatattcgcaagatgtggcgtgttacggtgaaaacctggcctatttccctaaagggtttattgagaatatgtttttcgtctcagccaatccctgggtgagtttcaccagttttgatttaaacgtggccaatatggacaacttcttcgcccccgttttcaccatgggcaaatattatacgcaaggcgacaaggtgctgatgccgctggcgattcaggttcatcatgccgtttgtgatggcttccatgtcggcagaatgcttaatgaattacaacagtactgcgatgagtggcagggcggggcgtaa

SEQ ID NO: 22384 - DNA, 1416 bp, Homo sapiens
  SIMILAR (400)..(882): 1001254mologous to Homo sapiens DNA topoisomerase II,accession number X68060,Smith-Waterman Score=852.
atgggaattcagcccatttcacagataaggagccagaggctagacccattgagagctcaaaaaggcacataccaggatgtccaggcaggcggccttcagcagggtaatttggtctgcgatggtcaagccagtgaaaccaggcagacgtttagcaaactccacgatcttaataatgcacttggtggccagttcactgaatttgtcccagaggcccaggtccagtcggactcgatgctgcggcaaatggagagccctggcctgcttgggttggtaatgaaggcggctgtggggagcaccagcgaagcgtggattttcagcagcatttctgagtgtgcagggaggaaaaccaacagagaaggagaagcagaaagtggggtggtgaggagtgacccttgctgtggtcgtaatggttatggtgcaaaactttgtaatattttcagtacaaagtttacagtagaaacagcttgcaaagaatacaaacacagttttaagcagacatggatgaataatatgatgaagacttctgaagccaaaattaaacattttgatggtgaagattacacatgcataacattccaaccagatctgtccaaatttaagatggaaaaacttgacaaggatattgtggccctcatgactagaagggcatatgatttggctggttcgtgtagaggggtcaaggtcatgtttaatggaaagaaattgcctgtaaatggatttcgcagttatgtagatctttatgtgaaagacaaattggatgaaactggggtggccctgaaagttattcatgagcttgcaaatgaaagatgggatgtttgtctcacattgagtgaaaaaggattccagcaaatcagctttgtaaatagtattgcaactacaaaagtaacatttgagtgtggtcagccagatggcaaaacaagaaaccccaggcctttctttccccatgaagacaaggattcaacaataacaaacaatccaactgcctttgtgataagttccagcaccccagccgaaagacctaaatacacatttgatttctcagaagaagaggatgatgatgctgatgatgatgatgatgacaataatgatttagaggaattgaaagttaaagcatctcccataacaaatgatggggaagatgaatttgttccttcagatgggttagataaagatgaatatacattttcaccaggcaaatcaaaagccactccagacacaatcagccttggtgccgtgaacagcagcaggaggcagacaggctacttggtgaaaacaagtaggtccctggtgaagccccaccttcaagccagggaaggcctggagcctgggggccgagctgctgatcctgtggaccagagtgggaacttgtgctttttccaggcctgccaatggctgcccgtggaccagttggcatga

SEQ ID NO: 22385 - DNA, 2787 bp, Homo sapiens; identical to SEQ ID NO: 13435
  SIMILAR (325)..(1296): 981254mologous to Cloning vector pBACe3.6 levansucrase,accession number U80929,Smith-Waterman Score=1684.

SEQ ID NO: 22386 - DNA, 1641 bp, Homo sapiens
  SIMILAR (253)..(966): 991254mologous to Homo sapiens DNA topoisomerase II,accession number Z15115,Smith-Waterman Score=1252.
aagacattagatcttctagggcttttgccagtgaaaaaggctgagctgagcaggtgtcttggggagttgtgcatgacagaagcccagttaagagggagaagcaaagatggacatgtattggggtttggaccttacttttgccaaaccttagctatcaaagaagggggtccagggataggggagacactggggtcaggaggtcagaaggaaaatggaagacaagaagtaggccagaattatgactcgggtgctgcatttagtaagaagaagattgatgacagaaaagaatggttaacaaattttatggaagaccggagacagcgtaggctacatggcttaccagagcaatttttatatggtactgcaacaaagcatttgacttataatgatttcatcaacaaggaattgattctcttctcaaactcagacaatgaaagatctataccatctcttgttgatggctttaaacctggccagcggaaagttttatttacctgtttcaagaggaatgataaacgtgaagtaaaagttgcccagttggctggctctgttgctgagatgtcggcttatcatcatggagaacaagcattgatgatgactattgtgaatttggctcagaactttgtgggaagtaacaacattaacttgcttcagcctattggtcagtttggaactcggcttcatggtggcaaagatgctgcaagccctcgttatattttcacaatgttaagcactttagcaaggctactttttcctgctgtggatgacaacctccttaagttcctttatgatgataatcaacgtgtagagcctgagtggtatattcctataattcccatggttttaataaatggtgctgagggcattggtactggatgggcttgtaaactacccaactatgatgctagggaaattgtgaacaatgtcagacgaatgctagatggcctggatcctcatcccatggttacccaccctcttctcctcatgttcttcctggcctattcctcatctcagctgaaatgccatctcttcagaaaagccttctccgaccagccacccgattcctccctcacactgcagattcttagaatttgcaccaggtataccccagaacaagacaccatgactttctcagacggccttaccctaaatcgaactcagatgcacaatgctggatttggtcctctgactgaccttgtgttcacctttgccaaccagctcctgcctttggaaatggatgacacagaaacaggccttctcagtgccatctgcttaatctgtggagaccgccaggaccttgaggaaccgacaaaagtagataagctacaagaaccattgctggaagcactaaaaatttatatcagaaaaagacgacccagcaagcctcacatgtttccaaagatcttaatgaaaatcacagatctccgtagcatcagtgctaaaggtgcagagcgtgtaattaccttgaaaatggaaattcctggatcaatgccacctctcattcaagaaatgctggagaattctgaaggacatgaacccttgaccccaagttcaagtgggaacacagcagagcacagtcctagcatctcacccagctcagtggaaaacagtggggtcagtcagtcaccactcgtgcaataa

SEQ ID NO: 22387 - DNA, 2470 bp, Homo sapiens
  SIMILAR (92)..(715): 651254mologous to Homo sapiens topoisomerase II beta,accession number AJ011721,Smith-Waterman Score=582.
gcacttgtagaattttaaactaattattcaataaaattcaacattaatttgatactatacaagactttaatatacagtttgttattttttacaggcagcagaagaggatgaaacacaaaaccagcatgatgatagttcctccgattcaggaactccttcaggcccagattttaattatattttaaatatgtctctgtggtctcttactaaagaaaaagttgaagaactgattaaacagagagatgcaaaagggcgagagggtcaatgatcttaaaaggaaaatctccttcagatctttgggaaagaggatttagcgggcatttgttggagggactgggataaagtgggaattctccaaggaacgaggaggatgttctggctggaatgtctgggaaaagcaatttaaagggtaaagttggcaaaccctaaggtgaagaaactccagttggaagagacaatgccctcaccttatggcagaagaataattcctgaaattacagctatgaaggcagatgccagcaaaaagttgctgaagaagaagaaggggtggatcttgatactgcagcagtaaaaggtggaatttgatgaggaattcagtggagcacccagtagaaggtgcaggagaagaaggcattgactcccatcagttccctataaataaaaggtcccaaaccttagaagggagaagaaggagcctggttcccagagtgagaaaaacacctacatcatctggtaaacctagtgcaaagaaagtgaagaaacggaatccttggtcagatgatgaatccaagtcagaaagtgatttggaagaaacagaacctgtggttattccaagagattctttgcttaggagagcagcagatattcacagacttggaggggagggctttgatgcaggcttgacagtgtttgctcctctctttgcctctccattccctcccagaggtgcaccgtacctgaaagcagcttgtcaaactcccaggtctggcataggtgctactgccatctcgggggaggctctgaaaggagctgtctcctctggagttgaccccaggtgggcatcccatttgagggtaaagctcttggaaaaatccttctctcttcaagagatccagtccacagaaaaagttctctcacaacaagccaagactctgagcctcctgggtgagcccaagctctccaaacaactgacgggcacatgcatatacagaaagacaaacctagctctctgccggggtcccgcggctgccaaatcccttttccagggagctgtcaggaatgacaggaacaagaaaaagaaggagacttcgaagcaagaatgcacagagagctatgaaatgacagctgagttggacgatctcacagagaagatccgaaaagctcaccaggaaactttcccttcactctgccagctgggtaaatacaccacgagcctccaaaaaggaatgcagcgctgccaaattcttgatcttagttcagtgagacccattgtggacgtcagacctccagaactacaagatagtaaacttgtgttagttcaagccgctaaatgtgcgccacttgctgatcactgctctaagcccgtgctgctcaaagaaggacctgaggaccagaaggatcagcacgatgtaggagactgttggaatccagaatgtcagactctttttgatcagaacaatgctgcaaaaaaagaagagtcagaaactgccaacaaaaatgattcttcaaagaagttgtctgttgagagagtgtatcatataaagacacaacttgaacacattcttcttcgtcctgatacatatattgggtcagtggagccattgtcgaaggttgctgaggaggggcctgctgcagtaggaggctggaaggggtggtttggaactgagtcaagaaaagaccccaaacccacagggacagaggaagttgaaagaggggtttggcttagtggaagggaagggagactcctgagcccctctgtggtcaccaccatggtactagctgagaactctgctattcgtttcgtgggaggaaaaccgtcttcagatacagtccctaagcccaagagagccccaaaacagaagaaagtagtagaggctgtaaactctgactcggattcagaatttggcattccaaagaagactacaacaccaaaaggtaaaggccgaggggcaaagaaaaggaaagcatctggctctgaaaatgaaggcgattataaccctggcaggaaaacatccaaaacaacaagcaagaaaccgaagaagacatcttttgatcaggattcagatgtggacatcttcccctcagacttccctactgagccaccttctctgccacgaaccggtcgggctaggaaagaagtaaaatattttgcagagtctgatgaagaagaagatgatgttgattttcgcacggttaattaagcgcccacatgacacaaaccatttttcaacaactatcctgtggtgccccg

SEQ ID NO: 22388 - DNA, 5226 bp, Homo sapiens
  SIMILAR (2309)..(4738): 801254mologous to Cricetulus longicaudatus DNA topoisomerase (ATP-hydrolysing),accession number X86455,Smith-Waterman Score= 3191.
actctttttgatcagaacaatgctgcaaaaaaagaagagtcagaaactgccaacaaaaatgattcttcaaagaagttgtctgttgagagagtgtatcagaagaagacacaacttgaacacattcttcttcgtcctgatacatatattgggtcagtggagccattgacgcagttcatgtgggtgtatgatgaagatgtaggaatgaattgcagggaggttacctttgtgccaggtttatacaagatctttgatgaaattttggttaatgctgctgacaataaacagagggataagaacatgacttgtattaaagtttctattgatcctgaatctaacattataagcatttggaataatgggaaaggcattccagtagtagaacacaaggtggagaaagtttatgttcctgctttaatttttggacagcttttaacatccagtaactatgatgatgatgagaaaaaagttacaggtggtcgtaatggttatggtgcaaaactttgtaatattttcagtacaaagtttacagtagaaacagcttgcaaagaatacaaacacagttttaagcagacatggatgaataatatgatgaagacttctgaagccaaaattaaacattttgatggtgaagattacacatgcataacattccaaccagatctgtccaaatttaagatggaaaaacttgacaaggatattgtggccctcatgactagaagggcatatgatttggctggttcgtgtagaggggtcaaggtcatgtttaatggaaagaaattgcctgtaaatggatttcgcagttatgtagatctttatgtgaaagacaaattggatgaaactggggtggccctgaaagttattcatgagcttgcaaatgaaagatgggatgtttgtctcacattgagtgaaaaaggattccagcaaatcagctttgtaaatagtattgcaactacaaaaggtggacggcacgtggattatgtggtagatcaagttgttggtaaactgattgaagtagttaagaaaaagaacaaagctggtgtatcagtgaaaccatttcaagtaaaaaaccatatatgggtttttattaattgccttattgaaaatccaacttttgattctcagactaaggaaaacatgactctgcagcccaaaagttttgggtctaaatgccagctgtcagaaaaattttttaaagcagcctctaattgtggcattgtagaaagtatcctgaactgggtgaaatttaaggctcagactcagctgaataagaagtgttcatcagtaaaatacagtaaaatcaaaggtattcccaaactggatgatgctaatgatgctggtggtaaacattccctggagtgtacactgatattaacagagggbgactctgccaaatcactggctgtgtctggattaggtgtgattwggacgagacagatacggagtttttccactcaggggcaaaattcttaatgtacgggaagcttctcataaacagatcatggaaaatgctgaaataaataatattattaaaatagttggtctacaatataagaaaagttacgatgatgcagaatctctgaaaaccttacgctatggaaagattatgattatgaccgatcaggatcaagatggttctcacataaaaggcctgcttattaatttcatccatcacaattggccatcacttttgaagcatggttttcttgaagagttcattactcctattgtaaaggcaagcaaaaataagcaggaactttccttctacagtattcctgaatttgacgaatggaaaaaacatatagaaaaccagaaagcctggaaaataaagtactataaaggattggggtactagtacagctaaagaagcaaaggaatattttgcttgatatggaaaggcatcgcatcttgtttagatatgctggtcctgaagatgatgctgccattaccttggcatttagtaagaagaagattgatgacagaaaagaatggttaacaaattttatggaagaccggagacagcgtaggctacatggcttaccagagcaatttttatatggtactgcaacaaagcatttgacttataatgatttcatcaacaaggaattgattctcttctcaaactcagacaatgaaagatctataccatctcttgttgatggctttaaacctggccagcggaaagttttatttacctgtttcaagaggaatgataaacgtgaagtaaaagttgcccagttggctggctctgttgctgagatgtcggcttatcatcatggagaacaagcattgatgatgactattgtgaattttggctcaaaactttgggggaagtaacaacattaacttgcttcagcctattggtcagtttggaactcggcttcatggtggcaaagatgctgcaagccctcgttatattttcacaatgttaagcactttagcaaggctactttttcctgctgtggatgacaacctccttaagttcctttatgatgataatcaacgtgtagagcctgagtggtatattcctataattcccatggttttaataaatggtgctgagggcattggtactggatgggcttgtaaactacccaactatgatgctagggaaattgtgaacaatgtcagacgaatgctagatggcctggatcctcatcccatgcttccaaactacaaaaactttaaaggcacgattcaagaacttggtcaaaaccagtatgcagtcagtggtgaaatatttgtagtggacagaaacacagtagaaattacagagcttccagttagaacttggacacaggtatataaagaacaggttttagaacctatgctaaatggaacagataaaacaccagcattaatttctgattataaagaatatcatactgacacaactgtgaaatttgtggtgaaaatgactgaagagaaactagcacaagcagaagctgctggactgcataaagtttttaaacttcaaactactcttacttgtaattccatggtactttttgatcatatgggatgtctgaagaaatatgaaactgtgcaagacattctgaaagaattctttgatttacgattaagttattacggtttacgtaaggagtggcttgtgggaatgttgggagcagaatctacaaagcttaacaatcaagcccgtttcattttagagaagatacaagggaaaattactatagagaataggtcaaagaaagatttgattcaaatgttagtccagagaggttatgaatctgacccagtgaaagcctggaaagaagcacaagaaaaggcagcagaagaggatgaaacacaaaaccagcatgatgatagttcctccgattcaggaactccttcaggcccagattttaattatattttaaatatgtctctgtggtctcttactaaagaaaaagttgaagaactgattaaacagagagatgcaaaagggcgagaggtcaatgatcttaaaagaaaatctccttcagatctttggaaagaggatttagcggcatttgttgaagaactggataaagtggaatctcaagaacgagaagatgttctggctggaatgtctggaaaagcaattaaaggtaaagttggcaaacctaaggtgaagaaactccagttggaagagacaatgccctcaccttatggcagaagaataattcctgaaattacagctatgaaggcagatgccagcaaaaagttgctgaagaagaagaagggtgatcttgatactgcagcagtaaaagtggaattggatgaagaattcagtgtatcacctgtagaaggtgcaggagaagaggcattgactcgggcagttcctataaataaaggtcccaaacctaagagggagaagaaggagcctggtaccagagtgagaaaaacacctacatcatctggtaaacctagtgcaaagaaagtgaagaaacggaatccttggtcagatgatgaatccaagtcagaaagtgatttggaagaaacagaacctgtggttattccaagagattctttgcttaggagagcagcagccgaaagacctagatacacatttgatttctcagaagaagaggatgatgatgctgatgatgatgatgatgacaataatgatttagaggaattgaaagttaaagcatctcccataacaaatgatcggggaagatgaatttggtccttcagatgggttagataaagatgaatatacattttcaccaggcaaatcaaaagccacttccagaaaaatctttgcatgacaaaaaaagtctggaattttggaaatctcttctcatttccttcatattctcagaaggtcagaagatgatttcagctaaatttgacagtaatgaagaagattctgcttctggttttttcaccatcatttgggtctgaaacagacagataaagttccaagtaaaacggtagctgctaaaaaggggaaccaccgtcctccgtatacagtcccctaagcctcaagagggctcccaaaccagcagaacgtcagtagaggctgtaaactctggactcggaattcagaatttggcatttccaaaagatgactactacaccaaaatggtataggctgaggggcaaaagaaaaaggaaagcatctgggctctgaaaatgaaggcgatttataaccctggcatgaaaacatccaagacgaacaagcaagaaacccgaagaaagacatcttttgattcaggatttcagatgtgggacatcttcccccctcagacttcccctacttgagccacctttctctgcccaccgaacccggttcggggctagggaaagaagtaaaataattttgccagagtctggatgaagaatgaagatgatgttgaattttgccaatgtttaaattaaagtgcccccaaagagccacaaacattttccaacaaatatcctgtgttgtccctttgtccttcctctgtcctcagactttttgaacatctggcttatttttaatgtgatgatgtaatttgacggttttttattattgtgggtaaggccctttaacattttgttcttacacatacgagttttatgctctttttttactcattgaaaatgtcacgtactgtctgattgattggcttgtagaattgtttataggctgcccgtgcattaggcacaggattttaattgtcatggttacaaactacagacctgctttttgaaatgaaatttaaacattaaaaatggaactgtgaaaaaaaaaaaaaaaaa

SEQ ID NO: 22389 - DNA, 386 bp, Homo sapiens
  SIMILAR (168)..(281): 1001254mologous to Homo sapiens PRO1868, an A33 antigen homologue,accession number Y96735,Smith-Waterman Score=201.
tttctggcaaaaaatcctttctcaaagtctcttggagtgtggagttggctacgtttttaatctgcatgaaaggcctcttgaattagagcttgcagggtctgggtgcagctgaacgtagaagcactccacattcaccgagagctctttttcttctttgcgtgttaggtgtggaactgtcttgcatcattacggattcgcagacaagtgaccccaggatcgagtggaagaaaattcaagatgaacaaaccacatatgtgttttttgacaacaaaattcagggtatgatcctgtagtcctcttgcctgctgacctttcctctgtccatagacctgggtgtacactcttggccagaaacttacctcagactggtaacctgcatctgtagc

SEQ ID NO: 22390 - DNA, 906 bp, Homo sapiens
  SIMILAR (1)..(648): 971254mologous to Cloning vector pZC320 SopA,accession number U26464,Smith-Waterman Score=1096.
atgaaactcatggaaacacttaaccagtgcataaacgctggtcatgaaatgacgaaggctatcgccattgcacagtttaatgatgacagcccggaagcgaggaaaataacccggcgctggagaataggtgaagcagcggatttagttggggtttcttctcaggctatcagagatgccgagaaagcagggcgactaccgcacccggatatggaaattcgaggacgggttgagcaacgtgttggttatacaattgaacaaattaatcatatgcgtgatgtgtttggtacgcgattgcgacgtgctgaagacgtatttccaccggtgatcggggttgctgcccataaaggtggcgtttacaaaacctcagtttctgttcatcttgctcaggatctggctctgaaggggctacgtgttttgctcgtggaaggtaacgacccccagggaacagcctcaatgtatcacggatgggtaccagatcttcatattcatgcagaagacactctcctgcctttctatcttggggaaaaggacgatgtcacttatgcaataaagcccacttgctggccggggcttgaccttattccttcctggctggctctgcccccgattgaaactgagttaatgggccaatttgatgaaggagacttggcgggtcgtgcagaaatactggggaagacatccctgaagatctggaatgtgacacggagagactcagccctttatcgctgtgaggtcgttgctcgaaatgaccgcaaggaaattgatgagattgtgatcgagttaactgtgcaagcgtgctttgctgatggcatcctacccctggacctggacgccagtgagttactctcagacacgtttgaggtcctcagctccaaggagatccagcttttggcaatgagatcttaa

SEQ ID NO: 22391 - DNA, 1266 bp, Homo sapiens
  SIMILAR (94)..(234): 361254mologous to Homo sapiens Ser/Arg-related nuclear matrix protein,accession number AF048977,Smith-Waterman Score=60.
atgccttcagctgcctggaagaggcctgtggaaggccctgcaactctccgcagacctctgggcattgctgctgcttctcagtgcccctcgtcccctcagccaggccccatgtccttgagccccaatgcaatcttgaattctgtcaagaaaccggtggagtcaaagagcaggcatcgaagtcggagcttaggagtgctgcctttcactttaaattctggaagcccagaaaaaacgtgcagtcaggacctgaagacacaaagggaaggaagcgcctccaccagccccgaaagaatggaaaaggcaaccgttgagggccacctggagagtgtgtccctggaactcaatcctcatttgccaagccccatccggggatcctctaccgacgacctgcatggcatgaccgagcaggcgagcaggaattccgaagagaggctcaaggatttctttgcagtggacaaacagctggcatcagagtttgagtatgacaggaagaagtaccaggaccagctggtccaggagcaggagctagcaaaacatgcagatgtggccgggacggctggaggtgctgaggtggcacctgtggcacagtctgtcgtttgtctggcacctctcaagatctccgtcatcagagtttctattaaggggaacagcccacaccaatgttcgcgagtaatacgactggtacgcaaatcggacggtcaaacgagagtcggcgcacaaaaatcaaacacagacttgtgggaacaacacgccgccaactcaaaaacatatgtcttaaacgagaccaagggctgccacgagaaaaacctaagtcgtccccccccgagggatatttgcatctcctcccctccaatgcgagttcccccaactatcccctcgagttcgtttagacgacaacacaaatgtcctcggccaaaacacgatgtgcggtctaaccatcggggacggcaggtttttaccatcgctaaagccataaggccgggaaggctgctgaaaggggctgtaatctcaaatccagcaatgaacccccagtggtacaggaatttgaaagtaagtacaaacgaaatgcctaggataatgggcaccatctactggacatttgatgtcttgcagccaactcaggacacatctgtctctggagaagagggccagcaaaatgcgttattaggaggatttttaaaactcgaagatttcagctttcagaggacaaatcaggtcatcctccagccttccatgaatgaggtgtttttcccagccccagtttag

SEQ ID NO: 22392 - DNA, 1088 bp, Homo sapiens
  SIMILAR (498)..(740): 961254mologous to Homo sapiens PRO1868, an A33 antigen homologue,accession number Y96735,Smith-Waterman Score=426.
atgccttcagctgcctggaagaggcctgtggaaggccctgcaactctccgcagacctctgggcattgctgctgcttctcagtgcccctcgtcccctcagccaggctgcctgataggggctgtaaatctcaaatccagcaatcgaaccccagtggtacaggaatttgaaagtgtggaactgtcttgcatcattacggattcgcagacaagtgaccccaggatcgagtggaagaaaattcaagatgaacaaaccacatatgtgttttttgacaacaaaattcagggagacttggcgggtcgtgcagaaatactggggaagacatccctgaagatctggaatgtgacacggagagactcagccctttatcgctgtgaggtcgttgctcgaaatgaccgcaaggaaattgatgaaattgcgatcgaggtaacctgtgcaagtgaagccagtgacccctgtctgtagagtgccgaaggctgtaccagtaggcaagatggcaacactgcactgccagggagagtgagggccacccccggcctcactacagctggtatcgcaatgatgtaccactgcccacggattccagagccaatcccagatttcgcaattcttctttccacttaaactctgaaacaggcactttggtgttcactgctgttcacaaggacgactctgggcagtactactgcattgcttccaatgacgcaggctcagccaggtgtgaggagcaggagatggaagtctgtcacactgataaaagaggtgggttcccatggtcttgggcagctccccacctgtggtttttgcaggatacagccttgctccccgctgctctcacgggctggtgttcagtgtctgtggcttttccaggtgcacagtgcaagctgtcagtggatctatcattctggggtctggaggatggtggccctcttctcacagctccactaggcagtaccccagtagggactctgtgtaggggatctgaccccacatttcccttctgcactgccctagcagatgatctctatgagagccccacccctgcagcaaacttctgcctggacatccaggcattttcatacatcctctga

SEQ ID NO: 22393 - DNA, 1221 bp, Homo sapiens
  SIMILAR (725)..(1060): 401254mologous to Homo sapiens pro-alpha-1 type-I collagen,accession number K03179,Smith-Waterman Score=127.
tcatccatgctgtgaatgcgtcagtagtatattctttttcattgctgcgttatattccattataagaatgtcctcccatttcttttccacttgccagtcgatggtcaacttaaggggtgtctggtgtttggtgatcatgaatgaagctgcctgtatgttcgcatctaagccctgcgtctgtctcaagtcaagggtcggtgcggcagggtgggccactgaggcccagactctgtcctcgggtgccctcgaggcgagaacaatctttgcaaaatgaaactgtctacagtatgtttcccccagggccaccagagggcgcgtgtgagcatctaagtcagccgcttccctcctctgctcagaaccctccgtggctcccacctcactcgaccaaaagccaaagtctgtatcatacaaaggctctgcactgggccggatgtggcggcgcacacctgtgcaaagagcattctgggcagaggaaacagcacgtgcaaaggtcctggggtaggaatgtgctgagatgtggctggggccatgtgagcgcacacgtatgtcgcacacgtatgtggctccgtgcacgggtgcgatcgctgccagccatggaattagttcccttttccgaattccagatgatttttcatctctgtaattaatgggcaagtcagttctgtccagcgcctctctggggtcggcccagcgtgtctctcctgcggctcggcgaacccgggccccccgcccggcacatctcccggagccggggcgcagcgccgatagctcccgcgccgacggctcgggctccccgcagtggccgcggggagctcgggttgggggcgggcggctcggaactggcggaagggggcggcccggctggaggcaggtgccgcggcgtctctcccccggattcggccggtaggggggcaccgggccgggccccgtgggcacctcagggaagcgcggaccgagccggcgccgggcaccagcaaatgacaaagccgcctgttggcctcgcttcccggggcaacccgcttcttgaactggatttaggggtgagagaggagtcaagggtttcagctcctggggttctggctggagggcctgggaggatggtggcaccgtgcactgatgtaggggcttattttggtctggttgggctgaaggtgccttggagttcccggtggaagtatacatggctctggggggtccactctggagtcttagcattctagg

SEQ ID NO: 22394 - DNA, 238 bp, Homo sapiens
  SIMILAR (2)..(124): 1001254mologous to Homo sapiens dJ268D13.1.1 (seizure related gene 6 (mouse)-like (KIAA0927) (isoform 1)),accession number AL023513,Smith-Waterman Score=222.
tgtgagcttctccaatcctgaggggtacattgactccagcgactacccactgctgcccctcaacaactttctggagtgcacatacaacgtgacagtctacactggctatggggtggagctccagacactcctggtggaggggcaggtaatccgaagccccaccaacaccatctccgtctacttccggaccttccaggacgacggccttgggaccttccagcttcactaccagggtagg

SEQ ID NO: 22395 - DNA, 3079 bp, Homo sapiens; identical to SEQ ID NO: 5912
  SIMILAR (743)..(2875): 1001254mologous to Homo sapiens dJ268D13.1.1 (seizure related gene 6 (mouse)-like (KIAA0927) (isoform 1)),accession number AL023513,Smith-Waterman Score=3816.

SEQ ID NO: 22396 - DNA, 6398 bp, Homo sapiens
  SIMILAR (743)..(2575): 991254mologous to Homo sapiens dJ268D13.1.2 (seizure related gene 6 (mouse)-like (KIAA0927) (isoform 2)),accession number AL023513,Smith-Waterman Score=3248.
aaaggaagggagggagggagaaaggagaagttggtttagaggccagccggacgagctttgggcaccgcccttaggagggccaccctcagagtctgacagcaggtgaaggtcctaaatctccccaaactaactggtgtcttttctcctcttccaagatgctcttcccgagggagatgctagccctttgggtccttacctcctgccctcaggagccccggagagaggcagtcctggcaaagagcaccctgaagagagagtggtaacagcgccccccagttcctcacagtcggcggaagtgctgggcgagctggtgctggatgggaccgcaccctctgcacatcacgacatcccagccctgtcaccgctgcttccagaggaggcccgccccaagcacgccttgccccccaagaagaaactgccttcgctcaagcaggtgaactctgccaggaagcagctgaggcccaaggccacctccgcagccactgtccaaagggcagggtcccagccagcgtcccagggcctagatctcctctcctcctccacggagaagcctggcccaccgggggacccggaccccatcgtggcctccgaggaggcatcagaagtgcccctttggctggaccgaaaggagagtgcggtccctacaacacccgcacccctgcaaatctcccccttcacttcgcagccctatgtggcccacacactcccccagaggccagaacccggggagcctgggcctgacatggcccaggaggccccccaggaggacaccagccccatggccctgatggacaaaggtgagaatgagctgactgggtcagcctcagaggagagccaggagaccactacctccaccattatcaccaccacggtcatcaccaccgagcaggcaccagctctctgcagtgtgagcttctccaatcctgaggggtacattgactccagcgactacccactgctgcccctcaacaactttctggagtgcacatacaacgtgacagtctacactggctatggggtggagctccaggtgaagagtgtgaacctgtccgatggggaactgctctccatccgcggggtggacggccctaccctgaccgtcctggccaaccagacactcctggtggaggggcaggtaatccgaagccccaccaacaccatctccgtctacttccggaccttccaggacgacggccttgggaccttccagcttcactaccaggccttcatgctgagctgcaactttccccgccggcctgactctggggatgtcacggtgatggacctgcactcaggtggggtggcccactttcactgccacctgggctatgagctccagggcgctaagatgctgacatgcatcaatgcctccaagccgcactggagcagccaggagcccatctgctcagctccttgtggaggggcagtgcacaatgccaccatcggccgcgtcctctccccaagttaccctgaaaacacaaatgggagccaattctgcatctggacgattgaagctccagagggccagaagctgcacctgcactttgagaggctgttgctgcatgacaaggacaggatgacggttcacagcgggcagaccaacaagtcagctcttctctacgactcccttcaaaccgagagtgtcccttttgagggcctgctgagcgaaggcaacaccatccgcatcgagttcacgtccgaccaggcccgggcggcctccaccttcaacatccgatttgaagcgtttgagaaaggccactgctatgagccctacatccagaatgggaacttcactacatccgacccgacctataacattgggactatagtggagttcacctgcgaccccggccactccctggagcagggcccggccatcatcgaatgcatcaatgtgcgggacccatactggaatgacacagagcccctgtgcagagccatgtgtggtggggagctctctgctgtggctggggtggtattgtccccaaactggcccgagccctacgtggaaggtgaagattgtatctggaagatccacgtgggagaagagaaacggatcttcttagatatccagttcctgaatctgagcaacagtgacatcttgaccatctacgatggcgacgaggtcatgccccacatcttggggcagtaccttgggaacagtggcccccagaaactgtactcctccacgccagacttaaccatccagttccattcggaccctgctggcctcatctttggaaagggccagggatttatcatgaactacatagaggtatcaaggaatgactcctgctcggatttacccgagatccagaatggctggaaaaccacttctcacacggagttggtgcggggagccagaatcacctaccagtgtgaccccggctatgacatcgtggggagtgacaccctcacctgccagtgggacctcagctggagcagcgaccccccattttgtgagaaaattatgtactgcaccgaccccggagaggtggatcactcgacccgcttaatttcggatcctgtgctgctggtggggaccaccatcccaatacacctgcaaccccggttttgtgcttgaagggagttctcttctgacctgctacagccgtgaaacagggactcccatctggacgtctcgcctgccccactgcgtttcggaggagtccctggcatgtgacaacccagggctgcctgaaaatggataccaaatcctgtacaagcgactctacctgccaggagagtccctcaccttcatgtgctacgaaggctttgagctcatgggtgaagtgaccatccgctgcatcctgggacagccatcccactggaacgggcccctgcccgtgtgtaaagtagcagaagcggcagcagagacgtcgctggaaggggggaacatggccctggctatcttcatcccggtcctcatcatctccttactgctgggaggagcctacatttacatcacaagatgtcgctactattccaacctccgcctgcctctgatgtactcccacccctacagccagatcaccgtggaaaccgagtttgacaaccccatttacgagacaggggaaaccagagagtatgaggtttctatctaaagagagctacacttgagaaggggacttgtgaactcaaccacaatctcctcgagacattcatccagagaccatgtggcacttgattgaaaccccagaatgtcgactgtcttttgtttagactctttatcaaaggtttactgttttcttccctgtatttattatatttaaaagtgaaataggtgtgggtttggatgtttcgcggcctcagccaaattcatgttacagcctcaattctgaaggcaggtggaagacttgcaaaatggcaaaccgcggcagcaaaaacacaaaacagcagatggagtttctcccatcagcaatgccatgctaaggctgcattgaattgcatgcatctttgggaaccatgcccatgatgttttcagtacaaatctaagtcccaagattaggttggaaagggtatttcttgttggcttagtttgggttggaatttagcatgggtacttaaacccatttggagagctgtgctcctaaacaaattctgtgtcctctcttcccattttgccagcttctgaaaggtttttccacagcccctccctctcacggttcttctgaaggtagcaaaggtgttatataaacattgtcttttaccactctggcctcgctggacagtgacaaaacaagaaaacgttttctttctagaaaggtgataaacgaccaaaggcaatttttcagagacaaatgagagatttgagagttccaatgaagaattgggtgagggggatcattgggtaagggaattgggttaaaatgttcttttctttgacactctttcaatgatgaaagagcgtgtaatttatgctacaagtgccagaattgatcaccatgttcagcaagccactctcaagctgtggtaataaacacacaggcttgggaggcaccagcggccccactcatacagtgacaaggatttgtgatgggaaaaaggaggtgccatgtttggaaatgcaggggtgagctctggtttctcctggggttctggaatatctcagccctcaaaatagaggagactcaagtgcactgattctctaaaaggtgtcatcttcagaatatacttgccatcaagtatttcagggggcgggagggtcccatgagaagaaactatttttctattctccaaagctgtctggatgttggagggtggtgtgaatgctgactgaggaggtgcagagaacaggggcaggggattttaaatcacagcagaccatccagtggaatcctgtatcatctgatctgaacatcaatgaagacagagagaggaatttcattcagaaaggattccatagccccacatctagtcacacgggcattcctcttattttatcagggtctgttttcccccaacccagtgaaaccggtgagtgtgtaactcttgggaagattcttttctaaatacaggtataaagagaaggtggagggtgcgggtgcatggaagaaatactatgtgtgaagcagattcaccttcctgggaccggtgacatggtggtgacagtcaatggcttggacagacagacgggctcagtggcatttggaaccctctttggtgccctcccattctctctggaattgtttcaagtctgctggttttcaaacaagaaaagacctttctggccatagggagaatagcagggagtctatgttttggtggttacattggaaacatcttaagcaagagagggaaagttgattttaggcacacatgtaccctccttgacagcaggaactcagacttcaatcttgggggtctaagaccagaatattttccttctgccagaaaagaatcttgcacatatactcctgaggcatgagtgtgtggtccatggcaagaaatagctaaaggctgctttccaggacccaaagccccatttaatgcaagaaccagagaagtgttctaggccattagtggacaatgtcatgtttggagaaagataacaacacaaataatgtaacctttccttaaaaggcagaactcaatccattttatttgatgcttattctaaccctaaccctgggtcacctggaatgaagaactctatgaataatatttgattttacaacgtgttatggttatgtgaaaactaaacatttgccttttataaagactgacaaaatataaatctttattctaaccctatccccaaaactagccaggccacaccccagatgttcttattgactattgggaagatagaaaaggcgttgtgttttttgtttttttgttgttgttgtcattgttgtttttttcagaagaccagtgtctcagttctgtcttagtagtaccacacccgtaaccgtgttttaaaagtttgttttagcctagagacagatcatacgagttcaacaatgtacagtgtgattgaaaagacaggttggtgtctatttttctttttaaaatatctgaatgtgtatttgtaatacgtaaaggtaaaaaaaaatagtgccaaaaatgtgcaaggcatctcattacagctcatgtacgtctgtttttataagatcaatattaaaacccattgggattaaatatttttgaataggatacactcttgagaaactcgagaatggactgagccttcctacaagccactctttgtttttaaaacagtggggaaatacgtttacagagattgtgagcttcagagaatgcatgtgatggtgtgtattacatgctaattcatataagctgtatctgtcagctaccaccctgtgctttaaaaatgcacacactcaaccctctttagcttggagctcagctttttgctttttttttttttttttttgtagaattatttagctaacataagtattctgattgctacctgatggccattcttacttagtttcatagatgtgctttaactatgatcctttgaagctcaccccttggagagcctacagaacctcaggctgatagctttgaagactgccaaacagcccagaaggaagcaaagcatctgcataatcaggagggttgtataacaagtagtgatttggcaaatatgtgggtagctttaggctgaggcacgggcctcaggcaaaaatgcccttcgagtgaatccgaagggcatgatcttcctatgtccttgactaggcatgacgagtcatttgaggtcagatattatttgagttgttcagcacccccaaaggtaggcattctcctgggaaattttcatttccattttatcgccaaacaaaataaaaagcaaaacaaactttttaagctagaataatgaaattaagtcattttccactttgtatatattgatgctaataaaacagatg

SEQ ID NO: 22397 - DNA, 2616 bp, Homo sapiens
  SIMILAR (1311)..(2459): 891254mologous to Homo sapiens dJ268D13.1.1 (seizure related gene 6 (mouse)-like (KIAA0927) (isoform 1)),accession number AL023513,Smith-Waterman Score=1799.
atcctgtcaagctagtcaaggccaccaaggttctgggtaggaccagctcacaaggacagtgcacacgggtgtgtgtggaatttatggtgagtcagagcaagaggccgcatgcaggcatcatgcctgtgaagggggccaggtgggtgccagggcactgaattgttcttgttggctgcgagagctcgttaggctctgggcagaggctggctggactccaggaggcagacatcaagccccacaactcaaagaatggaggagcctggggcttggcattagatgatgccagtccactcctccgcatgcactggggctctgatgcccagtgagaacgttgactctggaataccaaggccaaggcccccaccatcaatcacaatgttagcatggagtatcttgctaacactggcattgcccaaggaccccaggtacacgaagactctaatcatggggaccaaggtgggaggatcacttgatctgctagccctttgggtccttacctcctgccctcaggagccccggagagaggcagtcctggcaaagagcaccctgaagagagagtggtaacagcgccccccagttcctcacagtcggcggaagtgctgggcgagctggtgctggatgggaccgcaccctctgcacatcacgacatcccagccctgtcaccgctgcttccagaggaggcccgccccaagcacgccttgccccccaagaagaaactgccttcgctcaagcaggtgaactctgccaggaagcagctgaggcccaaggccacctccgcagccactgtccaaagggcagggtcccagccagcgtcccagggcctagatctcctctcctcctccacggagaagcctggcccaccgggggacccggaccccatcgtggcctccgaggaggcatcagaagtgcccctttggctggaccgaaaggagagtgcggtccctacaacacccgcacccctgcaaatctcccccttcacttcgcagccctatgtggcccacacactcccccagaggccagaacccggggagcctgggcctgacatggcccaggaggccccccaggaggacaccagccccatggccctgatggacaaaggtgagaatgagctgactgggtcagcctcagaggagagccaggagaccactacctccaccattatcaccaccacggtcatcaccaccgagcaggcaccaggtatgcagcccccaactccaatgggagaaggacccccaattgtcaagcatacatggattttggacaagtgcaatgtggccacccttcaaagcacgtgagctctgggtccaaatgaggggtacattgactccagcgactacccactgctgcccctcaacaactttctggagtgcacatacaacgtgacagtctacactggctatggggtggagctccaggtaaccccaggagagtaccccgatggggaactgctctccatccgcggggtggacggccctaccctgaccgtcctggccaaccagacactcctggtggaggggcaggtaatccgaagccccaccaacaccatctccgtctacttccggaccttccaggacgacggccttgggaccttccagcttcactaccagggtagggtcaggccaaggctctttccccgccggcctgactctggggatgtcacggtgatggacctgcactcaggtggggtggcccactttcactgccacctgggctatgagctccagggcgctaagatgctgacatgcatcaatgcctccaagccgcactggagcagccaggagcccatctgctcaggtatgctccagcctcagccgcacaatgccaccatcggccgcgtcctctccccaagttaccctgaaaacacaaatgggagccaattctgcatctggacgattgaagctccagagggccagaagctgcacctgcactttgagaggctgttgctgcatgacaaggacaggtaaagctctgaaggtccacagaccaacaagtcagctcttctctacgactcccttcaaaccgagagtgtcccttttgagggcctgctgagcgaaggcaacaccatccgcatcgagttcacgtccgaccaggcccgggcggcctccaccttcaacatccgatttgaaggtgagggtccctgggagctctatgagccctacatccagaatgggaacttcactacatccgacccgacctataacattgggactatagtggagttcacctgcgaccccggccactccctggagcagggcccggccatcatcgaatgcatcaatgtgcgggacccatactggaatgacacagagcccctgtgcagaggtgagcggatccacaacgcctctgctgtggctggggtggtattgtccccaaactggcccgagccctacgtggaaggtgaagattgtatctggaagatccacgtgggagaagagaaacggatcttcttagatatccagttgtgagtgtttaaaatgggtctgtcttcagccaagagaaggtacgacctactcctgagtggtggtgatgatgatgatgacgatagtgatgatggtgatggtaacgatgatgatgccaaaaatgaaagtggaatataacaacataacattcaaatga

SEQ ID NO: 22398 - DNA, 3313 bp, Homo sapiens
  SIMILAR (743)..(2671): 1001254mologous to Homo sapiens dJ268D13.1.2 (seizure related gene 6 (mouse)-like (KIAA0927) (isoform 2)),accession number AL023513,Smith-Waterman Score=3465.
  misc_feature (1)...(3313): n = a,t,c or g
aaaggaagggagggagggagaaaggagaagttggtttagaggccagccggacgagctttgggcaccgcccttaggagggccaccctcagagtctgacagcaggtgaaggtcctaaatctccccaaactaactggtgtcttttctcctcttccaagatgctcttcccgagggagatgctagccctttgggtccttacctcctgccctcaggagccccggagagaggcagtcctggcaaagagcaccctgaagagagagtggtaacagcgccccccagttcctcacagtcggcggaagtgctgggcgagctggtgctggatgggaccgcaccctctgcacatcacgacatcccagccctgtcaccgctgcttccagaggaggcccgccccaagcacgccttgccccccaagaagaaactgccttcgctcaagcaggtgaactctgccaggaagcagctgaggcccaaggccacctccgcagccactgtccaaagggcagggtcccagccagcgtcccagggcctagatctcctctcctcctccacggagaagcctggcccaccgggggacccggaccccatcgtggcctccgaggaggcatcagaagtgcccctttggctggaccgaaaggagagtgcggtccctacaacacccgcacccctgcaaatctcccccttcacttcgcagccctatgtggcccacacactcccccagaggccagaacccggggagcctgggcctgacatggcccaggaggccccccaggaggacaccagccccatggccctgatggacaaaggtgagaatgagctgactgggtcagcctcagaggagagccaggagaccactacctccaccattatcaccaccacggtcatcaccaccgagcaggcaccagctctctgcagtgtgagcttctccaatcctgaggggtacattgactccagcgactacccactgctgcccctcaacaactttctggagtgcacatacaacgtgacagtctacactggctatggggtggagctccaggtgaagagtgtgaacctgtccgatggggaactgctctccatccgcggggtggacggccctaccctgaccgtcctggccaaccagacactcctggtggaggggcaggtaatccgaagccccaccaacaccatctccgtctacttccggaccttccaggacgacggccttgggaccttccagcttcactaccaggccttcatgctgagctgcaactttccccgccggcctgactctggggatgtcacggtgatggacctgcactcaggtggggtggcccactttcactgccacctgggctatgagctccagggcgctaagatgctgacatgcatcaatgcctccaagccgcactggagcagccaggagcccatctgctcagctccttgtggaggggcagtgcacaatgccaccatcggccgcgtcctctccccaagttaccctgaaaacacaaatgggagccaattctgcatctggacgattgaagctccagagggccagaagctgcacctgcactttgagaggctgttgctgcatgacaaggacaggatgacggttcacagcgggcagaccaacaagtcagctcttctctacgactcccttcaaaccgagagtgtcccttttgagggcctgctgagcgaaggcaacaccatccgcatcgagttcacgtccgaccaggcccgggcggcctccaccttcaacatccgatttgaagcgtttgagaaaggccactgctatgagccctacatccagaatgggaacttcactacatccgacccgacctataacattgggactatagtggagttcacctgcgaccccggccactccctggagcagggcccggccatcatcgaatgcatcaatgtgcgggacccatactggaatgacacagagcccctgtgcagagccatgtgtggtggggagctctctgctgtggctggggtggtattgtccccaaactggcccgagccctacgtggaaggtgaagattgtatctggaagatccacgtgggagaagagaaacggatcttcttagatatccagttcctgaatctgagcaacagtgacatcttgaccatctacgatggcgacgaggtcatgccccacatcttggggcagtaccttgggaacagtggcccccagaaactgtactcctccacgccagacttaaccatccagttccattcggaccctgctggcctcatctttggaaagggccagggatttatcatgaactacatagaggtatcaaggaatgactcctgctcggatttacccgagatccagaatggctggaaaaccacttctcacacggagttggtgcggggagccagaatcacctaccagtgtgaccccggctatgacatcgtggggagtgacaccctcacctgccagtgggacctcagctggagcagcgaccccccattttgtgagaaaattatgtactgcaccgaccccggagaggtggatcactcgacccgcttaatttcggatcctgtgctgctggtggggaccaccatccaatacacctgcaaccccggttttgtgcttgaagggagttctcttctgacctgctacagccgtgaaacagggactcccatctggacgtctcgcctgccccactgcgtttcggaggagtcctgtttaatgtgacaacccagggctgcctgaaaatggataccaaaatcctgtacaagcgactctaccggccaggagagtccctcactttcatgtgctccataggctttgagatcatgggtgaagtgaccatccgcagcatcgntgggacagccatcccaatggaacgggcccctgcccgtgtgtaaagttaatcaagacagttttgaacatgctttagaagtagcagaagcggcagcagagacgtcgctggaaggggggaacatggccctggctatcttcatcccggtcctcatcatctccttactgctgggaggagcctacatttacatcacaagatgtcgctactattccaacctccgcctgcctctgatgtactcccacccctacagccagatcaccgtggaaaccgagtttgacaaccccatttacgagacagggggaacccaaaaggtttagggtttcatttaaaaagaggtaccctttaaaaaggggcttgtgaactcaaccccaatttccccgagacatttatccaaaggccctgggggccttgatttaaacccccaaaaggcggctgttttttggttaaactttttaacaaagggttacgggttttttccccggattttataaattttaaaagtg

SEQ ID NO: 22399 - DNA, 352 bp, Homo sapiens
  SIMILAR (50)..(217): 921254mologous to Homo sapiens putative transcription factor CA150,accession number AF017789,Smith-Waterman Score=276.
  misc_feature (1)...(352): n = a,t,c or g
ntttcagttgccaggcctacagttagtgtttcaactcctgctcctacaggccacacctgtgcaaaccggttcccccagccngcaccctcagacgttacctcctgctgttcctcattcagtacctcagccaacaacagcaatacctgcttttccaccagtaatggtacctccgtttcgtgttccccttcctggcatgccaattccacttccaggtgtattgccaggaatggcccctcctatcgtacccatgatacatccccaggttgctattgcagcttcacctgctaccttagctggagcaacagcagtttctgaatggactgaatataaaacagcagatgggaagacatat

SEQ ID NO: 22400 - DNA, 368 bp, Homo sapiens
  SIMILAR (71)..(232): 881254mologous to Mus musculus transcription factor CA150b,accession number AB023485,Smith-Waterman Score=227.
cctcgggtcgacccacgcgtccgtgagaattaatattttgtcagttgatgtcttatattttattttttataggagagacgataataaagacattgactcagagaaagaagctgccatggaagctgaaattaaagctgcccgagaaagggccattgtccctctggaggctcgaatgaagcagttcaaggacatgctgctagagagaggggtcagaaaacaatctttgggggagatatttctgttttgtataagtaatataaatatgtcttgctaaaaggtcaaatctaaggtgtctgctttttcaacgtgggagaaggagttgcacaagatagtttttgatccccggtacttacttctcaatctgatat

SEQ ID NO: 22401 - DNA, 630 bp, Homo sapiens
  SIMILAR (2)..(319): 1001254mologous to Mus musculus transcription factor CA150b,accession number AB023485,Smith-Waterman Score=547.
aaaagatcaccgctgggaatctggatccttattggaaagagaggagaaagagaagctttttaatgaacacattgaagcacttaccaaaaaaaagagagagcactttaggcaacttctggatgaaacttctgcaattaccttaacatccacgtggaaagaagtaaaaaaaatcattaaggaagatcctcgatgtattaagttctcctccagtgacaggaaaaaacaaagagaatttgaagaatatatcagagacaaatatatcacagccaaagctgacttcaggacgcttttgaaagagaccaaatttataacatatagttaatttagtgaaagatgtgaaagtgaaagcttgtgaaagatgctgggattggcagccccgcagactgaagtcctctgttcatccacagaacagatccaaaaaattaatccaagaatcggatcagcacctgaaagatgtagaaaaaattttacagaatgacaaacggtatctagtactggactgtgtgccagaggagaggcgtaaactgattgtggcatatgttgatgacctggatcgccggggtccacccccacctcccacagcatcggagcccacgagacgatcaacaaaataattctaaatactctttc

SEQ ID NO: 22402 - DNA, 783 bp, Homo sapiens
  SIMILAR (471)..(1): 671254mologous to Mus musculus transcription factor CA150b,accession number AB023485,Smith-Waterman Score=473.
  misc_feature (1)...(783): n = a,t,c or g
cgttctggaatcttcttttcctttcgtccagccagcggcacaaactcataaaccaaggttctcggtcttacatctttcaaatgctttgaatcttgaatcttaagcatgcttggctgcaaattcactaaaagctgctcttggattanattttgcttctcccatcattatattgaaatcttcattggcttgcataattttatttttcttttccatgcgttcttcctctgccctggtctttacatactgatcaaacacctgttttctctctttaggattgagaagtaagtaccggggatcaaaaactatcttgtgcaactccttctcccacgttgaaaaagcagacacccctctctctagcagcatgtccttggaactgattcattcgaggcctccagagggacaatggccctttctcgggcagctttaatttcagcttccatgggcagcttctttctctgaggtcaatgtctttattatcgtctctcctataaaaaataaaatataagacatcaactggacaaaatattaattctcaggtcttattagaaatcttagaatcaaaggaattttcaaggctcagtctcgagcagcatatttttggcaaaagcaaattatattgagggtttcaaatgcactctaagggataaatagctttcataataacaaaattaaaatgggcttctaatgatttacaatggctacattattaggaaaaaaatacacctttaatgggctgtctctccctgacactggttaataacataaaaagggagcaaccttact

SEQ ID NO: 22403 - DNA, 1290 bp, Homo sapiens
  SIMILAR (737)..(844): 431254mologous to Homo sapiens putative transcription factor CA150,accession number AF017789,Smith-Waterman Score=62.
atgtctgatggaccaggacacagagctaagagtcgactaacttggcagaggccagtggaagaatcaattctgaagataaaacatgacacgaaagttaatcaatgctttgacataccctgcaagctaatcaccacattcccaacgagcagcaggaatagcaaagaaaccaaaaagccaagcaaattttctgtagctgaactggaaatcgaaggcaattgtcaagtgcaccctaatcaaagactcctgtggtggcatggaaaccccacagtggataagaacaagctgaattcacgaaaactgagaattcccttcttccagaaattctgtttcactcaaatacaacttggaatcccagagaggtctgtcccatttagccttgccatccatggacggttaagtgttaaacagctcagtgcctcttggtacccaggtccttgtctggatccaggaagaatcaggtcgcacatggacttgcaggatgaatgtggaagtttactgaatggtgaaggttcagggttactctgggtgaagccaccatgggagcgcacaaaggcagggaatggtgaattcttgccttggggagtggaaggtgagagaattacagccccgcaggctcataaaagagcatgtcatggcttgaggagccacagcgacggtgagggcaccagactgtctttccaagctgtattttgtttcggggaagatatgactggaggaagtgcagtgctggctgaggccaagtggctcagaaccttaagtgaaaggcccagttatgaaacctgtcagcaagcttccgtcccgtggcccagggcttcttcaaggaatgcctcctgtgactgctccggtactccagcactacctcctacggaggagatatgggttgaaaataaaatccagatgggaagaggagtaaaacttaaagagttctggcagattgaggtcagtgatacttcatttaagaatgagccctggccacacctgtgcaaaccgttccccagccgcaccctcaacgttacctcctgctgttcctcattcagtacctcagccaacaacagcaaacctgcttttccaccagtaatggtacctccgtttcgtgttccccttcctgcatgccaattccacttccagcccccgagtcaccaatcaactggcgtcttcataccgctttcaaagtcggcgggcgccttgcccaatagcaaagacatatcgcccccatttcgaagattgatggaaagtttgaccaaccgcattcagacttctgctgtctccgcctctctcgttggggattga

SEQ ID NO: 22404 - DNA, 4279 bp, Homo sapiens
  SIMILAR (798)..(1703): 1001254mologous to Homo sapiens putative transcription factor CA150,accession number AF017789,Smith-Waterman Score=1588.
tttcgtcctctgtaatggcggagcgtggcggtgtcgggggcgagagtgaacgattcaacccgggggagcatcaggatggcccaacagcaggccttgaggttccgaggtccggctcccccaccataatgcagcgatgcgaggcccaccacctctgatgcgacctcctccaccttttggtatgatgcgaggccctcctccaccaccacggccgccctttggacgtcctccttttgatcctaatatgccgccaatgcctcctccaggagggatacctccacctatgggccctccacacctccagagaccacctttcatgcctcctcccatgagttccatgcctcctcctccgggtatgatgtttccaccaggaatgcctcctgtgactgctcctggtactccagcactacctcctacggaggagatatgggttgaaaataaaactccagatgggaaggtttattattataatgctcggacacgtgaatctgcatggaccaagccagatggagttaaggttattcagcaatcagaactgacacctatgcttgcagcccaggcacaggttcaggctcaggcccaggcgcaggctcaggcccaggcgcaggctcaggcccaggcacaagctcaggcccaggctcaggctcaggcccaggcccaggcccaggcccaggcccaggcccaagcccaagcccaggcccaggctcaggctcaggcacaagctcaggcccaggcccaggctcaggtccaggcccaggtccaggcacaagtgcaagcacaagcagttggagctaacacaccctacgaccagtagcccagcacctgcagtatccacttcaacatcatcatccaccccttcctctaccacttctaccacaacaactgctacttcagttgcgcagacagtatcaacacccacaacacaagatcagaccccaagttctgctgtttcagttgccacgcctacagttagtgtttcaactcctgctcgtacagccacacctgtgcaaaccgttccccagccgcaccctcagacgttacctcctgctgttcctcattcagtacctcagccaacaacagcaatacctgcttttccaccagtaatggtacctccgtttcgtgttccccttcctggcatgccaattccacttccaggtgtagcaatgatgcaaatagtcagctgcccgtatgtaaagacagtcgctaccaccaagaccggtgtattgccaggaatggcccctcctatcgtacccatgatacatccccaggttgctattgcagcttcacctgctaccttagctggagcaacagcagtttctgaatggactgaatataaaacagcagatgggaagacatattattataataatagaacattagaatcaacctgggaaaaaccccaagaactaaaggaaaaagaaaagttagaagagaagattaaagagccaattaaagaaccctctgaagagcctctgccaatggagacggaggaggaggatcctaaagaagagcctataaaggagataaaggaggagcccaaagaagaggagatgactgaagaagaaaaggctgcccagaaggcaaagccagttgctactgctcctattcctggtactccatggtgtgtcgtttggactggtgatgagcgggtcttcttttataatcccaccactcgtctttctatgtgggaccgacctgatgatctgaattggcagggcagatgttgacaaaattattcaggagccccctcataaaaaaggaatggaggaattgaagaaactaaggcacccaactccgacaatgctgtcgatccaaaagtgggcaattctctatgagtgcaattaaagaggaacaagaattaatgggaagaaattaattgaagatgagcctgttaaagcaaaaaaacggaagagagacgataataaagacattgactcagagaaagaagctgccatggaagctgaaattaaagctgcccgagaaagggccattgtccctctggaggctcgaatgaagcagttcaaggacatgctgctagagagaggggtgtctgctttttccaacgtgggagaaggaggtgcacaaggatagtttttgatcccccggtactacttcttcaatcctaacagagagaacaccaggtgtctgctccagtatgtaaagaccccgcgcagcggaagaacgcagggaaacgaaaaataacataatgcacgcaacggaagatttcaaaaaaatgatggaagaagcaaaatttaatccaagagcaacttttagtgaatttgcagccaagcatgctaaagattcaagattcaaagcaattgaaaagatgaaagacccgagaagccttgtttaatgagtttgtggccgctgctaggaagaaagggaaaggaagattcgaagaccccgagggtgagaagattaaatcggatttctttgaactattatctaatcatcacttggacagtcagtctccgatggagcaaagtaaaagacaaagtagaaagtgatccaccgttacaaagcacgtagatagttcatcaatgagagaagaccttttcaaacagtacattgggaaaaaagccccagaattttagactcccggaaaagaaaaggagcttgaaagggcaagcccgcatttgaggcaagccttccgagaaccgagaaagggaggttcccaaaggcccgttcagaacaaacaaaagaaatagattcgagagagagagcagcacaaacgagaagaagctatccagaatttcaaagctcttctgtctgacatggtactgttcttcagatgtgtcatggtctgatactcgtaggacccctccgaaaagatcaccgctgggaatctggatccttattggaaagagaggagaaagagaagctttttaatgaacacattgaagcacttaccaaaaaaaaagagagagcactttaggcaacttctggatgaaacttctgcaattaccttaacatccacgtgggaaagaagtaaaaaaaatcattaaggaagatcctcgatgtattaagttctcctccagtgacagggaaaaaacaaagaggaatttgaaggaatatattcaggggacaaatatattcacaggcccaaagcttgactttcagggacgcttttgaaagagaccaaatttataacatatagatccaaaaaattaatccaagaatcggatcagcacctgaaagatgtaggaaaaaattttacaggaatgacaaacggtatctaggtactgggactgtgtgccagagggagagggcgttaaacttgattgtggcatatgtttgatgacctggatcgccggggtccacccccacctccccacagcatccggagcccacgaagacgatcaacaaaataattctaaatactcttccatagggggcatctattccaaatgcttgcatgagcccaattttcaggtttttacatatatgtgcattaggtccacctattgcgaaaccatctgacaaacagaaggacgaagcatttgtgaacacgtttctgaacagaacactttgggaaatatttatggcttttctttgtgtggcatgactggacattacatacttcaaatatagggctgtctctaggtaaatctttaaaatcttggaaggctaaaatttatccttttaatgaggtgtggaagtcagtgacttgggtgacgttcttcctagcagtggttaatacatgcaagaagtaaaagcatttgtggcttgaacttgccagatgcaaataccacagactccaagagaacgcgaagtggggtttgttttgttttgattattttttttttaaagcgggtaaaagagaaaacactgaaaattgaattcttatcttccagaggctacaattattataatggacaataccttttaccctttgtcccctaaagatccagattagttttaatttggttccctaacgtgcctttgattatcccccctctgaattatagacccgagtccttgttgtttagccctaagaagaagatttatgtagtaatttcttctcaggtatggaaccacgggtcataactaacatgttggccagaatagaaccactggttaaacatattttattcaccattaagtgatctttatcaatattctggattagacaacaaattaccttttctgggtgtttcttgtaaactatactcctgtttgaatgttaaactttgttgctaaagtttaattttaagatgtttgaatgttcgagtttatgccttctgaactacaataaaccaacccttttatatataaaaaaaaa

SEQ ID NO: 22405 - DNA, 347 bp, Homo sapiens
  SIMILAR (91)..(345): 961254mologous to Homo sapiens syntaxin 5,accession number U26648,Smith-Waterman Score=396.
ggcggcttcagtgctcggggaggaggcagtgacggccggtgagattggaagtggcggcggcggcaggcggcagaggggagtccgaggttatgcgtctcaatgacccgtcagaatggaatccagacaaataagccagctttgcgtgctgtccgacaacgcagtgaattcaccctcatggccaagcgcattgggaaagaccttagcaacacatttgccaagctggagaagctgacaatcttggcaaagcgcaagtccctctttgatgataaagcagtggaaattgaagagctaacatatatcatcaaacaggacatcaatagcctcaacaaacaaattgctcagctcca

SEQ ID NO: 22406 - DNA, 1779 bp, Homo sapiens
  SIMILAR (451)..(1053): 621254mologous to Gallus gallus nuclear calmodulin-binding protein,accession number AF098788,Smith-Waterman Score=633.
atgaacattcagaccatagatacccaaagagtagaccaggattcctacatccagagtcgggcagacaccatgcagaacattgagtcgacaattgttgagttgggctccatctttcagcagttggcacacatggttaaggaacaggaggaaaccattcagagtgattcttcgttatggccgcccgtgtgccttcgactcaatcgggaggacaccgaaatccagatttcggggttgcagggcgcgggccccggcttggttagggcaggggcagccattttgagaccagaagagggcggaagggaccatattgagaacgccggttgcctgggggccgccattttaagagaagccctgtacggtaaactccgtgacgtgggggctgccatgttggtacggccatcttggaatgggagtggctgtgggcgcagccatcttaggtataaaatcggctccagtcgcggtgaagatgaattctcttacggtttcgatggacgaggactcaaggcagaaaatggacaatttgaggaatttggccagacttttggggagaatgatgttattggctgctttgctaattttgagactgaagaagtagaactttccttctccaagaatggagaagacctaggtgtggcattctggatcagcaaggattccctggcagaccgggcccttctaccccatgtcctctgcaaaaattgtgttgtagaattaaacttcggtcagaaggaggagcccttcttcccaccaccagaagagtttgtgttcattcatgctgtgcctgttgaggagcgtgtacgcactgcagtccctcccaagaccatagaggaatgtgaggtgattctgatggtgggactacccggatctggaaagacccagtgggcactgaaatatgcaaaagaaaaccctgagaaaagatacaatgtcctgggagctgagactgtgctcaatcaaatgaggccccgcagcaacactgtaaaagtccattgtcgccctcccatgaaggcaaactgttccaggctctcggtggattgtctcagttccgttgtcaaatggtccattaagtccgtgacagacagcacagctgccgagccatgcaaaacatccgcccccggagtgtcctcagaaaaggctttacacttccgccagctgcagcgggtactttttgaactggaactcttgggcaggaccgggttgcgcagcaatgtccttctcccgaatgacttgcaggactgggcatgcacctcccaccagcacagtcacaaacgcccatctgactctgcggcaaaggcatacttctcggtgctgtgcacttccaggtgcttcagctccttctccacactcatgggagaccagtgcaccgtctcccacgtttccactgggacccatccaagcagcaccactgccaccagatcctgtggtcaaggtccagcccatgctgaagtccgaggggagtgggtgaatgagcagaaagaacactcagggagccgtaggcagatctccctagagcacgaaatcctgctgcacccgcgctacttcggccccaacttgctcaacacggtgaagcagaagctcttcaccgaggtggaggggacctgcacagggaagtatggctttgtaattgctgtcaccaccattgacaatattggtgctggtgtgatccagccaggccgaggctttgtcctttatccagttaagtacaaggccattgttttccggccatttaaaggggaggtcgtggatgctgttgtcactcaggtcaacaagcctcccaagtag

SEQ ID NO: 22407 - DNA, 508 bp, Homo sapiens
  SIMILAR (3)..(260): 981254mologous to Homo sapiens syntaxin 5,accession number U26648,Smith-Waterman Score=417.
tgccccttgcccctaaccacttgggcggtggtgctgtggttttgggggcagagtcccatgcctccaaggatgttgccattgacatgatggactctcggaccagccagcagctgcagctcattgacgagcaggattcctacatccagagtcgggcagacaccatgcagaacattgagtcgacaattgttgagttgggctccatctttcagcagttggcacacatggttaaggaacaggaggaaaccattcagaggtgagatacactctctcgccccaaacagaggagctttctcttccccgtggattggcatcttaaagtccccagggactgcttgatgccttttggaagatagagtgaattctgcccacccatgggacccagttcacctgcttccatccacccaacaagtttttattgagcacctgttcatgtgaggcactgttccaggtgcgggagatacagtggcaagtagaacagtaaagtctgtctggaaatactttgtaaaaa

SEQ ID NO: 22408 - DNA, 2017 bp, Homo sapiens
  SIMILAR (797)..(1402): 481254mologous to Homo sapiens syntaxin 5,accession number U26648,Smith-Waterman Score=335.
  misc_feature (1)...(2017): n = a,t,c or g
ccacggggttggctctggccctgtctctgcttcagggtccccggcccgcgctctggccgccagagcagagttggaagaagagtctgaagcgggttcgacttgggacaggggaaaagcggggccctttccgctgctggtccgccccaggatttgcgagcgtcctgggcgcgaaagtccacgagaagtgcagaaggggctcggggatttgttgattggggtggggcgggggagtttgggtaaagaagttgcctggggaatgacactctcccctccacaacagtccgaggttatgcgtctcaatgatcccgcggaaacgctacgggtctaagaacacggatcagggtgtctacctgggtctctcaaagacacaggtcctgtcccctgcaactgctggcagtagcagcagcgacatcgtcccctctgccccccccagtgaccctcgtccctccccctcccgacaccatgtcctgccgggatcggacccaggagtttctgtctgcctgcaagttcgctgcaagacccgtcaagaatggaattccagacaaattaaggccagcttttgcgttggcttgtccgacaacgcagtgagattcacccttcattggccaagcggcatttggggaaagaccttagcaacacatttgccaagctggagaagctgacaatcttggcgaagcgcgaagcccctctttgatgataaagcaggggaaattgaagagctaacatatatcatcaaacaggacatcaatagccttatcaaacaaattgctcagctccagggatttcgtgagagccaagggcaggccagagtggccggcacctgcagacccactccaacaccattgtgggtctccttgcagtcgaaactgggcttctatgtccaatgacttcaaatcggttttaggaagtgagggacaggggaaccttgaagcaggcagagggagccggaggagaggcagttttcccgggcacctgtgttcagccctgcccctgtcccctacacaccgggccggtggtgcctgtggttctgggggcagagtcccatgcctccaaggatgttcgccatcgacatgatggcactctcggaccagccagcagctgcagctcattgacgagcaggattcctacatccagagtcgggcagacaccatgcagaacattgagtcgacaattgttggagttgggctccatctttcagcagttggcacacatggttaaggaacagggagggaaaccattcagaggatcgacgagaacgtgctaggagcccagctggacgttgagggccgcccattcagagatcctcaagtacttccagtctgtcacctccaaccggtggctcatggacaaaatcttcctcatcctcattgtcttcttcatcatctttgtggtcttccttgcttgaacccctctctactctgaggcactctgttggggtttgggacccttnctggggaaggcaagtggccagtgctgccactgagcctgtgcagggtattggggagaaaggccctgtttccctggaactgctaagaatggacactggcccctgatcccccaccccttgccctctggccacccctgtcctccccccaccaccctcaggcctatgaaacacacagggttcctagatttgaaactctgctgtgaaagtgactgggaagggagcagaggccgagctgggggcccagtgggggaaggtttgtttccactagggagatttttattaaaccctctccagcctctcccggaaaggaagcgttggcagcaaagggagataaatgccccttcccccccttcctgtgagtgaagagaggaagcagccccagggaccaattttcccgaattgacctctttcttcctctttcaccatgtgaggcagggagccctgagcccttcagctgcctgcacaacccctgacattggctgctggtggcgcaatctacacacatgtgcaaaaactcgcccctctcccaatttcagctggactgtcagcctcaaaaaaaaaaaaaaaaaa

SEQ ID NO: 22409 - DNA, 598 bp, Homo sapiens
  SIMILAR (492)..(596): 971254mologous to Homo sapiens PRO1853,accession number AF116671,Smith-Waterman Score=167.
  misc_feature (1)...(598): n = a,t,c or g
ccgctttttttttttttttttttgagggtgttcactcaacttggatctgtgctgaaaaattgtgacatttcagtacatctggtagagggtacagcttttatcttgcacatgaattttttgatgttcttcctgtgcataaatttcagaaaacaccacagggatggcgagaagtatttgttgacattgatccacaggtttctgataaactgaggtttgttttggcaccttctgccaccccagcagaagccttcatacaacatgacgaaacaagggatcatgttgaagtgtgtcctgatgctggtgttatcatcgaggaactttctcaacgcattgcattaactggaggtgctgcactggttgctgattatggtcatgatggaacaaagacagataccttcagagggttttgcgaccacaagcttcatgatgtcttaattgccccaggaacagcagatctaacagctgatgtggacttcagttatttgcgaagaatggcacagggaaaagtagcctctctgggcccaataaaacaacacacatttttaaaaaatatgggtattgatgtccggctgaaagttcttttanataaatcaaatga

SEQ ID NO: 22410 - DNA, 1900 bp, Homo sapiens
  SIMILAR (1098)..(1175): 1001254mologous to Homo sapiens PRO1853,accession number AF116671,Smith-Waterman Score=132.
  misc_feature (1)...(1900): n = a,t,c or g
tgccgctccgggaaatggtctaagccccagctcctggcggagcgagctagcctgcgaatttcagcatgagtgtactgctgaggtcaggtttggggccgttgtgtgccgtggcgcgcgcagccattccttttatttggagagggaaatacttcagctccgggaatgagcctgcagaaaacccggtgacgccgatgctgcggcatcttatgtacaaaataaagtctactggtcccatcactgtggccgagtacatgaaggaggtgttgactaatccagccaagggttattatgtgtaccgtgacatgctaggcgaaaaaggagatttcattacttcacctgaaataagtcaaatctttggggagctactaggtatatggttcattagtgaatggatggccactggaaaaagcacagctttccagctggtggaactgggcccaggtaggggaaccctcgtgggagatattttgagggtgttcactcaacttggatctgtgctgaaaaattgtgacatttcagtacatctggtagaggtaagccaaaaattaagtgagattcaagcattgacactgactaaagagaaggtcccgttagagcgaaatgctggatccccagtgtatatgaaaggtgtcactaagtctgggattccaatttcctggtaaccnaggatctgcacggatggttccaaaagggtacagcttttatcttgcacatgaattttttggatgttcttcctgtgcataaatttcagaaaacaccacagggatggcgagaagtatttgttgacattgatccacaggtttctgataaactgaggtttgttttggcaccttctgccaccccagcagaagccttcatacaacatgacgaaacaagggatcatgttgaagtgtgtcctgatgctggtgttatcatcgaggaactttctcaacgcattgcattaactggaggtgctgcactggttgctgattatggtcatgatggaacaaagacagataccttcagagggttttgcgaccacaagcttcatgatgtcttaattgccccagggnacagcagatctaacagctgatgtggacttcagttatttgcgaagaatggcacagggaaaagtagcctctctgggcccaataaaacaacacacatttttaaaaaatatgggtattgatgtccggngtgaaggttcttttagataaatcaaatgaggccatcagtgaggcagcagttacttcaaggatatgatatgttaatgaatccaaagaagatgggagagagatttaacttttttgccttgctacctcatcagagacttcaaggtggaagatatcagaggaatgcacgtcagtcaaaaccctttgcatccgttgtagctgggtttagtgaacttgcttggcagtgatatttcagcttggacattttacccttcagtcggcccaagaaatcaaaataaaggaaacacatttcatatactgcaggtaacaaaagtcaaagtattttatcttttcacagcaagaacagtccatgttgtatataatacaaccaacattatagaacttttagggttgtgactggctttggtgcaaatgtgtgctcaagctaataagttattgtggaaactgagtttcctttaacttacaaagctagttgccatatttctattttattttaaaaagtaaacatgcggctgggcgtggtggctcatgcctgtaatcccagcactttgggaggctgaggtgggcatatcacctggaggtcagcagttaaagaccagcctgaccaaaatgggagaaaccccatctctactaaaaatncaaaactagccgggtatggtggtcatgcctgtaatcccagctctcaggaggctgagcaggagaatcacttgaacctgggaggtggaggt

SEQ ID NO: 22411 - DNA, 377 bp, Homo sapiens; identical to SEQ ID NO: 17340
  SIMILAR (128)..(376): 651254mologous to multiple sclerosis associated retrovirus polyprotein,accession number AF009668,Smith-Waterman Score=266.

SEQ ID NO: 22412 - DNA, 1429 bp, Homo sapiens
  SIMILAR (230)..(1339): 661254mologous to multiple sclerosis associated retrovirus polyprotein,accession number AF009668,Smith-Waterman Score=1253.
ggaccaagaggaacaggcccaaaaggaaaagcgagatcagaggaaagccacagccttagtcatggccctcagacaaacaaaccctggtggttcagagaggacagaaaatggggcaggtcaatcacctggtagggcttgttatcagtgtggtttactaggacactttaaaaaagattgtccaatgagaaacaagctgccccctcatccatgtccacaatgccgaggcaatcactggaagacattaaaacagttgcgggggttccttggaattactgccttttgccgactatggatccctggatacagtgagatagccaggcccctctatactttaatcaaggaaacccagagggcaaatactcatctagtagaatgggaaccagaggcagaaacagccttcaaaaccttaaagcaggccctagtacaagctccagctttaagccctcccacaggacaaaacttctctttctacatcacagagattgctgggatagcccttggagtccttacactgacttgtgggacaaccccacaaccagtggcatacctaagtaaggaaactgatgtagtagcaaaaggctggcctcactgtttaagggtagttgcagcagtggccgtcttaatgtcagaggctatcaaaataatacaaggaaaggatctcactgtctggactactcatgatgtaaatggcatactaggtgccaaaggaagtttatggctatcagataactgcctacttagataccaggcgctactccttgagggaccggtgcttcaaatatgcatgtgcatggccctcaaccctgccacttttctcccagaggatgggaaaccaatcgagcatgcctgccaacaaattatagtccagacttatgccacccaagatgatctcttagaagtccccttagctaatcctgaccttaacctatatatcaatggaagttcatttgtggagaatgggatacgaagggcaggttacaccatagttagtgatgtaaccatacttgaaagtaagcctcttcccccagggaccagtgcccagttagcagaactagtggcacctacccgagccttagaactgggaaagggaaaaagaataaatgtgtatacagatagcaagtatgcttatctaatcctacatgcctatgctgcaatatggaaagagagggagttcctaacctctggggcaaccaccattaaataccacaaggaaattatagagttattgcacccaatgcaaaaacacaaggaggtggcagtcttacactgccaaagccatcaaaatggggaaggagaggggaaaacagcagcaaaagtggctggcagaagtagggaaagaccagcaagaagtaaagaaaaaaagagaaagtcagagaaagaaaaaaagagaggaagaaacaaagaagaacttgaagagagaaagaagtag

SEQ ID NO: 22413 - DNA, 568 bp, Homo sapiens; identical to SEQ ID NO: 17346
  SIMILAR (22)..(471): 721254mologous to multiple sclerosis associated retrovirus polyprotein,accession number AF009668,Smith-Waterman Score=549.

SEQ ID NO: 22414 - DNA, 1230 bp, Homo sapiens; identical to SEQ ID NO: 12743
  SIMILAR (268)..(1215): 721254mologous to multiple sclerosis associated retrovirus polyprotein,accession number AF009668,Smith-Waterman Score=1180.

SEQ ID NO: 22415 - DNA, 211 bp, Homo sapiens; identical to SEQ ID NO: 17341
  SIMILAR (7)..(162): 681254mologous to Human endogenous retrovirus W polyprotein,accession number AB021921,Smith-Waterman Score=177.

SEQ ID NO: 22416 - DNA, 472 bp, Homo sapiens
  SIMILAR (151)..(471): 681254mologous to multiple sclerosis associated retrovirus polyprotein,accession number AF009668,Smith-Waterman Score=402.
cagcccgagtttggagatacctggtatcttagccaagtaagtgatagaatgacagctgaagaaagggaaaaaatccctaccagtcagcaagccatccccagtatggatccccactggtatcttgactcagatcagggggactggagtcggagggatatattagccaaagctggagccattatctacatgaatatggggagtaaattactcatttgttgtcccctacttgaggagggaatcaaccctgaagtctgggcattggaaggacaatttcgaagggcaaaatatgttcacccagtccaaatcaggctaaaagatcccaccacttttccttgtcaaaggcaatatcccttaaggcctgaagctcataaaggattacaggatattgttaaacatttagaagctgaaggcttagtaaggaaatgcagcagtccctacaacaccccagttctaggaatacaaaaaccaaatg

SEQ ID NO: 22417 - DNA, 393 bp, Homo sapiens
  SIMILAR (78)..(131): 441254mologous to multiple sclerosis associated retrovirus polyprotein,accession number AF009668,Smith-Waterman Score=35.
atgctgaggcaatcactggaaggtgcactgccccagaggatgaagtttccctgggtcagaagcccccaaccagatgatccaacaacaggactgagggtgcctggggaagcaccaactcatgtcatcaccctcactgagccccgggtatgtttaactattgagggccaggaaattgacttcctcctggacactggtgcagccttctccgtggtaatctcctgtcctggacgactgtctcaagaggatgggaagccaatcgagcatgactgccaacaaattgtagtccagacttatgctgcccaagatgatctcttagaagtccccttaactaatcctgagcttaacctatataccgatggaagttcatctgtgaaaatgggatatgaggggcag

SEQ ID NO: 22418 - DNA, 411 bp, Homo sapiens; identical to SEQ ID NO: 10564
  SIMILAR (354)..(410): 471254mologous to multiple sclerosis associated retrovirus polyprotein,accession number AF009668,Smith-Waterman Score=51.

SEQ ID NO: 22419 - DNA, 284 bp, Homo sapiens
  SIMILAR (3)..(122): 801254mologous to HERV-H/env62 envelope protein,accession number AJ289709,Smith-Waterman Score=171.
actctttggcagcagtgactctccaaaaccgccaaggcctagacctcctcactgctgagaaaggaggactctgcaccttctcagggaaagagtgttgtttttacactaaccagtcagggataagttcccctctggaggacactacaactgcagggccctttcttcaccccatccagcaggaagtagctagagctatcatcggccaattcccaacagcatttggggtgtcctgtttagaggggagattgagaggtgaagccagctggacttcctgggtcgagtag

SEQ ID NO: 22420 - DNA, 1449 bp, Homo sapiens; identical to SEQ ID NO: 10129
  SIMILAR (1)..(720): 721254mologous to multiple sclerosis associated retrovirus polyprotein,accession number AF009668,Smith-Waterman Score=924.

SEQ ID NO: 22421 - DNA, 1524 bp, Homo sapiens
  SIMILAR (799)..(1515): 741254mologous to multiple sclerosis associated retrovirus polyprotein,accession number AF009668,Smith-Waterman Score=939.
ctagacacaaaagttctccatgtccccttctccctctctgatttaaagcagatcaaggcagacctggggaagttttcagatgatcctgataggtacaaagatgtcctacagggtctagggcaaacattcgatctcgcttggagagatgtcatgctattgttagatcaaatcctagcctttattgaaaagaatgcagctttagctgcagcccgagagtttggagatacctggtatcttagtcaagtaaatgatagaatgacagccaaagaaagggacaaattccttactggtcagcaagccatccccactatggatccccactgggactttgactcagatcatggggactggagtcataaacatctgttgacctgtgttcttgaaggactaaagggaattaggaaaaagcccatgaattattcaatgatgtccactataactcagggacaagaagaaaagccttctgccttcctcgagcggctaagagaggccttaagaaaatatactcccctgtcacccgaatcactcgagggtcaattgattctaaaagataagtttattacccagtcagctgcagatatcaggagacagctccaaaagcaagccctgggccctgaacaaaatctgcaggaattattaaacctggcaaccttggtgttctataacagggaccaagaggaacaggcccaaaaggaaaagcgagatcagagaaaggctgcagccttagtcagggccctcagacaaacaaaccttggtggttcagagaggacagaatatggagcaggccaatcacccaggagggatatattagccaaagctggagctattatctacatgaatatggggaacaagttacccatttgttgtcccctacttgaggagggaatcaaccctgaagtgtgggcattggaaagacaatttggaagggcaaaaaatgcccgcccagtccaaatcaggctaaaagaccccaccacttttccttatcaaaggcaatatcccttaaggcttgaagctcataaagcattacaggatattgtaaaacatttaaaacctcaaggcttagtaaggaaatgcagcagtccctgcaacaccccagttctaggagtacaaaaaccaaatggtcagtggagattagtgcaagatcttagactcatcaatgaggcagtaattcctgtatatctagttgtagcaaacccctataccctgctctctcaaataccagaggaagcagaatggtttatggttctggacctcaaggatgccttcttctgtattcccctgcactctggctcccagtttctctttgcctttgaggatcccacagaccacatgtcccaacttatgtggatggtcttgccccaagggtttagggatagccctcatctgtttggtgaggcactggcccaagatctaggccacttctcaagtccaggcactctggtccttcagtatatggatgatttacttttggctaccagttgggaagcctcatgccagcaggctactcttgaactttctagctaa

SEQ ID NO: 22422 - DNA, 691 bp, Homo sapiens; identical to SEQ ID NO: 10570
  SIMILAR (56)..(688): 691254mologous to multiple sclerosis associated retrovirus polyprotein,accession number AF009668,Smith-Waterman Score=748.

SEQ ID NO: 22423 - DNA, 397 bp, Homo sapiens
  SIMILAR (203)..(394): 431254mologous to Homo sapiens envelope protein,accession number AF072508,Smith-Waterman Score=117.
gaggtggcagtcttacactgccgaagccatcaaaaaggggaaggagaagggagaacggcagcataagcggctggcagaggcagggaaagaccagcagagagaaagaggcaaagtcaaagacagaaggaaagagaggaagagacaaaggagtcagagagaaagagatagaagtagtaaagaaaaaacagtgcaccctattcctttaaaagccagaatcaaggccatcaaactacagatggtcttacaaacggaaacccaaatgagctcaactaacaacttctaccgaggacccctggaccgacccactggccctttcactggcctagagagttcccctctggaggacactacaactgcagggccccttctttgcccctgtccagcaggaagtagctag

SEQ ID NO: 22424 - DNA, 1586 bp, Homo sapiens
  SIMILAR (694)..(1584): 751254mologous to multiple sclerosis associated retrovirus polyprotein,accession number AF009668,Smith-Waterman Score=1174.
atgacagctgaagaaagggacaaattccctaccagtcagcaagctgtccccagtatggatgcccactgggacctcgactcagatcatggggactggagtcgtaaacatctgttgacctgtgttctagaaggactaaggagaattaggaaaaagcccatgaattattcaatgatgtccaccataactcagggaaaggaagaaaatccttctgccttccttgagcagctacaggaggccttaagaaaatatactcctctgtcacccaactcactagtgggtcaattgatcctaaaagataagtttattacccaatcaaccacagatatcagaagaaagctccaaaatagggaccaagaggaacaggcccaaaaggaaaagcgagatcagagaaaggccatagccttagtcatggccctcagacaaaccttggtggttcaaagaggacagaaaatggagcaggccaatcacctggtggggcttgttaccagtgtggtttgcaaggacaccttaaaaaagattgtccaacgagaaacaagccgccccatcgtccatgtccactatacggaggcaatcactggaagtcacactacccagagggcaaagcttctctgggccagaagcccccaaccagatgatccaatgacaggactgaggatgactgcggcaagcacccgttcatgtcatcaccccctcactgagccctgggtatgtttaatcattgagggccaggaaattgacttcctcctggacactggcacgaccttctcagtgttaatcccctgtcttggacgactgtcctcaaggtccgttaccatccaaggaatcctgggacagcctgtaaccaggtatttctcccacctcctcagttgtaattgggagactttgctcttttcacatgcctttcttgttatgcctgaaagtcccacacccttattagggagggatatattagccaaagctggagctattatctccatgaagacagggaacaagttacccatttgttgtcccctacttgagggaatcaaccctgaagtctgggcattggaaggacaatttggaagggcaaaaaatgcccatccactccaaatcaggctaaaagaccccatcagttttccttatcaaaggcaatatcccttaaggcctgaagctcataaaggattacaggatattgttaaacatttaaaagctcaagactcagtaagaaaatgcagcagtccctgcaacaccccaattctaggagtacaaaaactgaacagtcagtggagactagtgcaagatcttagactcatcaatgaggcagtaattcctctatatccagttgtacgcaacccctatacccttctctctcaagtaccagaggaagcagaatggttcactgttctggacctcaaggatgccttcttctgtattcccctgcactctgactcccagtttctttttgcctttgaggatcccacagaccacacatcccaacttatgtggatggtcttgccccaaaggtttagagatagccctcatctgtttggtcaggcacaggcccaagatctaggccacttctcaagtccaggcactctggtccttca

SEQ ID NO: 22425 - DNA, 1493 bp, Homo sapiens
  SIMILAR (350)..(1246): 751254mologous to multiple sclerosis associated retrovirus polyprotein,accession number AF009668,Smith-Waterman Score=1186.
tagggaccaagaggaacaggcccaaaaggaaaagcgagatcagagaaaggccatagccttagtcatggccctcagacaaaccttggtggttcaaagaggacagaaaatggagcaggccaatcacctggtggggcttgttaccagtgtggtttgcaaggacaccttaaaaaagattgtccaacgagaaacaagccgccccatcgtccatgtccactatacggaggcaatcactggaagtcacactacccagagggcaaagcttctctgggccagaagcccccaaccagatgatccaatgacaggactgaggatgactgcggcaagcacccgttcatgtcatcaccccctcactgagccctgggtatgtttaatcattgagggccaggaaattgacttcctcctggacactggcacgaccttctcagtgttaatcccctgtcttggacgactgtcctcaaggtccgttaccatccaaggaatcctgggacagcctgtaaccaggtatttctcccacctcctcagttgtaattgggagactttgctcttttcacatgcctttcttgttatgcctgaaagtcccacacccttattagggagggatatattagccaaagctggagctattatctccatgaagacagggaacaagttacccatttgttgtcccctacttgagggaatcaaccctgaagtctgggcattggaaggacaatttggaagggcaaaaaatgcccatccactccaaatcaggctaaaagaccccatcagttttccttatcaaaggcaatatcccttaaggcctgaagctcataaaggattacaggatattgttaaacatttaaaagctcaagactcagtaagaaaatgcagcagtccctgcaacaccccaattctaggagtacaaaaactgaacagtcagtggagactagtgcaagatcttagactcatcaatgaggcagtaattcctctatatccagttgtacgcaacccctatacccttctctctcaagtaccagaggaagcagaatggttcactgttctggacctcaaggatgccttcttctgtattcccctgcactctgactcccagtttctttttgcctttgaggatcccacagaccacacatcccaacttatgtggatggtcttgccccaaaggtttagagatagccctcatctgtttggtcaggcacaggcccaagatctaggccacttctcaagtccaggcactctggtccttcaatacagcgagatagccaagaccctctatactctaatcaaggagatggagagggcaaatactcacctagtagaatgggaaccagaggcagaaacagccttcgaaaccttaaagcaggccctagtacaagctccagctttaagccttcccacaggacaaaacttcgctttatatgtcatagagagagcagggatagctcttggagtccttactcagactcacaggacaaccccacaaccagtggcatacctaa

SEQ ID NO: 22426 - DNA, 307 bp, Homo sapiens
  SIMILAR (125)..(301): 741254mologous to multiple sclerosis associated retrovirus protease,accession number AF009666,Smith-Waterman Score=230.
ggatcaagaggaagaggcccaaaaggaaaagcaagatcagagaaaggctgcagcattagtcatggccctcagacaaaccaaccttggtgattcagagaggacagaaaatggagcaggccaatcacttgccgttgagggccaggaaattgacttcctcctggacaatggtgcggctttctcagtgttaatctcctgtcccagacagctgtcctcaaggtccgttaccatccggggaatcctgggacagcctgtaaccaggtatttctcccacctcctcagttgtaattgggagacttttctacagata

SEQ ID NO: 22427 - DNA, 16421 bp, Homo sapiens
  SIMILAR (1802)..(5875): 881254mologous to Homo sapiens IgG Fc binding protein,accession number D84239,Smith-Waterman Score=6697.
ccgttgagggccaggaaattgacttcctcctggacaatggtgcggctttctcagtgttaatctcctgtcccagacagctgtcctcaaggtccgttaccatccggggaatcctgggacagcctgtaaccaggtatttctcccacctcctcagttgtaattgggagacttttctacagataagttcccctctggaggacactacaactgcaggccccttcttcacccctatccaggaggaagtagctagagtggtcatcatccaattcccaacagcaattggggtgtcctgtttagaggggggattgacaggtgaagccaaccgggcttctgagtcagctctaaaaatcagagcgcctctcctcctccaaaggaacgcagctcctcaccagcaacggaactaagctggatggagaatgactttgacgagctgagagaagaaggcttcagacgatcaaattactctgagctacgggaggacattcaaaccaaaggcaaagaaattgaaaactttgaaaaaaatttagaagaatgtataactagaataaccaatacagagaagtgcttaaaggagctgatggagctgaaaaccaaggctcgagaactacatgaagaatgcagaagcctcaggagccgatgcgatcaactggaagaaagggtatcagcgatggaagatgaaatgaatgaaatgaagcgagaagggaagtttagagaaaaaagaataaaaagaaatgagcaaagcctccaagaaatatgggactatgtgaagagaccaaatctacgtctgattggtgtacctgaaagtgatggggagaatggaaccaagttggaaaacactctgcaggcaacaaaagacaaaattgacaaatgggatctcattaaactaaagagcttctgcacagcaaaagaaactaccatcagagtgaacaggcaacctacaaaatgggagaaaattttcgcaacctactcatctgacaaagggctaatatccagaatgtacaacgaactcaaacaaatttacaagaaaaaaacaaccccatcaaaaagtgggcaaaggacatgatctagattatggatttttttatttcaatggaagtgaagttcaaagctttatttttgttccaaactggatatttaactttattggttacagatgccagagtggtacagttcgaacaaactgcttggattgtcttgatagaacaaatagtgtgcaggcatttcttggcttagagatgctagctaaacagttggaagctcttggtttagctgaaaagcctcagttggtgactcgctttcaagaagtttttcggtcaatgtggtccgtgaatggtgattcaatcagtaagatatatgcaggaactggagctcttgaagggaaagcgaaggctggaaagttaaaagatggtgctcgctctgttacccgaacaattcagaataacttctttgacagctccaagcaagaggccattgatgttttgctactgggaaatactctgaatagtgatttagctgacaaagctcgagcacttttaactactggaagtttgcgtgcatcttctaaagtactaaagagcatgtgtgagaatttctacaaatattcaaagcctaagaaaattcgagtatgtgtcggaacctggaatgtgaatggtgggaagcaatttcgcagcatagcttttaagaatcagacactcactgactggcttcttgatgcacccaagttagctggcatccaggagtttcaaggaaagattgcatctttgatctctgcctgggtggtgggaacctgagcattctctgcagcaacatccatgcctacggctctgatcggcaccccctccttgcagccatggagtgccctccgaacagtcactacgagctctgtgcggacacctgctccctgggctgctcagctctcagtgcccctccacagtgccaggatgggtgtgctgagggctgccagtgtgactccggcttcctctacaatggccaagcctgcgtgcccatccagcaatgcggctgctaccacaatggtgtctactatgagccggagcagacagtcctcattgacaactgtcggcagcagtgcacgtgccatgcgggtaaaggcatggtgtgccaggaacacagctgcaagccggggcaggtgtgccagccctccggaggcatcctgagctgcgtcaccaaaggtgctgagctggggttgggcctggggctgatgcgactagggatggaggacaaggactctggggctgagggtggtgtaactggggtgtccatggcgggagacccgtgccacggcgtgacatgccggccacaggagacatgcaaggagcagggtggccagggcgtgtgcctgcccaactatgaggccacgtgctggctgtggggcgacccacactaccactccttcgatggccggaagtttgacttccagggcacctgtaactatgtgctggcaacaactggctgcccgggggtcagcacccagggcctgacacccttcaccgtcaccaccaagaaccagaaccggggcaaccctgctgtgtcctacgtgagagtcgtcaccgtggctgccctcggcaccaacatctccatccacaaggacgagatcggcaaagtccgggtgaacggtgtgctcacagccttgcctgtctctgtggccgacgggcggatttcagtgacccagggtgcatcgaaggcactgctggtggctgactttggactgcaagtcagctatgactggaactggcgggtagacgtgacgctgcccagcagctatcatggcgcagtgtgcgggctctgcggtaacatggaccgcaaccccaacaatgaccaggtcttccctaatggcacactggctccctccatacccatctggggcggcagctggcgagccccaggctgggacccactgtgttgggacgaatgtcgggggtcctgcccaacgtgccctgaggaccggttggagcagtacgagggccctggcttctgcggacccctggcccccggcacagggggccctttcaccacctgccatgctcatgtgccacctgagagcttcttcaagggctgtgttctggacgtctgcatgggtggtggggaccgtgacattctttgcaaggctctggcttcctatgtggccgcctgccaggctgctggggttgtcatcgaagactggcgggcacaggttggctgtgagatcacctgcccagaaaacagccactatgaggtctgtggctcaccctgcccggccagctgtccgtcccctgcaccccttacgacgccagccgtatgtgagggcccctgtgtggagggctgccagtgcgacgcgggtttcgtgttaagtgctgaccgctgtgttcccctcaacaacggctgcggctgctgggccaatggcacctaccacgaggcgggcagtgagttttgggctgatggcacctgctcccagtggtgtcgctgcgggcctgggggtggctcgctggtctgcacacctgccagctgtgggctgggtgaagtgtgtggcctcctgccatccggccagcacggctgccagcccgtcagcacagctgagtgccaggcgtggggtgacccccattacgtcactctggatgggcaccgattcaatttccaaggcacctgcgagtacctgctgagtgcaccctgccacggaccacccttgggggctgagaacttcactgtcactgtagccaatgagcaccggggcagccaggctgtcagctacacccgcagtgtcaccctgcaaatctacaaccacagcctgacactgagtgcccgctggccccggaagctacaggtggacggcgtgttcgtcactctgcccttccagctggactcgctcctgcacgcacacctgagcggcgccgacgtggtggtgaccacaacctcagggctctcgctggctttcgacggggacagcttcgtgcgcctgcgcgtgccggcggcgtacgcgggctctctctgtggcttatgcgggaactacaaccaggaccccgcagacgacctgaaggcggtgggcgggaagcccgccggatggcaggtgggcggcgcccagggctgcggggaatgtgtgtccaagccatgcccgtcgccgtgcaccccagagcagcaagagtccttcggcggcccggacgcctgcggcgtgatctccgccaccgacggcccgctggcgccctgccacggccttgtgccgcccgcgcagtacttccagggctgcttgctggacgcctgccaagttcagggccatcctggaggcctctgtcctgcagtggccacctacgtggcagcctgtcaggccgctggggcccagctccgcgagtggaggcggccggacttctgtcccttccagtgccctgcccacagccactacgagctctgcggtgactcctgtcctgggagctgcccgagcctgtcggcacccgagggctgtgagtcggcctgccgtgaaggctgtgtctgcgatgctggcttcgtgctcagtggtgacacgtgtgtacctgtgggccagtgtggctgcctccacgatgaccgctactacccactgggccagaccttctaccctggccctgggtgtgattccctttgccgctgccgggagggcggtgaggtgtcctgtgagccctccagctgcggcccgcatgagacctgccggccatccggtggcagcttgggctgcgtggccgtgggctctaccacctgccaggcgtcgggagatccccactacaccaccttcgatggccgccgcttcgacttcatgggcacctgcgtgtatgtgctggctcagacctgcggcacccggcctggcctacatcggtttgccgtcctgcaggagaacgtggcctggggtaatgggcgagtcagtgtgaccagggtgatcacggtccaggtggcaaacttcaccctgcggctggagcagagacagtggaaggtcacggtgaacggtgtggacatgaagctgcccgtggtgctggccaacggccagatccgtgcctcccagcatggttcagatgttgtgattgagaccgacttcggcctgcgtgtggcctacgaccttgtgtactatgtgcgggtcaccgtccctggaaactactaccagctgatgtgtggcctgtgtgggaactacaacggcgaccccaaggatgacttccagaagcccaatggctcgcaggcaggcaacgccaatgagttcggcaactcctgggaggaggtggtgcccgactctccctgcctgccgccgcccacctgcccgccggggagcgagggctgtatccccagcgaggagtgtcctcccgagctggagaagaagtatcagaaggaggagttctgtgggctcctctccagccccacagggccactgtcctcttgccacaagctggtggatccccagggtcccttgaaagattgcatctttgatctctgcctgggtggtgggaacctgagcattctctgcagcaacatccatgcctacggctctgatcggcaccccctccttgcagccatggaatgccctcagaacagtcactacgagctctgtgcggacacctgctccctgggctgctcggctctcagtgcccctctgcagtgcccagatgggtgtgctgagggctgccagtgtgactccggcttcctctacaacggccaagcctgcgtgcccatccagcaatgtggctgctaccacaatggtgcctactatgagccggagcagacagtcctcattgacaactgtcggcagcagtgcacgtgccatgtgggtaaagtcgtggtgtgccaggaacacagctgcaagccggggcaggtgtgccagccctccggaggcatcctgagctgcgtcaacaaaggtgacatttgcactggtctgtattctctgggtggtttacggttactcgctggcgtttggtgagggcaacaacttcttcggcaacattaaaacaagtacaatgggcatcgtattgcccgaacagataaagctagcatgccaacggttacggccaagttcgagcaacgtgaaacccagtcgctcagggcgcagattaacggctggaaatggaaaaagaaatactaagccaaccacctgtgttaataagcgagttccccatcaaatctatgcgttaacccggctgaaaacaaaatggccagtggtcgaattgtcccccctgctcaaaataacgcccagtgtttactctgcttcgctgaattttcgggttgatgtaaaacgtctgcaactgcgtgaattacatcaacagagccggggagcagccggcagcagaacactgagtctgctgatgcgtcagtcgggttataacgtggtgcgctggctggcccgcaggctgatgcgggaatgtggtctggcgagtcgccaacccggaaaacctcgttaccgtggcgaacgggaggtgtcactggcatcgccagatttactgaaaaggcagtttaagccgtcggagcccaatcgtgtgtggagtggatatatcagctatatcaaagtcaatggtggctggtgctacctggcactggtgattgacctttactcccgtcggatagtgggcagtgccatatcatcatccccggatgctgagctggtgtgtcgagcctagtacacctccacagacaggaatggcagcagcaacaatgctgtcaatgaaagtaaaggaagcaaccaccaggagagcgaaggaataaatgtgggagccacccagtctgtggtactgtgctatggcagccttagcaaactcatccagatctcttcctgtcctacggtgggctgtccaccttcccacagctccttcagcatcctcgatggggccaatgctggccaagagaagcagagcacgaccgaaccagagcccgcgctcttcctcctgccacccagccgtggagcatttggaccctttgggctgctgtctgatctaagacggcagctctgattccacgagcaaaacacgtagccccttcagagccagatcctgagcaagatgaacagaaactgaggttttgtaaacgccacctttatgggcagcaaccccgatcaccggtggaaatacgtcttcagcacgtcgcaattcgcgtaccaaaccacatcacgcaatatgaattaatttgtttcacttgtataaaccaacacgttgcctcaacccgtgcctcggaatttccaatatccgaggtagcggtggtggggattacaggccggccacctattgctcagcttttttattacgactcccgaggaacccttgactccacagagccttttctacatgtaggatattatgcttaagaagaaagacaccattttggtgtttctaagccccgggcccggagactagaggtgccccgggcccggagacttgaggtgccccgggcccggagactagaggtgccccgggcccggagactagaggtgccccgggcccggagacttgaggtgccccgggcccggagactagagctgttcatcgggactctgctcttcaccatcctgctcttcctcctgcctaccacagccctgtactacctggtgttcaccctggcgcgtctggccgggccggtcctaaatgctcctctgccacagctccggctcctggtggtcgccgtgcagggcctgatccatctgctcgtggacctcatcaactccctgccgctgtactcactgggtcttcggctctgccggccctacaggctggcggcccctgctatccttgcagctggcgtgaagttccgtgtcctccggcacgaggccggcaggcccctccgcctcctgatgcagataaacccactgccctacagccgcgtggtgcacacctaccgcctccccagctgtggctgccaccccaagcactcctggggcgccctgtgccgcaagctgttccttggggagctcatctacccctggaggcagagaggggacaagcaggactgaaacgcgatgctgagttagcgaacggcgccctcggtatcatagagttaaataatgattacacattgaaaaaagtaatgaagccgctgatcacttcaaacacggtaactgatgaaatcgagcgcgcgaatgttttcaaaatgaacggcaaatggtacttgttcactgattcacgcggttcaaaaatgacgatcgatggtattaactcaaacgatatttacatgcttggttatgtatcaaactctttaaccggcccttacaagccgctgaacaaaacagggcttgtgctgcaaatgggtcttgatccaaacgatgtgacattcacttactctcacttcgcagtgccgcaagccaaaggcaacaatgtggttatcacaagctacatgacaaacagaggcttcttcgaggataaaaaggcaacatttgcgccaagcttcttaatgaacatcaaaggcaataaaacatccgttgtcaaaaacagcatcctggagcaaggacagctgacagtcaactaaccatgttactttctttgaccaaagggatgttatcaaacatgtcacaagcaaagagattagaaactgtgtatgctaatgtgggaggaaaaacactgattggccatactccaagatacatcaaaacactccagcagatgtatgggaatgcatccgccctcggactgggtgagatagcagccccagctccaggtggaaaggacagcttactcatcaagggagttacagtgtctgcagcctgtactgagtcagagtatctgagagagggcatctgtcaggatgactgtcaattccagactgtggtatgcgtcctcttgcttccactcttgcctgaacaggttctgcgtctttaacggagccgctggccaatatgtactcatgtgggaaccagaacacactgatggaggagttggcagagcaggcacagcagcacgacgagatgctgcacatgcaccacgcgctgaaggaggcgctcagcatcatcggtgacatcaacaggaccactgtcaccatgcccatgcccccgcccgtggacgacacctggttgcaggtgcagagcatccctgacgcacacaggtaccagagactgccccccacggccccaaaatcccccacccgggatgcccagaggagtgccctgggggcaagtggcacaccccctcaccggggtggctcccacctggagtgacacctctatgcaaataaactagaaaatctagaagaaatggataaattcctcgacacatacaccctcccaagactaaaccaggaagaagttgaatctctgaatagaccaataacaggctctgaaactgtggcaataatcaatagcttaccaaccaaaaagagtccaggaccagatggattcacagctgaattctaccagaggtacaaggaggaactgagaataaagtacctagaaatccaacttacaagggatgtgaaggacctcttcaaggagaactacaaaccactgctcaaggaaataaaagaggacacaaacaaatggaagaacattccatgctcatgggtaagaagaatcaatatcgtgaaaatggccatactgcccaagagaataaaatacctaggaatccaacttacaagggatgtgaaggacctcttcaaggagaactacaaaccactgctcaacgaaataaaagaggacacaaacaaatggaagaacattccatgctcatggataggaagaatcaatatcatgaaaatggccatactgcccaagcacaagcaggacgatatggaagtaaagacagagaaccgtagagggcaacagaaaaaaatggccaaacccatccccgaaaaaggagatataaggaggagacgcctctatcctccaatcggagagctgagcacctccggaggtgagggtttctttttctccagcaggtggttttcgcagagatctgttatatctgaagttccgccagagaaggccactgtcatcactcaccttgacgactgcagacgactcctaacgattcgactgtcagtctttcccacttctaatctagcaatggctcattcaacaaatacctgctgtgtgcctactatgtaaatttccgacgcagaaaacaaacacattttagaactctcaaaccttaccattcaagatagaggagtttattcttgtaaggcttccaacaagtttggagcagacatctgccaagcagagttgatcatcattgataagccacatttcattaaagaattagagcctgtgcagtccgctatcaataagaaggtccaccttgagtgccaagtagatgaagacagaaaagtcacagttacgtggagcaaagatgggcaaaaactccccccagggaaagattataagatctgttttgaagataaaatagcaacacttgagattcctttggccaaactgaaagattcaggaacctatgtctgtacagcttcaaatgaggctggaagcagctcctgctcagccacagtcactgtcagagagccaccatccttcgtgaagaaggtggatccctcttatttaatgctcccaggtgaatcagcacgcctccattgcaagctgaaaggctcacctgtgatccaggttacttggtttaaaaataacaaagaactcagtgaaagtaacacagtccgaatgtattttgtcaattctgaggctatacttgatattacggatgtaaaagttgaagacagtgggagttactcatgtgaagcagtgaatgacgtcggcagtgatagctgcagtactgaaatagttatcaaagaacctccttctttcatcaaaactcttgagcctgcagacatagtgagaggaacaaatgctctacttcagtgtgaagtctcaggcactggaccatttgaaattagctggttcaaagacaagaaacaaattcgaagtagtaaaaaatacagattgttttctcagaagtctcttgtgtgtctggagatcttttcgtttaatagtgcagatgttggtgaatatgaatgtgttgttgctaatgaagtcggcaagtgtggctgcatggcaacccacttactcaaagaacctccaacctttgtaaagaaagtagatgatttgattgcactaggaggacaaaccgttaccctgcaagctgctgtgagagggtcagagcccatttctgtcacatggatgaaaggtcaagaggtcatcagagaagacggaaaaatcaaaatgagcttttccaatggtgttgcagtcttgataatccctgatgttcagattagttttggaggcaaatacacgtgcctggctgaaaatgaagctggaagccaaacatctgttggggaattaatagttaaagaacctgccaaaatcattgagcgagcagaactgatccaggtgacagcaggagatcccgccacactggagtacacagtggcaggcacgccagaactgaagcccaaatggtacaaagatgggagacccttggtcgccagtaaaaaataccgaataagttttaaaaacaatgttgcccagctcaaattttattcagctgagctgcacgacagtggccaatacacatttgagatttccaatgaagtgggcagcagctcctgtgagactacattcactgtattagatcgagacattgctccattttttaccaaacccttgcgcaacgtggatagtgttgttaatggtacctgcagactggactgcaaaattgcaggctccctccccatgagggtgtcctggtttaaggatggcaaagaaatagctgcttctgacagatacaggatagcatttgtggaaggcacagcctctttggagatcatcagagtagacatgaatgatgcagggaatttcacttgtcgagccacaaattccgttgggaagcaaagacagcagtggagccctgattgtgcaagatggtttaagggcaacaaagagctggtttctggtggaagctgctatattaccaaagaagctttagagagttccctggaactctatttagtaaaaacctctgattcgggcacgtacacatgtaaagtcagcaatgtcgctggaggggtggaatgcagtgcaaacttgtttgtaaaagaacctgccacatttgttgaaaagttagagccatcacagctgttaaagaagggagatgccacccagctagcctgcaaagtaactggtacccctccaattaaaataacatggtttgcaaatgatagagaaattaaggagagcagcaaacacagaatgtcttttgtggagtctactgcagttctaagactgacagatgttggcatcgaagacagtggtgaatatatgtgtgaggcccaaaatgaggctggcagtgaccactgcagtagcattgtaatagtcaaagagtcaccttattttaccaaggaatttaagccaattgaagtcttaaaggagtacgatgtcatgttgctggctgaggtggcaggcactcctccctttgagatcacttggttcaaagataacacaatcctgcgaagtggtagaaagtataagactttcattcaggatcatctggttagcctgcagatcctcaagtttgtagctgcagatgctggcgaataccagtgtcgggtgaccaatgaggtgggcagcagcatctgcagtgccagggtgactttaagagaacccccatccttcataaagaagatcgagagtaccagctccctccggggaggcacagctgccttccaggccactctgaagggctccttgccaattacggtgacttggctaaaagacagcgatgaaatcactgaagacgataatataagaatgacctttgagaacaatgtggccagtttgtacctcagtggcattgaagtcaagcatgatgggaaatatgtctgtcaggccaaaaatgatgcaggaatacaaagatgttctgcattactctcagtaaaagaacctgcaacaatcaccgaggaagctgtgtctatagatgtcacccaaggagacccagccactttgcaggttaaattttcagggactaaggagattacagccaaatggtttaaagatggccaagaactgaccctgggctcaaaatataaaatcagtgtcactgatacagtctcaatactgaagattatttctacagaaaagaaagatagtggagaatatactttcgaggtccaaaatgatgttgggaggagcagctgcaaggctagaattaatgtattagatcttatcatacctccttcattcaccaaaaagctgaagaaaatggacagcattaaaggttctttcattgatttagaatgtatagtggctgggtcacatcccataagcatccagtggttcaaagatgaccaagaaatatcagctagtgaaaagtacaaattctcttttcatgacaatactgccttcttggaaatcagccagctggaagaacccccttactttgtggaaaagccacagtcacaagatgtcaatcccaacacaagggtacagttaaaggctcttgtgggtggcactgcacccatgacaataaagtggtttaaagataacaaagagttacactcaggagcagcccgctcagtttggaaggatgacacctctaccagtctagagctctttgcagccaaagctaccgattctggaacctacatttgccaactaagcaatgatgttggcacagcaaccagcaaagccactctctttgtaaaagaacctcctcaattcattaagaagcccagtccagtcttagtgctgaggaatggacagtcaacaacatttgaatgccaaataacaggcactcctaaaatccgagtgtcttggtatctagacgggaatgaaataacagccattcagaaacatggcatttccttcattgatggtttagccactttccagatttctggtgccagggtagaaaatagtgggacttatgtgtgtgaagctcgaaatgacgcaggcacggcgagctgcagcattgaactcaaagtgaaagaaccccccacctttatcagagagctgaagcctgtggaggtagtaaaatatagtgacgtggagctggagtgtgaagttacgggaacacctccgtttgaagtcacttggctgaagaataacagggaaattcgaagcagcaaaaaatacacattgaccgacagagtgtctgtgtttaacctccatataaccaagtgtgacccttcagacactggggaataccagtgcattgtatccaatgaaggcggcagctgctcatgcagtactagagttgccctgaaagaaccaccatcattcattaagaagatagaaaataccactactgttttgaaaagttctgccacctttcagagtaccgtggcaggttctcctcctatttctataacctggctaaaggatgatcagattcttgatgaagatgataatgtctatatttcatttgtggacagtgtggccacacttcaaatcagaagtgtggataatggacacagtgggagatatacctgtcaagccaagaatgagtcaggagttgagaggtgttatgctttccttttagtacaagaaccagctcaaatcgtagagaaagctaaatcagttgatgttacggagaaagatcccatgaccttggaatgtgttgtggctggaacaccagaactcaaagtgaaatggcttaaagacgggaaacaaatagttcccagtagatacttttcaatgagttttgaaaataacgtggccagttttagaattcagtcagtaatgaagcaggacagcggtcagtacactttcaaggtggaaaatgacttcggaagcagtagctgtgatgcctacttaagagtgctagatcaaaatattcctccatcattcaccaaaaaattaaccaaaatggataaagttctgggctcttctattcatatggagtgcaaggtgtctggttcacttcccattagtgctcagtggtttaaggatggaaaagaaatatctacaagtgcaaaatacagacttgtgtgccatgagagatctgtgtctctggaagttaataatctggaattagaagatactgcaaattacacatgcaaagtgtcaaatgtagcaggagatgatgcatgcagtggcatcttaactgtgaaagaaccaccaagcttcctagtgaaacctgggcgacagcaagccatacctgattctacagtggaatttaaggcaatactaaaaggaacaccaccatttaaaataaaatggtttaaggatgatgtggaacttgtctcaggtcctaaatgtttcattggcttggaagggtcgactagcttcttaaatctctactcagtggatgcttctaagactggacagtatacttgccatgttaccaatgatgttggtagcgactcttgtactacgatgttgcttgtgacagaaccaccaaagtttgtaaagaaattagaagcctccaaaattgtgaaagcaggtgactcttcacgacttgaatgcaagatagctggatccccagaaatcagagttgtgtggttccgaaatgaacatgaacttccagccagtgataagtacagaatgactttcattgactcagtggccgtcatacagatgaacaatctcagtactgaggacagtggagatttcatttgtgaggctcagaatcccgctggcagcacaagctgcagtaccaaggttatagtaaaagagccacctgtttttagcagcttccctcctatagtagaaacccttaaaaatgctgaagtcagtcttgaatgtgaactttcgggaacaccaccgtttgaggtggtatggtacaaagacaagcggcaactcagaagcagcaagaaatacaagattgcatccaaaaacttccacacaagtattcacattctcaatgtggacacttcagacatcggtgaataccactgcaaagcacagaatgaagtgggaagtgatacttgtgtttgtactgtaaaattgaaagaaccaccaagatttgtctccaaactgaacagcctcactgttgtagccggagagcctgctgaattacaagcatccatagaaggcgcccagcctatttttgtccagtggcttaaagagaaggaagaagtgattagagaaagtgaaaacatcaggattacatttgtggaaaatgttgcaactctacagtttgcaaaagcagagccagctaatgctggaaagtatatctgccaaatcaagaatgatggtggaatgagggagaacatggccacactgatggtcttagagcccgcagtcattgttgagaaggcaggaccgatgacggtgactgtaggagaaacgtgcactctggagtgtaaggtggctggcactccggaactctctgttgaatggtacaaggatggaaagctgttgaccagcagccaaaaacacaaatttagcttctacaacaaaatctcttccttaaggattctctcagttgaaaggcaagatgcaggcacatacactttccaggttcaaaataatgttgggaaaagcagctgcacagctgtggttgatgtttcag

SEQ ID NO: 22428 - DNA, 536 bp, Homo sapiens
  SIMILAR (33)..(104): 791254mologous to Homo sapiens Human secreted protein, SEQ ID NO: 7678,accession number G03597,Smith-Waterman Score=94.
ttttttttttttttttacttttcagaactgtattaagaactgtaacagtcactgcgagggtctgcggcttcattcttgatgtcagcgagaccaagaatccaccagaaggaaccaattccagacacagaattatttgccttcttacttcctgagagttctaggcacagaacatacttgaggtgttatacaaaggtaattagaactgacagggaattgtatgattaatgacgtgggacatgagagatttggaacgagataaaaaggcttaccttgaggacagccttattaggagcagaggcaaacacaggttttgtgggtttgaagcctacacatttatagctttctctaattacacaggtaggaaattataaaatcaggtacaagggcttggcaggggcctaaagcttaagtgatgaaaaaaaaaaaacaccacacctctggtgaaaccaatagcttacgaaaaagtagaaaaaagcgcgatgcatggggagctccggtagtcctttgaggtatttgagaggctgagtcaggaagat

SEQ ID NO: 22429 - DNA, 1337 bp, Homo sapiens
  SIMILAR (164)..(277): 341254mologous to Murine leukemia virus gag-pol polyprotein,accession number U13766,Smith-Waterman Score=53.
aggaactaactctggacacatcctgggggcttgtctgggattttgccacatggtgagtaccatcggaccactttcactgctattctgtcctatttttccttagaattcaggggctaaacacgctgtagggggaggagaatttggcccaactcgggtacatgtccccttctccctctctgatttaaagcagatcaaggtagacatggggaagttttcagatgatcctgataggtatttagatgtcctacagggtctagggcaaaccttaaaaaagactgtccaacaagaaacaagccacatcctcgtccatgtccgctatgacaaggcaatcactggaaggtgcactgccccagagaacaaaggttctctgagccagaagcccccaaccagatgatccaacaacaggactgagggtgccagctcatgtcatcaccctcactgagccccaggtatgtttaaccattgagggccaggaaattgacttccttctggacactggcacagctttctcagtgttaatctcctgtcctgcctgggggacagggcaagactctgtctcaaaaaaaaatgaaaagaaaaggaaagaaaaggcaaaaggaaatcatcaggcaaatgctgaagccaaaattgctgccaggtggaacccctcattagaaatacctacagaaggacctttggtatggaacaaccccctccaagagattaagccccagtattctctgactgaaacagaatggggactttcacagggtcatagttttctccccttggggtggttaatgacagaagaagtaaaggtacttatacccgaagccagccagtggaaaatacttaaaaccctccaccaaacttttcagatgggtattgaaaacactcaacaaatggccaaatccctatttacagggccaaatctcctctggaccatccgacatgtagtcaaagcctgtgaggtgtgccaaaggaataatcccttggtccatcataaggcccctttgggggaacaaaggataggtcactatcctggagaggactggcaattagacttcactcatatgcctaagtcaaagggatttcaatacttgttggtctgtgttgatacctttacaaattggatagaagctttcccctgcaagatagagaaggctcaggaagtgaataaagttctaattcatgaaacaattcctagatttgggcttccccaaagcttacagagtgacaatgatccggcttttaaagccatgataactcagggaattttccagggcgctaaggatacaatatcaccttcactgtgcctggaggccacaatcctcagggaaggtcgagaaggcaactga

SEQ ID NO: 22430 - DNA, 851 bp, Homo sapiens
  SIMILAR (387)..(578): 671254mologous to multiple sclerosis associated retrovirus element gag polyprotein,accession number AF123881,Smith-Waterman Score=208.
ctgctcttgtgaggacgtggagagtctttatatctagctcagggattgtaaatacaccagtcagcaccctgtgtttagctcaagatttgagtgcaccaatcgaaactctgtatctagctgctccggtgaggacgtggagagtctttatatctagctcagggattgtaaatacaccaatcagcaccctgtgtttagctcaaggaggacaagcaagggtgcaggttttcaacattgcgtcagtaaggaccactaaatccgaccttcctcggtcctccatgtggtctgggaggaaaactagtgtttctgttgctgcgtcagtgagtgcaactattccgatcagcagggtccagggaccgttgcgggttcttggacagggagagaaacaaaacaaaccaaaactgcgggaaacaagcaaagaaatctccaaaggaccacaaaaacccccgggctgtcggttatgtccccttcaatctgtagcaggaggggaatttggcccaacccgggtatatgtccccttctccctctctgatttaaagcagatcaaggcagacctggggaagttttcagatgatcctgatagggaccaagaggaacaggcccaaaaggaaaagcgagatcagagaaaggctgcagccttagtcatggccctcagacaaacaaacctttggtggttcagaaaggacagaaaatggagcaggccaatcacccggtagggcttgttatcagtgtggtttacaaagacattttaaaaaagattgtccaacgagaaacaagccaccccctcatccatgtccgctatgccgaggcaatcactggaaggcgcactgccccggaggacaaaggttctctgg

SEQ ID NO: 22431 - DNA, 1915 bp, Homo sapiens
  SIMILAR (593)..(489): 911254mologous to Homo sapiens Human secreted protein, SEQ ID NO: 7141,accession number G03060,Smith-Waterman Score=173.
cagggcccatatggcccaggttttgacagtttgccttactcccttgggctggggctagccctacctgataccctgtgtcaatgagtgtaccttggagagctatccactcaggccccagtgcctctatttgctaagggactctgccacagaaaagaaggggagagatgttcatgtaacctcaaaatacttaggcttggttttgatgctagagaggaaaaaggacttggagagagagaaggaatggctggtccagaggcttttgtccactccctctcactggaagttggttgatctccagggaatccccaaggttagcctgcttaggggaagggctaggggtacctggaatgtaggatctcccccatgcctggcctaccaccctaatgtgtccggaattggtgggttcttggtctcactgacttcaagaatgaagccatggaccctcacagtgagtgttacagctcttaaggtggtgcgtctggagtttgtttcttctgatgttcggatgtgtttggagtttcttccttctggtgagttcgtggtctcgctggctcaggagtgaagctacagacctttgtggtgagtgttacagctcataaaagcagtgtggacccaaagagtgagcagtagcaagatgtattgcaaagagcgaaagaacaaagcttccacagtgtggaaggggacctgagcgggttgccactgctggctcgggcagcctgcttttattctcttatctggccccacccacatcctgctgattggtagagccgagtggtttgacagggcactgattggtgcgtttacatccctgagctagacacaaggttctccacatccccaccaggttagttagatacagagtgttgacacaaggttctccaaggccccaccagagtagctagatacagagtgtccattggtgcattcacaaacctgagctagacacagggtgctgatggtgtattacaatccctgagctagacataaaggttctccaaggacccatcagagtagctagatacagagctgaagggctcctcaagtgctgccaaagtgggagcccaggcagaggaggtgccgagagtgagcgagcgagtgagggctgtgaggactgccagcatgctgtcacccctcaatcaacaggacaccccaactgctgttgggaatttggccgatgactgctctagctacttcctgctggataggggcgaagaaggggctttgcagttgtagtgtccttcagaggggaactctctaggccaggggaagtgccaggaccagctggtcagtccaggggtcctcggtagaagttgttagttgaactcatttggggttccatttgtaagaccatctgtagcttgatggcctcgatttgcttggcgataggcaatggtctcaccgctcggcaataggtgatggtctcactgctcagcgattgtctcaccgcttggcaataggcgaaagtccttcatggtcgacaaaatgtgtccggaattggtgggttcttgcatccttcatcacttgacttcaagaatgaagccgtggaccctcgcggtgagtgttacaagctcttaaaggtgcgcatctggagtttgttccttctaatgttcagatgtgtttggagtttcttccttctggtgggttcgtggtctcgctggcttaggagtgaaactgcagaccttcgcggtgatgttacagctcttaaggcggcgcgcctggagttgttcattgcgcgcctggagttgttcgttcctcccagtgggcttgtggtctcgctggcttcaggagtgaagctgcagacctttgcggtgagtgttatagctcataaaagcagtgtggacccaaagagtgaacagtagcaagatttattgcaaagagtgaaagaacaaagcttccacagtgtggaagggaattc

SEQ ID NO: 22432 - DNA, 6409 bp, Homo sapiens
  SIMILAR (2910)..(3326): 631254mologous to multiple sclerosis associated retrovirus polyprotein,accession number AF009668,Smith-Waterman Score=439.
atgaacatcgatgcaaaaatcctcaataaaatactggcaaaccgaatccagcagcacatcaaaaagcttatccaccaggatcaagtgggcttcatccctgggatgcaaggctggttcaacatacgcaaatcaagaaacgtaatccagcatataaacagaaccaatgacaaaaaccacatgattatctcaatagatgcagaaaaggcctttgacaaaattcaacaacacttcatgctaaaaactctcaataaattaggtattgacgggatgtatctcaaaataataagagctatctatgacaaacccacagccaatatcatactgaatgggcaaaaactggaagcattccctttgaaaactggcacaagacagggatgccctctctcaccactcctattcaacatagtgttggaagttctggccagggcaatcaggcaggagaaggaaataaagggtattcaattaggaaaagaggaagtcaaattgtccctgtttgcagatgacatgattgtatatctagaaaaccccactgtctcagcccaaaatctccttaagctgataagcaacttcagcaaagtctcaggatacaaaatcaatgtggaaaaatcacaagcattcttatacaccaataacacacaaacagagagccaaatcatgagtgaactcccattcacaattgcttcaaagagaataaaatacctaggaatccaacttacaagggacgtgaaggacctcttcaaggagaactacaaaccactgttcaatgaaataaaagaggatacaaacaaatggaagagaattccatgctcatgggtaggaagaatcaatattgtgaaaatgcccatactgcccaaggtaatttatagattcaatgccatccccatcaagctaccaatgagtttcttcacagaattggaaaaaactactttaaagttcatatggaaccaaaaaagagcccacattgccaagacaatcctaagccaaaagaacaaagctggaggcttcacgctacctcacttcaaactatactacaaggctacagtaaccaaaacagcatgcccgtctttcaaaacaaaagactataatttcatcaaagctgtttgctttgcccttggtcggcttctcagaataatcacctctacagtctgcaacgtgtcttggaaatgtgggctttcccggggttgtaaagcgttacagctactgctagaaggaggcttttcagggcatgccattctgcacatggtttctgagacttttaaatcggagagggagctcaaagaccacgaaatcatacctgttaactttacaggtgaggaaaggaaggctcagaggcactgtggggagccgctgaaagattttaaacagggatgggccaacggggctctctggtctgcggcttcattcctgaagtcagtgagaccacgaacctactggaaggaagaaactccagacacatctgaacatctgaagaaaccaactccagacacatcatctttaagaactgtaacactcactgtgaggttccgcggcttcattcttgaagtcagcgagaccaagaacccaccagaaggaaccaattccagacacattttggcaaccacaaagggactattgactatcgccaagtggaggaaaactagcgtttctgctgctgcgtcagtgagcgcaactattccgatcagcagggtccagggaccgttgcgggttcttgggcaagaggtgtttctgctgcttcatcgcctccctatagctccccttcctattaatgataagcctcctctaatcttccccacccagaaggaaataaacaaagacatctccaagggagcacaacctctcccccacccctgctatcggttatgtccttttcaagctgtatggggaggggaatttggcccaacccgggtacatgtccccttctccttctctgatttaaagcagatcaaggtagacctgggtaagttttcagatatatcctgataggtatatagatgtcccacagggtccagggcaaaccttcaatctcacctggagagatgtcatgctattgctagatcacaccctggcctttaatgaaaagaatgcggctttagctgcagcccgagagtttggagatacctggtatcttagtcaagtaaatgacagaatgacagccgaagaaagggacaaattcccgactggtcagcaagccatccccagtatggatccccactgggaccttgactcagatcatggggactggagtcgcaaacatccgttgacctgtcttccagaaggactaaagggaattaggaaaaagcccatgaattattcaatgatgtccactataactcagggacaagaagaaaagccttctgccttcctcgagcggctaagagaggccttaagaaaatatactcccctgtcacccgaatcactcgagggtcaattgattctaaaagataagtttattacccagtcagctgcagatatcaggagacagctccaaaagcaagccctgggccctgaacaaaatttggaggtattatcaaaacctggcaacctcagtgttctataatagggaccaagaggaacaggcccaaaaggaaaagtgagattggagaaaggccgcagccttagttatggccctcagactaacaaaccttagtggttcagagaggacagaacatgaagcaggccaatcacctggtaaggcttgttatcagtgtggtttactgggacactttaaaaaagattgtccaatgagaaacaagctgccccctcgtccgtgtccactatgctgaggcaatcactggaaggtgcactgccccagaggatgaaggttccctgggtcagaagcccccagccagacgatccaacaacaggactgagggtgcctggggcaagcgccagctcatgtcatcaccctcactgagccccgggtatgtttaactattgagggccaggaaattgacttcctcctggacactggcgcggccttctcagtgttaatctcctgtcctggacgactctcctcaacctccgttaccatccaaggaatcctgggacagcctgtaaccaggtatttctcccacctcctcagttgtaattgggagactttgctcttttcacatgcctttcttcttatgcctgaaagacccacagggttattagggagggatatattagccaaggctggagctattatctacatgaatatggggaacaagttacccatttgttgtccccctacttgtggagggaatcaaccctgaagtctgggcattggaaggacaatttggaagggcaaaaaatgcccgcccattacaaatcaggttaaaagatcccaccacatttccttatcaaaggcaatatcccttaaggcctgaagctcataaaggattacaggatattgttaaacatgtaaaagctcaaggcttagtaaagaaatgcagcagtccctgcaacaccccaattctaggagtacaaaaaccgaacggtcagtggagtctagtgcaagatcttagactcatcagtgaggcagtaattcctctatatccagttgtacccaacccctataccctgctctctcaaataccagaggaagcagaatggtcatgggctctgaccttcaaggatgccttcttctgtattcccctgcattctgactcccagttcctctttgcctttgaggatcccacagaccacacgtcccaacttacagggacggtcttgccccaagggtttagggatagccctcatctatttggtcaggcactggcccaagatctaggccacttctcaaatccaggcactctggtccttcaatatgtggatgatttacttttggctactagttcagaagcctcgtgcgagcaggctactccagatctcttgaactttctaactaatcaagggtacaaggtgtctaggttgaaggcccagctttgcctacaggaggtcaaatatctaggcctaatcttagccagagggaccagggccctcagcaaggaatgaatacagcctatactggcttatcctcaccctaagacattaaaacagttgcgggggttccttgaaatcactggcttttgctgactatggatcccaggatacagcaagatagccaggcccctctatactctaatcaaggagacccagagggcaaatactcatctagttgagtgggaaccagaggcagaaacaaccttcaaaaccttaaagcaggctctagtacaagctccagctttaagccttcccacaggacagaatttctctttatatgtcagagagagagccaggatagctcttggagtcctcactcaaactcatgggacaaccccacaaccagtggcatacctaagtaaggaaattgatgtagtagcaaaaggctggcctcactgtttaagggtagttgcagcagtggccgtcttagcatcagaggctatcaaaataatacaaggaaaggatctcactgtctagactacttatgatgtaaatggcatactaggtgccaaaggaagtttatggctatcagacaactgcctacttagataccaggcactactccttgagggaccagtgcttcaaatatgcacatgcatggccctcaaccctgccacttttctcccagaggatggggaaccaatcaagcatgactgccaacaaattatagtccagacttatgccgcccgagatgatctcttagaagtccccttaactaatcctgaccttaacctatatactgatggaagttcatttgtggagaatgggatacgaaggttagtgatgtaaccatacttgaaagcaagcctcttcccccagggaccagtgcccagttagcggaactagtggcacttacctgggccttagaactgggaaagggaaaaagaataaatgtgtatacagatagcaagtatgcttatctaatcctacatgcccatgctgcaatatggaaagagagggagttcctaacctctgtaggaacccccattaaataccacaaggaaattatagagttattgcacgcaatgcaaaaacacaaagaggtgggaatcttacactgacaaagccatcagaataggaaggagaggggagaacagcagcataagcagctggcagaggcagcagaaaggaaagaaagagacaggaagtcaaagaaagagacagagaggaagagacaagaagttagagagaaagagggacagacacagaagtcaaagagagggtaaaaaagagaggaagagacaaagaagaagtcaaagagagagatggaagtagtaaagaaaaaacagtgtacctattcctttaaaagccagggtaaatttctctctacccacgcaaggcaattctctattggatctcaacccatatctgcctctcaaacagttgaagaaataatgaaatctatccttactttacaatcccaaataagactctttggcagcagtgactctccaaaaccgctgaggcctagatctcctcactgctgaaaaaggaggactctgcaccttcttaggggaagagtgttgtttttacactaaccagtcagggatagcatgagatgccacccagcgtttacaggaaaaggcttctgaaatcagacaacgcctttcaaactcttataccaacctctggagttgggcaacatggcttctcccctttctaggtcccatggcagccatcttgctattactcaccctcaggccctgtatttttaacctacttgtcaaatttgtttcctctagaatcgaggccatcaagctacagatggtcttacaaatggaaccttcaatgagctcaactaacaacttctaccgaggacccctggaccgacccgctggccctttcactggcctaaagagttcccctctggaggacactacaactgcaaagccccttcttcgcccctatccagcaggaagtagctagagcagtcatcggccaaattcccaacagcagttgggggtgtcctgttgattgaggggtgacagcatgctggcagtcctcacagccctcactcgctcgctcactctcggcaactcctcttgcctgggggtcccacttttggcagcattttaggagccccttcagctctgtatctaggctactctgatgggtccttggagaacctttatgtctagctcagggattgtaaatacaccaatcagcaccctgtgtctagctcagggtttgtgaatgcaccaatggacactctgtatctagctactctggtggggccttggagaacctttgtgtcaacactctgtatctaactaacctggtggggatgtggagaacctttgtgtctagctcagggatgtaaacgcaccaatcagtgccctgtcaaaccactcggctctaccaatcagcaggatgtgggtggggccagataagagaataaaagcaggctgcccgagccagcagtggc

SEQ ID NO: 22433 - DNA, 4443 bp, Homo sapiens
  SIMILAR (822)..(1604): 911254mologous to Homo sapiens KIAA1461 protein,accession number AB040894,Smith-Waterman Score=1255.
  misc_feature (1)...(4443): n = a,t,c or g
atttggtatcaagaagccaaatatccttccttcttactgtattcctcacaacactgtggaagagatctgtgaaattgttctgttgcaaaagggctatgatcagccacccaattttgtgcttgaaacccagaaccctgttggcgtaggcactgagagaatctcctggtctgcgggttgcaaagaccatgggaaaagcgcaatatctgggccagaagtcactgttcctcatggcacagcccctcatggcttcccttggctaggggagggaaataccctgaccgcttgtgcttcccaggtgagaatgcaggaagatgcagctctcctaaacaaaagaataagcactcagcctgggctcacagcacttcctgagaatccaaacactacacttccaccttttcaagatacaccttgtgagttgcaaccgaggattgacccatctcttggtcaacaggtgaaggatggcctcgttgtgggtggcccaggtgatgcttccgtagatgccatttacaaagcagttgtcgatgcagccagcaaaggaatgcaggttgtcatcaccactgcagtcaacagtacaactcagatcagccccattccagctctgagtgccatgagtgccttcactgcctcaattggtgacccattaaatctctccagtgctgtcagtgcggtcattcatggacggaacatgggaggtgttgatcatgatggtaggctgaggaattcaagaggggctcggctgcccaagaatctagaccatgggaaaaatgtgaacgaaggagatgggtttgaatatttcaagtcagcaagttgccacacatccaaaaaacagtggggacggggagcaaaggccccaggagggaggccggataaccagggttggaaggtacggagggaatttttaggatcatccaggccatatccacagtagtccttgtcatgaaaggcccaacaatgtctctacactgccatttctgcctggggaacagcacccaatactgttaccaccaagaaactgtccaggggataaaattctagaggaaaatttcaggtataataactacaaaagaactatgatgagttttaaggagagactagagaacactgtggaaagatgtgcacacataaatgggaatagacctcgacagagtcggggatttggagagctgctaagcactgcaaagcaagacctggtcctagaggagcagtctccaagttcctcaaatagtttggaaaattctctggtcaaagactacatccattacaatggagactttaatgccaaaagcgttaatgggtgtgtgcctagcccttcagatgctaaaagcattagtagtgaagatgacctaaggaacccagactccccctcttcaaatgaattgatacattatagaccaaggacgttcaatgttggcgacttggtctggggccaaatcaaaggactgacttcctggcctggaaaattagtaagagaagacgacgttcacaattcatgtcaacaaagccccgaggaagggaaggtggagcccgagaagttgaagacactaacagaaggtttggaagcctacagccgtgtccggaaaaggaacagaaatggtattaaggttccacccaggtcaccaaggtcaacaatagggtccccaaggccatcaatgccatcaagcccttctaccaagtccgatggacatcatcagtacaaggatatccctaacccattaattgctggaataagtaatgtactaaataccccaagcagtgcagcttttcctactgcatctgccggaagtagttctgtaaagagtcagcctggtttgctgggaatgcctttaaatcagatcttgaaccagcacaatgctgcctcctttccagcaagtagtttactctcagcagcagccaaagcacagctaggcaaatcaaaacaaacttgctggtaacaacagtaggcagcagtagcaattctgggagctgttgccggcagtggcaacactggaagggacataggcactttgaaacaccatgtttccctcctactggncaacatggcttctcccaacaggtgaagggcaaagtggtcgagcagcactaagagataagctgatgtctcagcaaaaagacgcattgcggaaaagaaaacaaccacctacgacagtgttgagtttgctcagacagtctcaaatggatagttctgcagttcctaaacctggacctgacttgctaaggaagcagggtcagggttcatttcccatcagttcaatgtctcagttactacagtctatgagttgtcaaagctctcacttgagtagcaatagtaccccgggttgtggggcctcaaatactgctttgccttgctctgctaaccagctgcattttacagatcccagtatgaactctagtgttcttcagaacatacctttaagaggggaagccgtgcactgccacaatgcaaacactaactttgttcacagtaacagtccagtccccaaccaccatcttgcaggtttaataaatcagattcaggctagcgggaactgtgggatgctcagtcagtcgggcatggctttaggaaattccttacatcccaatccacctcagtcaagaatttcaacgtcctccactccagtgataccaaacagcattgttagcagctataatcaaacaagttctgaagcaggcggttcaggaccatcatcctccatagccatagcgggcaccaaccaccctgccatcacaaagacaacatctgttcttcaagatggcgtcatagtcaccactgcagctggaaacccactgcagagtcagctacccattgggagtgattttccttttgttggccaggagcacgcacttcattttccatccaacagcacttcaaacaaccatcttccacaccccttgaaccccagcctcctcagttctctacctatctctttgccagtgaatcaacagcatctcctaaaccagaatctattaaatatcctccagccttcagcaggagaaggcaagtctgagatcaacctccaccctttaggttttctcaacccgaatgtaaacgctgctttagcttttctctccagtgacatggatgggcaggtattgcagcctgttcactttcagctcttagcagccttgcttcagaaccaagcccaagcagctgccatgcttcccctgccatctttcaatctgaccatctcagatcttttgcaacagcaaaatacccctttaccctcattaacacagatgacagccccaccagaccatttgccaagcaatcagtcagacaacagccgagctgagacccttttaaccagccccctggggaaccctttaccaagctttgcaggcagtgacactacttttaaccccctgttcctcccagctgtcaatggggcctcaggattaatgaccttgaatccccagctgttgggaggtgtcctgaactcggcatcggccaacaccgctaatcatccagaggtttccatagcaacctcctcccaggcaaccactaccacaaccactacatcatcagcagtggcagcactgactgtctcaacacttggtgggacagcagtggtgtcaatggcagaaacattgctgaatatatctaataatgctgggaatacacctggtccagctaaactcaacagtaactctgtggtgccacagctacttaaccctctactggggacaggtctacttggtgatatgtcatcaataaacaatactttgagtaaccatcaactgactcatctacagtcgctgttaaacaacaatcagatgtttcctccaaatcagcaacagcagcaacttctccaggggtaccagaatctccaggcgttccaaggacagtccacaattccttgcccagctaacaataaccccatggcttgtctgtttcagaactttcagatacaaacaccgcggtgttatggaggaggatacaccacccacgcacgttgtgaaggtccagcaggaggactcggaggaagcttccgtgctgtgggacactctggaatctgggccagatcaccaagaactgttccccagccagaagcacctgaacactctcagctcttccacacggaactgcaggataaagcaactctgatttttccagagaggcacatggaaatgagcttcaggtgtctgtggttgactctgaagaaagggagtggaaatgaagctccccttaccctgagaaggaggccgacagccgtccatggaggagaagctgccttcccccacggccacatctcccttcaggaaggtgagctactccaagtgcccatgtccttccaagggaagaaaccagtggctcccacgcatgggcctcatgggaacctcaccccacccccggcatcccagctgtggtttctcccaccagacctctttctgcagcccaggagagacactgacttgggaacctccaaggcttccacatactactga

SEQ ID NO: 22434 - DNA, 501 bp, Homo sapiens
  SIMILAR (307)..(501): 781254mologous to Caenorhabditis elegans highly similar to Pisum sativum turgor responsive protein and other aldehyde dehydrogenases,accession number U13070,Smith-Waterman Score=275.
cgccttcctcgcgcgctgtgtgtgcacgctgcaaagaccagcaagctctctggaccttggagcaggcctgccgccttcatgtccactctcctcatcaatcagccccagtatgcgtggctgaaagagctggggctccgcgaggaaaacgagggcgtgtataatggaagctggggaggccggggagaggttattacgacctattgccctgctaacaacgagccaatagcaagagtccgacaggccagtgtggcagactatgaagaaactgtaaagaaagcaagagaagcatggaaaatctgggcagatgtgtctttggagatggggaaaatcttagtggaaggtgtgggtgaagttcaggagtatgtggatatctgtgactatgctgttggtttatcaaggatgattggaggacctatcttgccttctgaaagatctggccatgcactgattgagcagtggaatcccgtaggcctggttggaatcatcacggcattcaatttc

SEQ ID NO: 22435 - DNA, 2276 bp, Homo sapiens
  SIMILAR (1931)..(2041): 1001254mologous to Homo sapiens antiquitin=26g turgor protein homolog,accession number S74728,Smith-Waterman Score=201.
tttttttttttttttttagtaactatggcctatgttggacaaatttaatttggatttttaaaaaaggaatctcttgatttaatcagggctttggggtcatagggggattagtcactgtcacagtcataataatgcatttattcagggaaaacttttatttttctttgtcttctccaaaaacaagctgctggaacaccctcaaattaaggggatgttcatctaaaaacacctttactgaaacttgatttccttggggcccagagggaaggtctttaactgtagttgaatagtaccaagtagaccttcctcatgtactgtttccccagcatcactgcccagactcccttgccaccaccaagtgtgctttttctcctccaaagggcacctcccaatctcaggccccacttggttgggaatggttgacattttacaatggccacaggtctgagtccctttaaggtccaaggccagcgaaaagattctgcccccagatctttgggtaaagaatgctaacttgaaagtcccctgttttacttccattattcccatgcaaagacctcttcttcattcttgaagtttaaagacatagagaatcgggagcaaaagtctctgtgtgtgcaatggacgcatcgtggtcgagtactggtaacattggtcggttctacataaatttccagggcgatccataaccttgcccccatagacccactgtgccaacctttctttctttgcttcttccactgctccaagaaacatgctcaactgcctgccttggtgtgaaatggccccatagagaacattagggtccccatgggttccccaactcgggatcttgtgccataggccctttttaaagtctgtttaaaaacctcatcatggatgctttccatgtaataaaacagtcgccctcgcaagtggtacacctctggcccagctgttccccacagcaagcgaagagagctgatggaacaactaagctgaggtctgcatcttcaaaggcaataatggcattgtttcctccaagttccaacagacttctccaattttgatagtgtcttcccaaacctctcctgcaccatcaggcccacctgttttcccacctgagtgctcccagtgaaggacagcaggttcactcgttcatctttggccattgctgtgccaatatctgctccaccacaagtcaaggaacaaattgcaccaggcagctttgttgtccttccagaaccttggctattatctttgtgacagccacactaatgagggaagtggttggagctcctttccagaggcagacatttccacagatcatggcgatggcgttgttccaaccatacactgccacagggaaattgaatgccgtgatgattccaaccaggcctacgggattccactgctcaatcagtgcatggccagatctttcagaaggcaagataggtcctccaatcatccttgataaaccaacagcatagtcacagatatccacatactcctgaacttcacccacaccttccagtaagattttcccccaatcttccaaaggacaccaaggtttcctaagtaacttggaatcttcttcccgcaaggcatcggccaatctgtcttactaatttctccttcggttttggagcagggaatatctgcccagattttccatgcttctcttgctttctttacagtttcttcatagtctgccacacatggcctgtcggactcttgctattggctcgttgttagcagggcaataggtcgtaataacctctccccggcctccccagcttccattatacacgccctcgttttcctcgcggagccccagctctttcagccacgcatactggggctgattgatgaggagagtggacatgaaggcggcaggcctgctgcaaagaccagaaagctctctggaccttggagcaggcctgccgccttcatgtccactctcctcatcaatcagccccagtatgcgtggctgaaagagctggggctccgcgaggaaaacgagggcgtgtataatggaagctggggaggccggggagaggtacgcgggcgctcaagaaatctctgcagccgccggggctcgctcgaggaggccgggcgggcactgacctaccgactccccgctggcgctggatgcggtagtagcatgggagattttgaagctccacagtaaaagttttctcgtgtagggtgcctttaaaacaaaaacttagattttaggtccttgtgtgctatgcagaatcgacgtcattttggagctgtaggggctaaacttcccg

SEQ ID NO: 22436 - DNA, 1434 bp, Homo sapiens; identical to SEQ ID NO: 18234
  SIMILAR (637)..(1356): 851254mologous to Escherichia coli ATP-dependent helicase HrpA homolog,accession number D90780,Smith-Waterman Score=1008.
  misc_feature (1)...(1434): n = a,t,c or g

SEQ ID NO: 22437 - DNA, 1185 bp, Homo sapiens
  SIMILAR (1)..(705): 751254mologous to Escherichia coli leucyl-tRNA synthetase,accession number X06331,Smith-Waterman Score=869.
atggtgaactctgacgaaccagcgaaacagttgctgtgtcagggtatggtgctggcagatgccttctactatgttggcgaaaacggcgaacgtaactgggtttccccggttgatgctatcgttgaacgtgacgagaaaggccgtatcgtgaaagcgaaagatgcggcaggccatgaactggtttataccggcatgagcaaaatgtccaagtcgaagaacaacggtatcgacccgcaggtgatggttgaacgttacggcgcggacaccgttcgtctgtttatgatgtttgcttctccggctgatatgactctcgaatggcaggaatccggtgtggaaggggctaaccgcttcctgaaacgtgtctggaaactggtttacgagcacacagcaaaaggtgatgttgcggcactgaacgttgatgcgctgactgaaaatcagaaagcgctgcgtcgcgatgtgcataaaacgatcgctaaagtgaccgatgatatcgggccacggtcaatgctgacttggaaaattcgcgggattcctgcggacttagaagaccgccgcgtagagataactggcccggtagagcgcaagatggtgatcaacgcgctcaacgccaatgtgaaagtctttatggccgatttcgaagattcactggcactcagagctggaacaaaagccgccggagtcggtgaggatcggccccttccactgcataaaatcgtgcagatcgccgtgcagtttcatgatttcctggcccgggcgcagccacagcacatcgccaagcgggctgaacccgggccggacccggcactgacctccacatgtgggctccgctcgccgcacccacacggcgccactgaccgtatccgaggcgaggaccgacgcgccgcggcgaccgcgaaacccgcggcagccggcggcaacgccaccgagggcagcgcgtccggggcgcgagccaggcgcgcgatcgagcggaaagcgccgggccggcacgccgcgacggagacggccgacgacgcggcggccgcccccgaccagcggctcggggagggccaaggcacaccggattactgcttcatcgtcataggcagtattctcatgtcgtcgttgggcatcgatctatctggacaaaacacaaccgtcctgcatctgcagagagattctgtggtatttgacgactgtcggcagtga

SEQ ID NO: 22438 - DNA, 2452 bp, Homo sapiens
  SIMILAR (62)..(994): 911254mologous to synthetic construct aceB,accession number A31765,Smith-Waterman Score=1487.
ggccaagcttgccatgcctccagttcgcctttaaaaggatcaaggggttcaccgcccaattttgaaattctttatggccccattttcgaagattcactggccccagattgaccaaaagtgatcgccgggcaaaattaccctgcgtgatgcggttaccggccccatcagttcccccaatgaagcaggcaaaatttaccagctcaagcccaatccagcggttttgatttgtcgggtacgcggtctgcacttgccggaaaaacatgtcacctggcgtggtgaggcaatccccggcagcctgtttgattttgcgctctatttcttccacaactatcaggcactgttggcaaagggcagtggtccctatttctatctgccgaaaacccagtcctggcaggaagcggcctggtggagcgaagtcttcagctatgcagaagatcgctttaatctgccgcgcggcaccatcaaggcgacgttgctgattgaaacgctgcccgccgtgttccagatggatgaaatccttcacgcgctgcgtgaccatattgttggtctgaactgcggtcgttgggattacatcttcagctatatcaaaacgttgaaaaactatcccgatcgcgtcctgccagacagacaggcagtgacgatggataaaccattcctgaatgcttactcacgcctgttgattaaaacctgccataaacgcggtgcttttgcgatgggcggcatggcggcgtttattccgagcaaagatgaagagcacaataaccaggtgctcaacaaagtaaaagcggataaatcgctggaagccaataacggtcacgatggcacatggatcgctcacccaggccttgcggacacggcaatggcggtattcaacgacattctcggctcccggaaaaatcagcttgaagtgatgcgcgaacaacacgcgccgattactgccgatcagctgctggcaccttgtgatggtgaacgcaccgaaagaaaattcaatgcattaatggaaagtgaaaaaggacagagccagaacttgtggaaatttgccgtttactcaggacttcgtcacggggaactggcagctctggcgtgggaggatgtggatctcgaaaagggaatagtgaatgtcagaagaaacctgacgatacttgatatgttcggtcccccaaaaacaaatgccgggatccgaacagtaacactactgcagcctgctcttgaagcactgaaggagcaatacaaactgaccgggcatcatcgcaaaagcgaaatcaccttttatcatcgggagtacggcagaaccgaaaagcaaaaactgcattttgttttcatgcccagggtgtgtaacggaaaacaaaaaccttattactcggtaagcagtttgggggcaaggtggaatgcagcagtaaaacgtgctggtattcgccgccgtaatccgtaccatacgcggcatacttttgcctgctggctgttgacggcaggagcgaacccggcatttatagccagccaaatggggcatgagactgcgcagatggtgtatgaaatctacgggatgtggattgatgacatgagcgacgaacagatagccatgttgaatgcgcgggttatggtttatgacgtggcttccggcaacgcgttatttatttctgaactcggtccgttaccggaaaatgttacctggttatcgccggaaggggagtttcagaagtggaacggcacagcctgggtgaaggatacggaagcagaaaaactgttccggatccgggaggcggaagaaacaaaaaacaacctgatgcaggtagccagtgagcatattgcgccgcttcaggatgctgcagatctggaaattgcaacggaggaagaaatctcgttgctggaagcatggaaaaagtatcggagcatcccactgtgctctaaggtggttacaatgatgtttgatgaccgccctggatgcccagtgggatttccaatgtggggaagaggtggttttgacagaatgcctcctggttggggtgggcgtcccatgcctccatctagaagagatatgagccctcatcgaggaccacctcctcctcttactggacgaggtggccggggtggtagcagagctcggaatcttcctcttcctccaccaccaccacctataggggaagacctaatggcctatgacagaagagggagacctggagactgttactatggcatggttggtttcagtcctgatgaaacttggaactctgcaatagatacatggagcccatcggaatggcagatggcttatgaaccacagggtggctccggatatgattattcctatgcagggattgggggctcatatggagatcttggtggacctattactactgcccaagtcactattcccaaagatttgactggatctattattggcaaacgtggtcagcggattaaacaaatgctcatgagttggcagctttcataa

SEQ ID NO: 22439 - DNA, 2181 bp, Homo sapiens
  SIMILAR (208)..(804): 441254mologous to synthetic construct aceB,accession number A31765,Smith-Waterman Score=296.
atgattcccaacgttcaaggacccatgaggggactagaaggtccaaactatatctttatcaaaatttctaaaaatcggcgctatacgatggcagttacctccgtggggttagcttcctcgttgtgccgggtagttcgcccgtgtcgtgcgcccgcgggtgttgtctcccgtggttctccggacgatgagtggctcttttgcccccaagcgcgcattcagcagcagcaagatattgatacggaacgttgcctgattttatttcggaaacagcttccattcgcgatgctattggaaaattcgcgggattcctgcggacttagaagaccgccgcgtagaataactggcccggtagagcgcaagatggtgatcaacgcgctcaacgccattctttatggccgatttcgaagattcactggcaccagactggacaaagtgatcgacgggcaaattaacctgcgtgatgcggttaacggcacatcagttacaccaatgaagcaggcaaaatttaccagctcaagcccaatcagcggttttgatttgtcgggtacgcggtctgcacttgccggaaaaacattcacctggcgtggtgaggcaatccccggcagcctgtttgatttagcgcttatttcttccacaactatcaggcactgttggcaaagggcagtggtcccttttctatctgccgaaaacccagtcctggcaggaagcggcctggtggagcaagtcttcagctatgcagaagatcgctttaatctgccgcgcggcaccataaggcgacgttgctggattgaacgctggccggcgggttccagatggttgatccttcagcgctgggtggctgaactgggccgtgggatcatctacggtatatcaaagttgaaaatatcccgaaggtcggcgaagaaggagacgcggaaaccaccggagggacagcggtataaccgtcgccgcgggagaaagacgacacagaacaccgaaaagcacaccatggcgaaaaagagacgcgaagcagcggaacccccagaagggaaaaccccacgagtcagaacaagtctccttacctctggcctgtctgtgggtatagtctgtgagccttttaatcggcatcactttccgcctcatgtacattcttcgtctagcactgctcggtccccctttaccctattcgccctctctccagaccgccttcgtaactggcttaatttattcattaagtaccgctccccaagtcagttgtccccttggtttttccttatttatttcccgcccctccttaccagcgtaagtcacaagtttctggccacttcgggtagctgccaaataagcttaagtaatattcagccattgggtaataactataaccagtacatacgatgtcgacagcggtgccgcttcctctacgcgccagctccctttcgtgtcgcagtacctgccggcacggcattacgcattggggcgtatacgacggtcatataccaattcgttgccgccggtttccgcaccttcaccatctcctcatggcggggcaagcctcccgtgccttgtctactgggcggtaacgtcggtgtgcacaagtttcaagtatgtcccccggcccccctcaagcatctactcgggtgcacactctctctggtgtccccgccctcggtccgtcgcaaatcaatgtgcctaaccatccggactctcggcaagctccacattcttgacagttctaaatcggcgctatacgatggcagtagtcagttagcagtgcagaaaacatattgtacgccaccctcttctttgtacttctcccgagccccacatttgtactccttttcagtccagccctcccctgcattctggggtcgcggtatcaacccacatattcacctttcttttgctacccgtagccgtcgggcgtggccgtcgttttattcgcctagctatcgccgtcatcttgcgagcagtagccgcggtcgtaggccagcagccgtggccagtgcccatcacctcaataacaaggcccccgcatttggcgtcattgcaagtgcatctctgccagcggtcagtaaaccagcggtttggcgttccctcttttttgtgtactcgcagtttactgttgtttttattactcagcactctgttcgccttcgccggtccgcctgttgtgccgcttctactgtcgttacatccccgtag

SEQ ID NO: 22440 - DNA, 393 bp, Homo sapiens; identical to SEQ ID NO: 20309
  SIMILAR (14)..(391): 851254mologous to Homo sapiens bridging integrator- 2,accession number AF146531,Smith-Waterman Score=545.

SEQ ID NO: 22441 - DNA, 1827 bp, Homo sapiens; identical to SEQ ID NO: 20310
  SIMILAR (7)..(1116): 931254mologous to Cloning vector pSacBII SacB,accession number U09128,Smith-Waterman Score=1799.
  misc_feature (1)...(1827): n = a,t,c or g

SEQ ID NO: 22442 - DNA, 326 bp, Homo sapiens; identical to SEQ ID NO: 12993
  SIMILAR (11)..(118): 971254mologous to Homo sapiens bridging integrator- 2,accession number AF146531,Smith-Waterman Score=171.
  misc_feature (1)...(326): n = a,t,c or g

SEQ ID NO: 22443 - DNA, 902 bp, Homo sapiens; identical to SEQ ID NO: 20311
  SIMILAR (102)..(770): 981254mologous to Cloning vector pZC320 SopA,accession number U26464,Smith-Waterman Score=1158.

SEQ ID NO: 22444 - DNA, 2037 bp, Homo sapiens
  SIMILAR (1459)..(2022): 981254mologous to Cloning vector pBACe3.6 levansucrase,accession number U80929,Smith-Waterman Score=980.
atgagcaaactgaaccacaatctctccgaggtgatgagcaaactggagaagcaacattccagtaaagtctttgtggtgaagagactatcaagcagcagcaggcgctctttagtcatttctcccccagttcgaacatctacagtctccagtccacttacctcacctactagtccctctacactttcctcgaagagtaagagtgaatctgtctcagcaactgaagatctggcacctgatgcagcccagggggaagacaattctgagatcaaggagctcttagaagatgaggaaatagggaaggaaggatctgaagcaagctcctctgaggaagaagagcctctactaacctgcaacggcccctcccaggcccagccctctcctatcattgagagtgccaggtcccaggaagaagttccccccagctcccctgctctatcaccaggtggagccctaagcccttcaggacaccctttatcatctgccgcagaagtagtcctccgaacccgcaccgcaggtgatgcacttcaaaaagcctttacagataaagaggaattacttaagcagcaggcatctaaccttcatgagcagaaaaaagctggggtgatatttgaagctgaagaagttatcactcttttaacttctgtgcttaaaacgtcatctgcatcaagaactagtttaagctcacgacatcagtttgctcctggagcgacagtattgtataagggcgataaaagggtgcttaacctggacagtccctcttcgcgcctgcgcacgcaccgccctctcccgaagccccgccccggtcaccgccccgaggctgtcccggacggttgggtccagaggagcctttccttcactggcccgcctgctatgacgatcatgtacagctgcattgctaatggccgagcggtcctagcggagctgacactgactggaggttcttaccaggtacctccggatccacgccaccgcccccacgggttccgcccctcgagggtggtgccccccgagcccgcccctaaggacgcggcgctgcgaggtggtccggaacctgctcgggggacacaagctcccgccccgcgagagatcccgcccccacgagagaccccgcccccgcaagaggccccgccccagcgagaggctggcgtcccggcggctgccgcacttcgaacatctacagtctccagtccacttacctcacctactagtccctctacactttcctcgaagagtaagagtgaatctgtctcagcaactgaagatctggcgcctgatgcagcccagggggaagacaattctgagatcaaggagctcttagaagatgaggaaatagggaaggaaggatctgaagcaagctcctctgaggaagaagagcctctactaacctgcaacggcccctcccaggcccagccctctcctatcattgagagtgccaggagtttatcgatgaagaaaaccacctccggcgacaaccatacgctgagagaccctcactacgttgaagacaaaggccataaataccttgtattcgaagccaacacgggaacagaaaacggataccaaggcgaagaatctttatttaacaaagcgtactacggcggcggcacgaacttggtgcgtaaagaaagccagaagcttcagcagagcgctaaaaaacgcgatgctgagttagcgaacggcgccctcggtatcatagagttaaataatgattacacattgaaaaaagtaatgaagccgctgatcacttcaaacacggtaactgatgaaatcgagcgcgcgaatgttttcaaaatgaacggcaaatggtacttgttcactgattcacgcggttcaaaaatgacgatcgatggtattaactcaaacgatatttacatgcttggttatgtatcaaactctttaaccggcccttacaagccgctgaacaaaacagggcttgtgctgcaaatgggtcttgatccaaacgatgtgacattcacttactctcacttcgcagtgccgcaagccaaaggcaacaatgtggttcaaggggccaactga

SEQ ID NO: 22445 - DNA, 876 bp, Homo sapiens
  SIMILAR (208)..(702): 861254mologous to Homo sapiens breast cancer associated protein BRAP1,accession number AB032698,Smith-Waterman Score=677.
ctcgaggacaaaacacgcgtgcgcgcggcgggcgagcgcgctcgccgcctcagtcgccagcgccgggcgcagtccgcctttttccggagcagactggccgcggtgctagtcggtagcagcggccgccgcagcggctccgcactggcgaaccgagggcagaaaaaggcggggttgacggctttttggggaaatgagcaaactgaacccaatctctccgaggtgatgagcaaactggagaagcaacattccagtaaagtctttgtggtgaagagactatcaagcagcagcaggcgctctttagtcatttctcccccagttcgaacatctacagtctccagtccacttacctcacctactagtccctctacactttcctcgaagagtaagagtgaatctgtctcagcaactgaagatctggcacctgatgcagcccagggggaagacaattctgagatcaaggagctcttagaagatgaggaaatagggaaggaaggatctgaagcaagctcctctgaggaagaagagcctctactaacctgcaacggcccctcccaggcccagccctctcctatcattgagagtgccaggtcccaggaagaagttccccccagctcccctgctctatcaccaggtggagccctaagcccttcaggacaccctttatcatctgccgcagaagtagtcctccgaacccgcaccgcagtgccgcaagccaaaggcaacaatgtggttatcacaagctacatgacaaacagaggcttcttcgaggataaaaaggcaacatttgcgccaagcttcttaatgaacatcaaaggcaataaaacatccgttgtcaaaaacagcatcctggagcaaggacagctgacagtcaactaa

SEQ ID NO: 22446 - DNA, 1893 bp, Homo sapiens; identical to SEQ ID NO: 20313
  SIMILAR (1)..(753): 881254mologous to Escherichia coli O157:H7 ATP-binding component of D-ribose high-affinity transport system,accession number AE005606,Smith-Waterman Score=1103.

SEQ ID NO: 22447 - DNA, 1497 bp, Homo sapiens
  SIMILAR (29)..(1165): 531254mologous to Homo sapiens breast cancer associated protein BRAP1,accession number AB032698,Smith-Waterman Score=894.
  misc_feature (1)...(1497): n = a,t,c or g
actatcggtcttcccacgcgtccggaactttacaacacaggcagaatgccacagctgttcaaggtcctgaagaacttccttattgcagggggaggggtgcatgaaagttcaaaaagagcgtcataaaccctgcagtttatctactattagcgagtggtacggccatgaggagctgaaggccatcgtatggaataatgatctcctttgggaagactacgaggagaaactggctgaccaggctgtaaggaccatggaaatctatgttgcccagttcagtgaaattaaggagagaattgccaagcggggtcggaaactcgtggactatgacagtgcccgacaccacctggaggcagtgcagaatgccacgaagaaagatgaggccaagactgccaaggcagaggaagagttcaacaaagcccagactgtgtttgaagatctgaaccaagaactactagaggagctgcctattctttataatagtcgtattggctgctatgtgaccatcttccaaaacatttccaacttgagggatgtcttctacagggaaatgagcaagctgaaccacaatctctacgaggtgatgagcaaactggagaagcaacattccaataaagtctttgtggtgaagggactgtcaagtccctctacactttccttgaagagtgagagtgaatctgtctcagcaactgaagatctggcacctgatgcagcccaaggggaagacaattctgagatcaaggagctcttagaagaggaggaaatagagaaggaaggatctgaagcaagctcctctgaggaagatgagcctctaccagcctgcaatggccccgcccaggcccagccctctcctaccactgaaagggccaagtcccaggaggaagttctccccagctccacaactccatcaccaggcggagccctgagcccttcagggcagccttcatcatctgccacagaagtagtcctccgaacccgcaccgcaagtgaaggatctgaacaaccaaagaagagagcctctatccagaggacctcagcaccccctaaaccaccagagaagccagtaagaactcctgaggccaaagaaaatgaaaacatccacaatcagaaccctgaagaactttgtacttcccccaccttaatgacatctcaggttgcttcagagcctggagaggcaaagaagatggaagacaaggaaaaggataataagcttatctcagctaactcctcggagaagtatatctttcagaggccttcagtcttgattcacatgaagcactgagggccctaacagagcaagatgtaaaacttgnnnnnnnnnnnnnnnnnnnnnnnnnnnnnnnnnnnnnnnnnnnnnnnnnnnnnnnnnnnnnnnnnncccagatgcattataaatcatattttctctcaggcagaattatggacatgtcacatgtaaagatggggccaagaccagcttcaagtctccatggtaccagaaaacaacaacctcacagcacc

SEQ ID NO: 22448 - DNA, 2111 bp, Homo sapiens
  SIMILAR (88)..(438): 971254mologous to Homo sapiens breast cancer associated protein BRAP1,accession number AB032698,Smith-Waterman Score=585.
atgccgggagcccgcacttcctcctcgggggcctcagaaaaccacagggcgcggggccagggcggcggcccccagggagttggcaggatggcagagggcaaggcaggcggcgcggccggcctcttcgccaagcaggtgcagaagaagtttagcagggcccaggagaaggcgctgtagaaattggggaaagctgttgaaaccaaagatgaacgatttgaacaaagcgctagcaacttctaccaacaacaggcagaaggccacaagctgtacaaggacctgaagaacttccttagtgcagtcaaagtgatgcatgaaagttcaaaaagagtgtcagaaaccctgcaggagatctacagcagcgagtgggacggtcatgaggagctgaaggccatcgtatggaataatgatctcctttgggaagactacgaggagaaacttgtctgaccaggctgtaaggaccatggaaatctatgttgcccagttcagtgaaattaaggagaagaattgccaagcggggtcggaaactcgtggactatgacagtgcccgacaccacctggaggcagtgcagaatgccaagaagaaagatgaggccaagactgccaaggcagaggaagagttcaacaaagcccagactgtgtttgaagatctgaaccaagaactactagaggagctgcctattctttataatagtcgtattggctgctatgtgaccatcttccaaaacatttccaacttgagggatgtcttctacagggaaatgagcaagctgaaccacaatctctacgaggtgatgagcaaactggagaagcaacattccaataaagtctttgtggtgaagggactgtcaagcagcagcaggcgctctttagtcatttctcccccagttcgaacagctacagtctccagtcctcttacctcacctactagtccctctacactttccttgaagagtgagagtgaatctgtctcagcaactgaagatctggcacctgatgcagcccaaggggaagacaattctgagatcaaggagctcttagaagaggaggaaatagagaaggaaggatctgaagcaagctcctctgaggaagatgagcctctaccagcctgcaatggccccgcccaggcccagccctctcctaccactgaaagggccaagttcccaggaggaagttctccccagctccacaactccatcaccaggcggagccctgagcccttcagggcagctttcatcatctgccacagaagtagtcctccgaacccgcaccgcaagtgaaggatctgaggcgaccaaaaaagacagcctctatccagaggacctcagcaccccctaggaggcctcctccacccagagccactgcaagccccaggccctgctcagggaacataccttccagccctacagcctctggaggggggtcagcgcaccagccctagggcctccttggggactgggactgcaagtcctaggacctccctagagatctatacctaatccagaacgcaccagagaagccagtaagaactcctgaggccaaagaaaatgaaaacatccacaatcagaaccctgaagaactttgtacttcccccaccttaatgacatctcaggttgcttcagagcctggagaggcaaagaagatggaagacaaggaaaaggataataagcttatctcagctgactcctcggagggccaagaccagcttcaagtctccatggtaccagaaaacaacaacctcacagcacctgaacctcaagaagaggtatccacaagtgaaaatccacaactctgaagagaaactaccaagactcctcctgccccaaacctcgccagagaagctcttcaaccagagggtataggtcagagagatataagagccagcatccatccctgggttctcagtaggaatgctggtgctgtctaaagacctggcattaatggaggcggaggagcagccttacgggagggatggagggaggcaggctggggagaagagaacattagactcagggaatatttaattctggttttagcattattagaataagactttatacattaactaaagtggagctttaatcactataaaaagcaaaagtatctatagacat

SEQ ID NO: 22449 - DNA, 2568 bp, Homo sapiens
  SIMILAR (1228)..(1154): 441254mologous to Escherichia coli similar to phosphotransferase system enzyme I,accession number U00006,Smith- Waterman Score=44.
ctactgcgggaacggagcggcgcacagaacgcttcccggcttgcgaacatcagcacgggcggcggttccagctggaacgggcatgagccaacccataaggggagtgacgtccaaagcattgctgccgttgttcgaccgtgaagttgaaggttttggtgaagtgttccggatgttgtcgtttgaagagattggcacttccacgttgcaatctcgtgcggtagcgggcgtcgccaacaaaacgctgattttcgccatgccgggttcgaccaaagcgtgccgtaccgcatgggaaaatatcatcgcgccgcagctggatgcccgtacgcgtccgtgtaatttccatccacatttgaagaaataagtatgtcgcaactgacccatatcaacgccgctggcgaagcgcacatggtggatgtctccgccaaagcggaaaccgtgcgtgaagcgcgggcggaagcctttgtcaccatgcgcagcgagacgctggcgatgattattgatggtcgccaccacaaaggcgacgtatttgccactgcgcgtattgccggtattcaggcggcaaaacgcacctgggatctgatcccgctcatttatgacatgtgcaaagcggtgcaaaaagatatggtgattggtccggtaccgcacaactagcggaccgacgcgatgcagtagttcggcgctgatcttatgcgtttcgctcacgtcagtaatcagcgacttaatcgctttaaacgctttacgataacccggcatgtccatcaggttaagcatcggctgcggtaaggcatcttccggcaatgtctgcgctttttccaccagcgctagcagcgttttaccgtgaaagcggatttcggagcgcatttgcatcaggcggcattcatccagcgccgcaggtagccagccggaggcctccgtttctaccataagcttggcggtgatcggtaacagataccagacattcggcgatgcgtattcccactgacgttccggcagcgggtctggccaggcagtcggtgcgcgattactcttgttccagcgtaacgccggaatactcttcccccatggaaagcgaaagccctgacatcgggcgtccccaaagggcgcaggatttgcgtgtccaagtttgccgcgggtaaacagcggcgcggacactcgagccgggaaaaccgggggccccaccagaccagtgcccacgccggtgtaccggtaaataatacatatctgcagccaccaccgcccagcaacaggcacaaaccggaggcgcacacgccgacacggaaccaggccagacgggtcagggacccgcaacacagcacccacgaggaagaagccgaagacacccgccggaacaccagcccccaccccgcgcgcgccgcaggcccgcgccacacgagacgaacggcgcagcattcgaggcccgaagttcgcccttaattgcgtgtaaacacgagacgcgaactcgtcataaatacgcacggcgcgataaccgaggaacggttttgcctctgcgggaatgttcagataatcaacgggtttgtcgccgccaatgtccatagtgcgcacaataatgctgcgtccgttggcggattccagcgcctgacaaaaaatgttgtacaactcgctttcgcccggtgcgctggtgcgatccatatagagcatttcagtgcggaacaaaccaacgccttccgcaccattgccgaatgcggcctgcgcttccacggagtgagcgatgttagcggcaatttcaatgcggataccgtcagcggtacgggcttgttgggtcagccagacacgctgttgctcacgcagggcgtcctgtacgcgggcttcttgctgataataacgagctacggcttcccctggctcaaccacaatcgccccggcgttgccgtcgatataaatcgtttgttgctgccacggagtaagggcatcaatatccacaccaaccagcgttggaatgttgaacgaacgggcaaggatcaccgtatgtgaggtggtgccgccgcttttgagcaacaatcctttgaggtgatttttatccagttcgaggaactggctgggggtcagttcatcagccatacaaatggcgggctgcgtcagtttgcccggtgccgggaagcgttgctcaccgtagatttgctggagtaactggaagcagacgtcgcgtacgtccagggcacgttcttgcaggtagctgctggtatcgccccattgacgtccaagtttaggtttaggaatggcccatttggcaaactcgctggccggaaacatcggcgtactatcgaaacgcacaccgatgattatcgtatttcgctggaacaaggtacgccgggcttggagccaccgctgaatgcgctgaccgctatcagcaaaaagattggctgcaatggtttcttcccgttccagatccgcccaggcaaaaacgaaaccgatggtcgcatgttctcgcctgcgattggtattgtggaagatccggtgactggcaatgccaatggcccgatgggtgcatggttggtacatcacaacgtattgccccacgatggcaacgtgttgcgtgttaaaggccat

SEQ ID NO: 22450 - DNA, 5955 bp, Homo sapiens
  SIMILAR (502)..(335): 711254mologous to Homo sapiens Human secreted protein HLYES38, SEQ ID NO:220,accession number Y86305,Smith-Waterman Score =183.
ctatttctcttcgcttttgagattttggttatgaactgtacagctcgttagagatgctgttgtcaaattcagattccattcaatgggacgattaaggcacatcttaatggggctcaaagggcaacttgctgtattctcatcagacacattcagtttctcatcagttttcacttgtagcatgctgcctggaactggaatacagccctttctcttttccttatgcttgtctactaagctctctgatgaggctggaaaaacatcaggaattaaacttatggccagctcatcagaggagcatgcggcatccacaggatactctggttgttttttctcacacggccgggtactcctctgagacaaaacttccagaggaacaatcagacagcagcattcgcggttcacgaaaatctgctgttctgcagccaccgctgctgttacccaggcaaacagggtctggagtggacctctagcaaactccaacagacctgcagctgagggtcctgtcctggctgctttcatgggatggctttgagtgtctgaggcttttccaggtgtatggtgcaagcttttggtggatctaccattctggggtctggaggacgatggccctcttctcacagttccgctaggcagtgccccagtagggactctgtgtgggggctgtgactccacatttcccttctgcactgccctagcagaggttctccatgagggccctgcccctgcagcaatcttttgcctgggcatccaggcgtttccacacatcttctgaaatctaggcagaggttcccaatcctcaattcttgacttctgtgcacccacaggctcaacagcatgtggaagccgccaaggcactggggcttccaccctctgaatcaacagccatgcctttgagacattttccctgttggcttggagattaacgtgtggctcctcattagttatgcaaatttctgtagccagcttgaatttctcctcagaaaatgggtctttcttttctatcaaattgtcaggctgcaaattttccgaacttttatgctctgcttcctttataaaactaaatgcctttaacagcacccaagtttcctcttgaatgctttgctgcttagaaatttcttccgccatataccctaaatcatctttctcaagttcaaagttccataaatctagggatttggaaaaatagtttgccatttgtccactgttgcaagactgtcgtttatgtctttttgttgacatttctgtgatcttccatggtggtctttttcttttgttcaaattgctaagaacttcaaaactatcaggattcttgtcaaagttaacacatttgcttaatttactattgccaagatggtcagcaaattcatcagctgaaggattatttgtgttagcattttctatttctttagattgctttttaaaagaattttgcctagcagaatgagatcttaaagtaaagcgctttgattcttccatatgagtctgatgagtatttccactgtcagtagattcaggagagtaaatgattgtatttagcttaaaagtatttctgtgttcaagacagttgagcttcctcaaaaatattctacagtcttttaaggtttttgacctccaactattaggacatacattttctagtcttggtcccttttgaaagtctttttggctgcaatttgttccattctcttttgcttctgacttaaatttattctcaaaactagcatgtattttgaagtcaggcattactaccctctgctgcaagtcacccctgatctcaggtggcaaaacacactgattatctactatgctttttccttggagtgggatgtcagcatttgtttctccctcagtcttatttaaaaattggttctggcagaaaaatcttaagtttctccttttagagttccagtcaactgttccatggttgtgcagctttccctctcttttccacctttcatgatgcaacctcttaaactcagtcctttttaatctagctattgctaaattacttttcacatttaagagtggagagttagccactttatgcagtatatgcaatttctctgctgattttgaaggagaagagagtgcaaattttttaaagtgctttctgaaggggctggcattaaagtcagaatatttggtccctaatttgattcccctggtatttattacttccaaagggtttcgggcatttgcttttctaactagtgaaagagactgtgtttctgttgtttgcataaaccaagtacagagttcattcaaatcatactttttctgaaaaagcatttttacaggtgaaacttcaagttctaaaagacaagtttccaaagggcttgctactttgaaatgatcattttcaatgtgttctctttttttatgaatacaattttcagcttcatctccacttacttgcacccaagcatttgttatttgctcaaatctattgtttaattcctctaataaggaatcatttgaagcagaagtagcccaccacctgagcaaagggtttgatgaaattataggatccaaggatacttcagaaataggtactaatttattatcttccaaacacttttttgcattccgcgaaagtctgtttcttggggtatctttgtaagctattttcatctttgagtgcctatgtttttccttctgacttttatttttctgcaaatgcagtttatatgatttatggagcagagcgtttctataaataagtgagctagaagatgctaatgaatgtaagaaatgcagagatggttttctatccctaatagaatgtctcaaaggtacagtagcaatcatacgttttgatccatttttaaatatatcagcttcagtgtgccttattttatccatttgagtgcactgttggtcatacttttcttcaggcagattttttcctgacgtattatcctgttctaaaggaggcaagcagctgctaatacttacttctctttcctgaggtgaagttctattaatagtcacagatatgccagagattttcacttttgccggtctaccaggcttcctacttattgccaaaggcttctgatttggtcgaataatgttcttggaaggctgaggtatcacagatttgttcttgatgggtctcacatattcaaagccagaccccaagatctcactttcagtagtcaagcttgctacagcacttattctttcacccaagtcaattttgtcttcactaatatttctgggactattatattcagttggaaaatcaccagcattattgtttaaagacataaggttgcttatgtttacccttccttcagaaacatgccttttagttcttcttgaccttccgtaaataacagttactgtaatactctttttataaataccttcttttacttctgatatgagacattctgggcttttccttccagcactaaagggctcattctggcaaacagtgatgtttgtttgatcaattttaggctttggtggtcttccaattggtcgcttaatctgtttcacaacttggggacctattttttttggtctacctggttttcttttaaaagatggatcagtagcactgcttgaattgtccttaggttcttcttgtggcttatcactatttatatcacctataaacattgtagaggatcctgcagtttcttttgcatgactgaatttgtttagttctctttgaaaagtatcagtatcataatgactggagtgataattttcagagttcgcatttgagatatcctcatttgtttctgttttttcttcagttacgtgatgggttgtaggtttttcagaagggagaacaacatttgaatgggaagtgccaactgaagttaaagtatatttgaccccttcactacttttaacctcagataaaaacatgagtttgataggactagaatagttggaaacagatgaactttcagtaccttcatattttgctggtacattttcaacactggaaatcaagcgacccatatctaaaatagatgactttttcagattttcaagtcttttgttattcaaatccactgtaggcatgcagtgactattgataatattgccggatgctaccacagattttgataagctctgttctttgcatgtcattctatttagagtaagagtcatatttctgtcagcatgttggtctttaccatcaatttctatcaatttcttggatgctttatatccttctgataatggctgattattccaggattttttggctatacttattgtatcttccaaacgcttcacaaccacttgtaaattagaattcattgcaattttgtttaggtctatattgtgtgagctttcaatgtgaatatttttcactggatcgttttttgttgtggattcggatacttttttggctttaggggattttttaaaaacataattatttgttacatatacagaataccaccctggaggcacaatatttcgtttagttctgctcaaaagtccagaaacatcatttctcaaaagagtttgagtattacctaactttggatttttcctatcattttgcaaaaattgttttccatctgcagatttctcctgtggctttcttatgctcattttctcaggggaagttgttttaaagctttctgaaaattcattaaaagacaagttagtttctgaactatgaagaggtagttgcagtgactgtaatgcataatttggtgaaaatgatgtttcagcatgatttttaccttgaagtcttttagaattttgtaaagaaggcccttggtcatgatagaattctcctttgtctgatgaagatatctcattgttttgtgtcaatttccttgaacttttttcggtgtatttttttcttgtaaaattttcatcaagactagcaagttctctttttatctgtaaagactgccttctaaacatgggtgaatcagaggagttgcgcattgcaaataaagtttcttgacgctttcgaaatcttgtctgaataattttattttctacctttttatcatgttgactcaataattccataaaactataatcactggcttttgcattatgcaagagagatgttatgaaatctcccaattttaaatcattatatgtattataatcactgctagataattttacaaggcttgtcatatccgtggtttctattgattttagtttttcattaatgcgatccattaaatcttgaaaaattacagcagtttcacctttttcatgatttgtagtagaattattgctgtcatttgagagtaaagaataagagttactggattttttagttttaagtattttatcttgatgatcactcttattgctgctgatttctgctggtgtgagagatggaggctggttaatgtttgcttcaagtttgttattttctaaggctgaaatctctgagatgacgtctttcaatttttcaaatccttcagtttctataggtgataatggtgggggtgagggacttcgagatctacaggcatctttaagagtgactgaaagatcacatacttcctttgacaaaagaggactacgaaaggctgattttgtagagtgaatgtttggtaacagtccagaacagcacctgtgagaattataactgtctgcaattcctctattcactactggcttaacgtgttcaacagttacagtttggcaagataaacaatgtaaatctttaatacagactggcagaggttctaaaccagggctttgtttttcgttttgtaaacaacctctttctgccagcctatattcacaactacagaacagaccacataaatcatcttcgattaagggcttttgagattctgaagacacaacacatgatgtattacaacagcaaagagaagcagcattctgctcttggactagaaatttcaacatagccaaaacttgttgctggtgatgtatgcacaaagattccaaaactttgtttaatgctgattttcttttttccat

SEQ ID NO: 22451 - DNA, 1128 bp, Homo sapiens
  SIMILAR (1)..(363): 981254mologous to Escherichia coli NarV protein,accession number D90786,Smith-Waterman Score=609.
acgtcgattggcagcgcaggactgctgtggcgcaggctgacaaatcagcgcgtgcgtgccacttccactacgccggatatcatcatcatgagcattttgctgatccagtgtctgttggggctaagtaccataccgttttcagcacagtatcctgatggtagcgaaatgatgaagctggtgggttgggcgcaaagcattgtcactttccgtggtggatcgtcagagatgctcaacggcgtagcgttcgtcttccgcctgcatctggtgttgggaatgaccatcttcctgctcttcccgttcacccgactggtgcatgtgtggagcgcgccgtttgagtactttactcgtcgatatcaaattgtgtaccacgtcgatgcttttacctcacaaccgtttcgcggcaattctgccggtgttgttttccccgccgataatcttagcgaagcgcaaatgcagcttatcgcccgcgagttaggccattcggaaactgcttttctgctgcacagcgacgacagcgatgtgcgcatccgctactttacgccaacggttgaagtgccgatttgcggtcacgcgacagtagctgcgcactatgtacgtgcgaaggtgttaggtttaggaaattgcacgatctggcaaacatcgctggcaggaaaacatcgcgtgactatcgaaaagcacaacgatgattatcgtatttcgctggaacaaggtacgccgggctttgagccaccgctggaaggtgaaacacgtgcggcgattatcaacgcgcttcatctcactgaggacgatattctgccaggcttgccaattcaggtggcaacaacaggacactcaaaagtgatgatcccactgaaaccggaagtggatatcgacgccctttcgcctgaccttaatgcgctgaccgctatcagcaaaaagattggctgcaatggtttcttcccgttccagatccgcccaggcaaaaacgaaaccgatggtcgcatgttctcgcctgcgattggtattgtggaagatccggtgactggcaatgccaatggcccgatgggtgcatggtctgtgttccatggcagcaggccgactctagatgatccccctgcgcaaatttatccttattttcagatgatgtaa

SEQ ID NO: 22452 - DNA, 1231 bp, Homo sapiens
  SIMILAR (836)..(1228): 721254mologous to Homo sapiens unknown,accession number AF149422,Smith-Waterman Score=477.
atgtgtgccaggggcagcctgtggggctgctattcaggcctggaacgcaagtgcgaggctgctctgccagacagggttgtatcttccaagagcgcctgcggagctgtttctcaggacctgttgcaggcacagggccgtcgcgcaggacctccctcatggctctacgcagatccagtccacacagggacaatagagtgcggaggtcactggtgcctcaatgctgccctcctggacttccagtcaccacagcggttgctgacatacctgcattgtggccttcagaggcccatggagagtgacccaccagagctagcaccaatggtgcaccaccaagaaggaatatatctcaacataagaaaagctatgtatgacaaacccacagctaacaaactgaactgggacaagtcgaatgtctcttctctaattactggaacaagacaagaagagacgactgcaaatgggacaacttttgcaactattcatctgcagttctttatccaaattccggctgttccccggaaaactcttcttaaccgggcagattattacttcccagaacataatccaagtttaacactcgtgataaatcgaagaataaccaagttctcagagcctaactgggaggcaccccctagtaggggcagactgacacctcacacggctgggtactcctctgagacaaaaattccagaggaacgatcagacagcagcattcgtggttcacgaaaatctgctgttctgcagccactgctgctggatagccaggcaaatagggtctggagtggacctcttgcaaactccaacagacctgcagctgagggtcctgtctgttagaaggaaagctaacaaacagaaaggacatccacaccaaaaacccatctgtacattaccatcatcaaagaccaaaagaaagcagttcctcaccagcaacagaacaagctggacagagaatgagtttgacgagttgagagaagaaggcttcagacgatcaaactactccgagctacaagaggaaattcaaaccaaaggcaaagaagttaaaaactttgaaaaaaatttagatgaatgtataactagaataaccaatacagagaagtgcttaaaggagctgatggagctgaaagccaaggctcgacaactacgtgaagaatgcagaagcctcaggagccgatgcgatcaactggaagaaagggtatcagtgatggaagatgaaatgaatgaaatgaagtga

SEQ ID NO: 22453 - DNA, 2528 bp, Homo sapiens
  SIMILAR (2415)..(2299): 941254mologous to bacteriophage lambda Rz1 protein precursor,accession number U37314,Smith-Waterman Score=206.
ctagagactgggtgtgcctgccacccgttgcggagcgttggcgagcgtcctggtgttcccttgtgcccttttggctgacgttacccgtttggcgtctgtgcgtgttaggacccgtgttgatttccctggtgtatgcgcgtggctcgtgggggttcccccacgtttgtagacatgacgataaaggtctgcagactgtcgtgcgcgctcactcttgcttggtgaccacgggttttgatatagtaggagggtgggggaagcttcccacaccacctgcatcttacaggatttgctagtacccgccttcgcctgcggaactaacggtttgccgcctccgccaactacagctacgcgatgtgttgtactgtattgcttaccccagtggccctggggtaaaaccgtttcgcggcaattctgccgtgtgttttccccgccgataatcttagcgaagcgcaaatgcagcttatccccgcgagttaggccattcggaaactgcttttctgctgcacagcgacgaagcgatgtgcgcatccgtttacgccaacggttgaagtgccgatttcggtcacgcgacagtagctgcgcactatgtacgtgcgaaggtgttaggttaggaaattgcacgatctggcaaacatcgctggcaggaaaacatcgcgtactatcgaaaagcacaacgatgattatcgtatttcgcttaatgcgctgaccgctatcagcaaaagattggctgcaatggtttcttcccgttccagatccgcccaggcaaaacgaaaccgatggtcgcatgttctcgcctgcgattggtattgtggaagtccggtgactggcaatgccaatggcccgatgggtgcatggttggtacatacaacgtattgccccacgatggcaacgtgttgcgtgtaaggcaataagggcccagggattttggtctttgatgatggcatgtacagatgggtttccggtgtggatgtcctttctgtttgttagcttccttctaacagacaggaccctcagctgcaggtctgttggagtttgcaagggtccactctggaccctgcttgcctgggtatcagcagcagtggctgcagacagcagattttcgtgaaccgcgaatgctgctgtctgatcgttcctctgaatttttgtctcagaggagtacccagccgtgtgaggtgtcagtctgcccaggacagacactacacaattggccgggtcacagacatggccatctggctcgttcctctgctgtactccaacagctgaaaatcgggtcactcccacactaatactgcgctttacaaacgttatatcaggctcggtacctgagatgatgggacaagttgatgagtctcttacaatttgaaagtttgtaactccagacatacgggtccatgtgtattttatacgacccgtaagtccctttgtgtcaaggtcccccgcgacacagtgggggtcaatacggcggaaacagaaaaacagcgctggtacggacaacggaaaatacccctgttgttggggcggtacatcattgagttttgagttcaattgagagtactcctcaggaaacctcccagtttgtttaattggcccataagtgttttcgcaattaggatgtatactattcccccgagtcctctccggtttttcaaacaccttttctgaaaaattgtgcgtgaaagcgaggacgccacctactaggctagggccatggttggcgatttcgcggggttgtggcggggatttcttctcactggtgacgactgacgccaccctcgatctccttgtccctccttgggaggcttgacctttgccgtcgtgctccgctcggcagccgccttgccgcttggcggtcctacgtgtaactagggttgcagaagtccttttccatgagggttctccaaatacctttgtgggaatcgtgagccaatgccgtgccccgcggtttcgccgttgtttcgccgtgttccccgttgttccctttctcttttcttcccctcctctctctcttccctccctcttctcttccctccttttctttccttttccttccttcttttctttctcccttcccccactgcaatcatggcagcgtcttaacttcttcccaagtttgtcgcaaagtcgttcccaaaaagcccaaaaaaacaagcttaacttcttcgagttgaagcatctactagcaccagccctgtatcctccatccaccgcgagcaaaaccagatccgtatcgggacgaagtatttctctgatgtgaaactgccggatgcggcgtaaacgccttatccggccagtcttcccggagggtgaaataatcccgttcagcggtgtctgccagtcggggggaggctgcattatccacgccggaggccgtggtggcttcacgcactgactgacagactgctttgatgtgcggccaccttcttctgtggctcagcgttggtagcccctccgttggtgggccccccccactgtgtgcctccaacatagttagaacgtccgctctctaccgtgggcacgtaaatattcat

SEQ ID NO: 22454 - DNA, 5782 bp, Homo sapiens
  SIMILAR (1973)..(5299): 951254mologous to Homo sapiens putative p150,accession number U93563,Smith-Waterman Score=5512.
  misc_feature (1)...(5782): n = a,t,c or g
cctccggtctacagctcccagcgtgagcgacgcagaagacgggtgatttctgcatttccatctgaggtaccgggttcatctcactagggagtgccagacagtgggcgcaggccagtgggtgcgcgcaccgtgcggagccgaagcagggcgaggcattgcctcacctgggaagcgcaaggggtcagggagttccctttccgagtcaaagaaaggggtgacggacgcacctggaaaatcgggtcactcccacccgaatattgcgcttttcagaccggcttaaaaaacggcgcaccacgagactatatcccacacctggccttcggagggtcctacgcccacggaatctcgctgattgctagcacagcggtctgagatcaaactgcaaggccgcagcaaggctgggggaggggcgcccgccattgcccaggcttgcttaggtaaacaaagcagccggggaagctcgaactgggtgcagcccaccacagctcaaggaggcctgcctgcctctgtaggctccacctctgggggcagggcacagacaaacaaaaagacagcagtaacctctgcagacttaagtgtccctgtctgacagctttgaagagagcagtggttctcccagcgacgcagctggagatctgagaacgggcacattgcctcctcaagtgggtccctgaccccctgaccccctgagcagccttaactgggagggcacccccccagcaggagcacaactgacccctcacacacggcagggtactcccaacagacctgcagctgaggggtcctgtcgtgttagaaggaaaactaacaaacagaaaggacaaccacacccaaaaacccatctgtacattgccatcatcaaagaccaaaagtagataaaaccacaaagatggggaaaaaaacagaacagaaaaactggaaactctaaaacacagagcgcctctactcctccaaaggaacgcagttcctcaccagcaacggaacaaagctggatggagaatgactttgacgagctgagagaagaaggcttcagacgatcaaattactctgagctatgggaggacattcaaaccaaatgcaaagaagttgaaaacattaaaaaaaatttagaaagaatatataacttagaataaccaatacagagaagtgcttaaaggagctgatggagctgaaaaccaaggctcgagaactacgtgaagaatgcagaagcctcaggagccaatgcgatcaactggaagaaagggtatcagcaatggaagatgaaatgaatgaaatgaagcaagaagggaagtttagagaaaaaagaataaaaagaaacgagcaaagcctccaagaaatatgggactatgtgaaaagaccaaatctacgtctgattggtgtacctgaaagtgatgcggagaatggaaccaagttggaaaacactctgcaggatattatccaggagactttccccaatctagcaaggcaggccaacgttcagattcaggaaatacagagaacgccacaaagatactcctcgagaagagcaactccaagacacataattgtcagattcaccaaagttgaaatgaaggaaaaaatgttaagggcagccagagagaaaggtcgagttaccctcaaagggaagcccatcagactaacagcggatctctcggcagaaaccctacaagccagaagagagtgggggccaatattgaacattcttaaagaaaagaattttcaacccagaatttcatatccagccaaactaagcttcataagtgaaggagaaataaaatactttacagacaagcaaatgctgaccgattttgtcaccagcaggcctgccctaaaagagctcctgaaggaagcgctaaacatggaaaggaacaaccggtaccagccactgcaaaatcatgccaaaatgtaaagaccatcgagactaggaagaaactgcatcaactaacgagcaaaatcaccagctaacatcataatgacaggatcaaattcacacataacaatattaactttaaatgtaaatggactaaattctccaattaaaagacacagactggcaagttggataaagagtcaagacccatcagtgtgctgtattcaggaaacccatctcatgtgcagagacacacataggctcaaaataaaaggatggaggaagatctaccaagcaaatggaaaacaaaaaaaggcaggggttgcaatcctagtctctgataaaacagactttaaaccaacaaagatcaaaagagacaaagaaggccattacatgatggtaaagggatcaattcaacaagaggagctaactatcctaaatatgtatgcacccaatacaggagcacccagattcataaagcaagtcctgagtgacctacaaagagacttagactcccacacattaataatgggagactttaacaccccactgtcaacattagacagatcaacgagacagaaagtcaacaaggatacccaggaattgaactcagctctgcaccaagcagacctaatagacatctacagaactctccaccccaaatcaacagaatatacatttttttcagcaccacaccacagctattccaaaattgaccacatacttggaagtgaagctctcctcagcaaatgtaaaagaacagaaattataacaaactatctctcagaccacagtgcaatcaaactagaactcaggattaagaatctcactcaaagccgctcaactacatggaaactgaacaacctgctcctgaatgactactgggtacataacgaaatgaaggcagaaataaagatgttctttgaaaccaacgagaacaaagacacaacataccagaatctctaggacgcattcaaagcagtgtgtagagggaaatttatagcactaaatgcccacaagagaaagcaggaaagatccaaaattgacaccctaacatcacaattaaaagaactagaaaagcaagagcaaacacattcaaaagctagcagaaggcaagaaataactaaaatcagagcagaactgaaggaaatagagacacaaaaaacccttcaaaaaatcaatgaatccaggagctggttttttgaaaggatcaacaaaattgatagaccgctagcaagactaataaagaaaaaaagagagaagaatcaaatagacacaataaaaaatgataaaggggatatcaccaccgatcccacagaaatacaaactaccatcagagaatactacaaacacctctacgcaaataaactagaaaatctagaagaaatggatacattccttgacacatacactctcccaagactaaaccaggaagaagttgaatctctgaatagaccaataacaggagctgaaattgtggcaataatcaatagtttatcaaccaaaaagagtccaggaccagatggattcacagccgaattctaccagaggtacaaggaggaactggtaccattctttctgaaactattccaatcaatagaaaaagagggaatcctccctaactcattttatgaggccagcatcattctgataccaaagccgggcagagacacaaccaaaaaagagaattttagaccaatatccttgatgaacattgatgcaaaaatcctcaataaaatactggcaaaccaaatccagcagcacatcaaaaagcttatccaccatgatcaagtgggcttcatccctgggatgcaaggctggttcaatatacgcaaatcaataaatgtaatccagcatataaacagagccaaagacaaaaaccacatgattgtctcaatagatgcagaaaaagcctttgacaaaattcaacaacccttcatgctaaaaactatcaataaaataggtattgatgggatgtatttcaaaataataagagctatctatgacaaaaccacagccaatatcatactgaatgggcaaaaactggaagcattccctttgaaaaccggcacaagacagggatgccctctctcaccgctcctattcaacatagtgttggaatttctggccagggcaatcaggcaggagaaggaaataaagggtattcaattaggaaaagaggaagtcaaattgtccctgtttgcagatgacatgattgttgatctagaaaaccccatcgtctcagcccaaaatctccttaagctgataagcaacttcagcaaantctcaggatacaaaatcaatgtacaaaaatcacaagcattcctatacaccaacaacagacaaacagagagccaaatcatgagtgaactcccattcacaattgcttcaaagagaataaaatacctaggaatccaacttacaagggatgtgaaggacctcttcaaggagaactacaaaccactgctcaaggaaataaaagaggatacaaaaaaatggaagaacantccatgctcatgggtaggaagaatcaatatcgtgaaaatggccatactgcccaaggtaatttacagattcaatgccatccccatcaagctaccaatgactttcttcacagaattggaaaaaactactttaaagttcatatggaaccaaaaaagagcccgcattgccaagtcaatcctaagccaaaagaacaaagctggaggcatcacactacctgacttcaaactatactacaaggctacagtaaccaaaacagcatggtactggtaccaaaacagagatatagatcaatggaacagaacagagccctcagaaataacgnngcttacctacaactatctgatctttgacaaacctgacaaaaacaagcaatggggaaaggattccctatttaataaatggtgccaggaaaactggctagccacatgtagaaagctgaaactggatcccttccttacaccttatacaaaaattaattcaagatggattaaagacttaaatgttagacctaaaaccataaaaaccttagaagaaaacctaggaaataccattcgggacataggcatgggcaaagacttcatgactaaaacaccaaaagcaatggcaacaaaagccaaaattgacaaatgggatctaattaaactaaagagcttctgcacagcaaaagaaactaccatcagagtgaataggcaacttacagaatgggagaaaatttttgcagtctactcatctgacaaagggctaatatccagaatctacaaagaacacaaacaaatttacaagaaaaaaacaaacaaccccatcagcaactgggcgaaggatatgaacagacacttctcaaaagaagacatttatgcaggcaacagacacatgaaaaaatgctcatcaccactggccatcagagaaatgcaaatcaaaaccacaacaggaccctcagctgcaggtctgttggagtttgctagaggtccactccagaccctgtttgcctgggtatcagcagcagtggctgcagaacagcggattttcgtgaaccgcaaatgctgctgtctgattgttcctctggaagttttgtctcagaggagtacccagccgtgtgagcccgtcggaaaagcgcagtattcacgtgggagtggcccgattttccaggtgccatctgtcacccctttccttgaccaggaaagggaactccctgaccccttgcgcttcccgagtaaggcaatgcctcgccctgcttctgctcgtgcacgggtttctcatgggtgtgttggatctggtaacgtcttagcatggcgagggatgaaatcaggtcccttctgtgggagacggctgctggcagagcaggacctttcaaacctgacgatacaggagacttgtgttaacgcacttcaccctccattactggattga

SEQ ID NO: 22455 - DNA, 429 bp, Homo sapiens; identical to SEQ ID NO: 17330
  SIMILAR (277)..(429): 1001254mologous to Mus musculus ribosomal protein,accession number M76763,Smith-Waterman Score=265.
  misc_feature (1)...(429): n = a,t,c or g

SEQ ID NO: 22456 - DNA, 424 bp, Homo sapiens
  SIMILAR (417)..(121): 861254mologous to Escherichia coli glutamate-1-semialdehyde 2,1-aminomutase,accession number X53696,Smith-Waterman Score=474.
cgtttacgcgacaacggatgcccgatgcgacgctggcgcgtcttatcgggcctacaaacggccccgaatcgtaggtcggataaggcgttcacgccgcatccgacaaaccatgctggatcacaacttcgcaaacacccgacgtgcagcatcgatggtgttattgatatcttccatgctgtaaacaccttcgtccagcatcatatggaagaaacgcttaaagcgttccacgtcacaggccatcacatcctgatagcacgtcacggactcggcgtcggtaaagaaaataccgaacatgccgccaacgtggttaacgaccagcggaattccggcttcttctgccgcttccagcagaccttctgccagacgtgttgtcagctcatccagcgtttcgtgaacgcccggctgcgcgacttcatttcttgcg

SEQ ID NO: 22457 - DNA, 417 bp, Homo sapiens
  SIMILAR (91)..(186): 1001254mologous to Mus musculus ribosomal protein,accession number M76763,Smith-Waterman Score=170.
ccgcaggattagaggaagggtggagggtcctaacagaattgggcataggaggtcatgggataaaacatcccttgccccctcctctgaatccaggtcctagccaatggtctggacaacaagctccgtgaagacctggagcgactgaagaagattcgggcccatagagggctgcgtcacttctgggggtgagtggggggtctcatctccctgcctacctcgactcagcattcctcctactcgctcttctttttccccaaccttttgtttctgctgtgcatgacctgtgactcttctctttttacctgcagccttcgtgtccgaggccagcacaccaagaccactggccgccgtggccgcaccgtgggtgtgtccaagaagaaataagtctgtaggccttgtctgttaataaatagttta

SEQ ID NO: 22458 - DNA, 732 bp, Homo sapiens
  SIMILAR (411)..(1): 681254mologous to Vibrio cholerae tldD protein,accession number AE004129,Smith-Waterman Score=490.
actaaatactgaagtgccacggcggttgaagtcgccttccagaccgtgaccaaccgcttcatgcaacagcacgcccggccaacctgcgccaagtactaccggcatggtgcccgctggtgcagcaacggcagaaagattgaccagcgccatacgcactgcttcttttgcccatgcatccgcacggacttcgccgtcgagatcggcaaggaagaattcataaccaaaacgaccgccgccgccactggcaccgcgttcgcgtttgccatcttcttcgacgagaacgctcacggaaagacgcaccagcggacggacatccgccgctagcgtgccgtcggtggccgcaaccaaaattaattcatagacaccactgaggctggcagtcacttcctgtacgcgcttgtccgcttcgcggcaaccatcaccactatcacggacgatggtgcgcgccgcttgcgcactctgttccagcgccagcaggctgatttggtcagcgtaagcaaatccggttttttcaccgctgattgcacgcacaccaacgccctgatcgatgttgtaagaaccatctttaataatgcggtcttctaaaacccaggattcgtgatagctcgactgaaaatagagatcgccataatcaaggcgacgttcggccagttgaccgaggatcgcgaacaagtcctgatgtttcaggccgttcgccgctagcaattgttcacttaccaggttaagactcat

SEQ ID NO: 22459 - DNA, 2853 bp, Homo sapiens; identical to SEQ ID NO: 8712
  SIMILAR (2430)..(1795): 991254mologous to Escherichia coli trimethylamine-N-oxide reductase,accession number X73888,Smith-Waterman Score=1155.

SEQ ID NO: 22460 - DNA, 1191 bp, Homo sapiens
  SIMILAR (906)..(46): 961254mologous to Escherichia coli RhsE protein (fragment),accession number D90785,Smith-Waterman Score=1509.
ctagttcaccagcaatggatccaaaccaagaagaaatccctgatttacccgttttgccattcgccgtcccagcgggtcgtagaggtagcggctctcgaccagtggctcgccatgctgtatccgcgtgtagaacaccaggcggtgctggctgtcgtagtggtagtggtgggtccgctcgtcgtccgtccgtatcacacccgccgggatgcggtccgtcttctccgtcagcctgccgtattcatcgtggcggtagacatagtgcgcatcctccgcgatgcggttatccggccacactgtgagtgtactgtccgggtgcagctccgggtccggcagccggttgcccgccgggtccgtggcatacgggatgcggatgtccaggtctggtgcgagggtgcgcacactctccatcctgcccgtggcgctgtagccgtattcccgcgtctgtcgcgggccgctgatgcgcaccaggtcgccgttgtcattccacccgtagtcacggtcatacaccaggctgttcaagtgtgctggctctgtaacgtggcctgcgggggtgtatgtgctggtcagtttatatgcggcattactgcctgccatgctgccgaagctgcgcaccgtctcacggtgcaggcggtcgcgcgtgaactccagcagcggcgtcccgcccagcttcatgcccgcaagatagccgctgccgtaggtcagccactccaccggcggcagactgtccggcgtgacgcggtttgccagcccctgttcgttgtacgcatgtccggtctcatggtgccacagcagttcccccgtctccgggttctccaccgtctggcgttcgccggtcaggcggcctttatcgtcatagccgtagtggaccgacacgcggtggccttcactggtatggtctagctcggtacccaattcggctgtgaatccatctggtcctggactctgtccggttggtaagctattgattattgccacaatttcagctcctgttattggtctatttagagattcaacttcttcctggtttaatcttgggagagtgtatgtgtccaggaatttatccatttcttctagattttctagtttatttgcgtagaggtgtttgtagtattctctgatggtagttcgtatttctgtgggatcggcggtgacatcccctttatcattttttattgcgtctatttgattcat

SEQ ID NO: 22461 - DNA, 918 bp, Homo sapiens
  SIMILAR (229)..(504): 951254mologous to Escherichia coli glutamate-1-semialdehyde 2,1-aminomutase,accession number X53696,Smith-Waterman Score=455.
atgagccggacccgtcaatcaaagccgaaccgatccagaacggtcgccagcaacgtggcggcggcggtcgtgggcaaggtggtggtcgcggtcaacagcaaccacgccgtggggaaggtggcgcaaaatctgcaagcgcgaaacctgcagaaaaaccgtctcaccgcctcggcgatgccaaaccggcaggcgaacaacaacgtcgccgccgtccgcgtaaacctgccgctgcgcaaaggtttgctggaagcggcagaagaagccggaattccgctggtcgttaaccacgttgtcggcatgttcggtattttctttaccgacgccgagtccgtgacgtgctatcaggatgtgatggcctgtgacgtggaacgctttaagcgtttcttccatatgatgctggacgaaggtgtttacctggcaccgtcagcgtttgaagcgggctttatgtccgtggcgcacagcatggaagatatcaataacaccatcgatgctgcacgtcggataaaatatggcgcgccgataaaggttgacagcagccccgccgggatctggaatggaaacagcaccatccgcccacaccagtcagcgaacaccagcagtaaaccacccaccagcgccgaaattacgatgtgtggcatcgtccgtcgaaagcccatcatccgcgcaatatgcggtgccattaaaccaacaaaactcaacggtccaatagtcatcgtcgcggtcgccgatttcctggctgctcagcggatttccctcttcaccaatcaacaaactgatttcacgcggcataaattctttaccggttggcagtttggcattaaggaagagcgtttcgccaagtgtcatctcaaacagcgtgcgaacgggcattacgacaaatgcctgttcgtcttcaaccgcctgttgaagtgcttctaa

SEQ ID NO: 22462 - DNA, 1380 bp, Homo sapiens
  SIMILAR (142)..(270): 931254mologous to Escherichia coli RhsE protein,accession number X60998,Smith-Waterman Score=196.
tttgttgtcagtggggcagttcaggttcttgacggctgcataaaagtatttgagagcgggtccaaagtgaaagtagacggtatacgagccgggaagcttcacgccgctcatccgggtcgagacagagaacggcgagcgggaaaaagcgcagcgcgcagcctggcagagacgctccagcaggaagggagtgagaacggccacggcgtggtgttcccggctgaactggtgcggctgctggacaggctggaggaagaaatccgggcagaccgcagcccacattccacaatccgcgctaccttccaatatacacccatcatcgcgttcggattgctccacatccacagaagtgcacgcggacgtgctctctacaagaaccaatgccgtggcctgatgcgcccattaagcgcgggggttggtatgtgtcgtcggaaagttacggtgctcgtctatggcagagattgcagttctaaggagagaccttcggtcgacactatgcgtaacgagctacggcacctaagcgttgtgagtgtgagtctgttgtatgtcggtgatgttcgtggtgttcgtcgtcgtggtgtttgtgtggtcagagttgcggcgcgtcgtgtcggtgtgctctcactccttcatggttgtcgtggtatgcgtcttcgaccacactactgcacacatctaacgctaggctatcggcagttcatcttgctcaatcgcttgcgacgtttctcgtactgtccagcgagggctggagagtgctcttcctcttctctgtctccaccatctcgaggggcactcctggcgctgtgccagctgcgctcgttctctcgttcgtcggctgtggcgtctgcgtggtcttctcgtcgtcgcgtctcggctgcgcgcgtgttgtcctctcgtggaggtgcagagattgtcttccgtgtctcagttcgcctgtcgcgggtctcttggcgtgcttcgtcagttgtttacttagctgcggtctcgcggtcctcgtcgcgtggcgtgagctgggagtgtggttcgtgtttcgagtgcagctttcgtcgtgtccgagtcgcttcggtcatggtagtttgctcgtgcagtgctctcgcacgcagccttagtcgttcgctttggttgcgcgttgtcgcatgtagagattgtgtcgtcgacgcgcaggtgactcctgcatcaagcttctggtcggctgcgcagcgctcggggtctgcgtcattgctctcgcgttttgagtctagtccacgttcgcgtgctctggcgcaggttgtcgggaggatcacactgttcgctttctgtcgctgtgtttggtcgtgtgttctgatctcacgttcgatgattgggcttgggtggttcactcattctgaggccgcctcttggtga

SEQ ID NO: 22463 - DNA, 1434 bp, Homo sapiens
  SIMILAR (1110)..(253): 701254mologous to Escherichia coli Anaerobic dimethyl sulfoxide reductase chain A precursor (EC 1.-.-.-) (DMSO reductase),accession number D90801,Smith-Waterman Score=1016.
tcacatgcgaaaacgaaggacgtaaccctgagatgcccgactacgaggagatgaaaacgaccgggattctttaaggaaaaatgcccggaaggacactacgtcgctttccgcgcatttccgtgaagatccacacaggccaaacccgttggaaacaacctgggatagggtggccaggcccttgcacggggcccggcagggagagtagcccctgactgctagcactactgcttctggagggtctccagtgcttctccacacttgtgggccttccagattagggaagacaatcacagttctgggggtgaattttgccatttggctgctgaacacatatggcatatcgccgttggcaatcccacgtttctgcgcatctatagggttgatccacacctcctgacggcaggcagccttcaggagatcaatattgccgtaggtcgagtgagtacgggatttgtcatggaaaccaaacagttgcagtgggaaggttctacgttcaggggagttccagccttcaaaggttgaggcataaactggcaatgggcttatcacttcatctttttccagttcccaggtacgggcaatttccgccagcctgctggaataaatttcaatcttaccggaaggcgttttaagtggatttgcctcggggtcgtcacgaaatgctttgtaggcgacaaaatggccattgggatctttacgcttatagatacccatttttttcagttcgtcgtaagacggtaacgccggatctttggcaagcattttggcgtacagatgttgtaaccattgttcctgcgtgcgaccttctgtgaacttttgatagacgtcaggtccaagacgtttcgcgacttcactcaggatccagtaaatcggtttgcgttcgaattttcggctcaggacgggcagtttccatgcaaagcatccattcgggtgcacggcaaccctggggacattttccccatcgtcttggctattaatatttggatccttgttacttatgcaaatttctgcagcaagcttgaatttctccccagaaaatggggttttcttttctattgcatcttcagtctgcaaactttccaaatttttatgatctgcttcctcttgaatggtttgctgcttagaaatttcttccaccaggtaccctaaatcatctctctcaagttcaaagttccacaggtctctaaggcaggggcagaatgctgccagtctctttgcataacaagagtgacctttactccagttcccaacaagttctttatctttatctgagaccacctcagcctggacttcgttgtccgtatcactataagcattttggccaaagccattcaacaagttctctaggaagttccaaactttcccacatattcctgtcttctgagccctccaagactctaggaagttcccaaatttcccacattttcctgtcat

SEQ ID NO: 22464 - DNA, 4237 bp, Homo sapiens
  SIMILAR (1824)..(1282): 971254mologous to Escherichia coli Anaerobic dimethyl sulfoxide reductase chain A precursor (EC 1.-.-.-) (DMSO reductase),accession number D90801,Smith-Waterman Score=943.
tcatctcgtccgttcctctgctgtctccttctcctttcgctccgcttgcctgttcgtgttgcttgctgcgttgtcttcgctacgccttgtcccgcttccttgcgtggcgtctctctctcgtctctgcttctctttctcctcgtcttcttccgtcgctgtctctactccccctgtgcttcgtccttctcttttttgtcctgttcttgctcgcgcttgtctcgtctcctccccgttcctgttcgtcttcctccttccctctctcttgcatccttcctcgcttgctctgcgttccgtttttgttctctctcttcctgttccggttcccgccccgcgcgccgctgttcgagcggttgctctgccgtctctctctttctctcgccgtctgtccttgggtggtctgcctccccgcgcgtggtttcgccgtttcttcctctccctctgctcggtcttgttctcggtctcgccgcttctctcccgcctcccgcctcgccgctggtcgtcggctctcgccttgtctgcttcctctgccctccctcggtctcctcggtgttcgcgttttccctgttctggctcagtctctgtcgtcggcgtctgcgtcagctcccgcctcctttgtggcttcgtgcacgggggtgttccggttccccgaatgttaacccgattatcaacccgcccaagagcccaattctgggtatccacgctatcaaagatcgtccgatggcggtgaatggtcaggttgagatcctgccgatgatgtacctggcgctgtcctacgatcaccgtctgatcgatggtcgcgaatccgtgggcttcctggtaacgatcaaagagttgctggaagatccgacgcgtctgctgctggacgtgtagtagtttaagtttcacgcggtgaggggggttgcgagccggtgcggggaggggggggctggtgggcgggtgctgcgtgtcgtgtacggccgtgacaactctatatctccgatttttggactcagttgcctcgcccggttgcagtccggtgctgggtcccctgtttcggtccccgcctgtatccgtcgtgtctctgcggcatccagcgagtttcagttctgtgttccttctggccctcgggaggttccgcgtgccatgtggcttcgccgaggtcacccgaatacgtgtcgtggtatattttccgatctggaccgatagttgctgcgggttcccttccccaatgttaaaggcccacagagtgttgagcgtattcacacagccgccatggtcgattttatcgccagacatattggctttggctggtagccgaacttcgccacgatggttaaacacccgcaccatatcgccgttggcaatcccacgtttctgcgcatctatagggttgatccacacctcctgacggcaggcagccttcaggagatcaatattgccgtaggtcgagtgagtacgggatttgtaatggaaaccaaacagttgcagtgggaaggttctacgttcaggggagttccagccttcaaaggttgaggcataaactggcaatgggcttatcacttcatctttttccagttcccaggtacgggcaatttccgccagcctgctggaataaatttcaatcttaccggaaggcgttttaagtggatttgcctcggggtcgtcacgaaatgctttgtaggcgacaaaatggccattgggatctttacgcttatagatacccatttttttcagttcgtcgtaagacggtaacgccggatctttggcaagccttttggcgtacagatgttgtaaccattgttcctgcgtgcgaccttctgtgaacatctgtactatgtcacaacccccggttatagcccctcctcgttttcctcttcgggttataacgtcatgggtaaagcgccaaaaacggaaacgtaaggcccggccgcgagaagggggcaaccggcacagagtggaatcgaatccgtaagcgcggacccgggggcaacggtgccggacgcgtagcgggccgaaacactcacagttggccggataacccgcatcccggaggatgcgcactatgtctaccgccacgatgaatacggcaggctgacggagaagacggaccgcatcccggcgggtgtgatacggacggacgacgagcggacccaccactaccactacgacagccagcaccgcctggtgttctacacgcggatacagcatggcgagccactggtcgagagccgctacctctacgacccgctgggacggcgaatggcaaaacgggtctggcggcgggagcgtgacctgacggggtggatgtcgctgtcgcgtaaaccggaggtgacgtggtatggctgggacggagacaggctgacgacggtgcagactgacaccacacgtatccagacggtatacgagccgggaagcttcacgccgctcatccgggtcgagacagagaacggcgagcgggaaaaagcgcagcggcgcagcctggcagagacgctccagcaggaagggagtgagaacggccacggcgtggtgttcccggctgaactggtgcggctgctggacaggcccgctgtgccgccggctggctgaccattttaccgctgggtggtgataccgcccgagccgtaggaatggcgctgacgccgacgcgaattgcgctgctgctgttagcggcttgcctgacggcgaccgcgacgatgactattggaccgttgagttttgttggtttaatggcaccgcatattgcgcggatgatgggctttcgacggacgatgccacacatcgtaatttcggcgctggtgggtggtttactgctggtgttcgctgactggtgtgggcggatggtgctgtttccattccagatcccggcggggctgctgtcaacctttatcggcgcgccatattttatgcgacaacggatgcccgatgcgacgctggcgcgtcttatcgggcctacaacggccccgaatcgtaggtcggataaggcgttcacgccgcatccgacaaccatgccatcaccactatcacggacgatggtgcgcgccgtttgcgcactctgttccagcgccagcaggctgatttggtcagcgtaagcaaatccggttttttcaccgctgattgcacgcacacctacgccctgatcgatgttgtaagaaccatctttaataatgcggtcttctaaaacccaggattcgtgatagctcgactgaaaatagagatcgccataatcaaggcgacgttcggccagttgaccgaggatcgcgaacaagtcctgatgtttcaggccgttcagcctacggttatgttccggtatgtaggcctgataagacgcacagcgtcgcatcaggcaacggctgtcgaatgcggcgtaaacgccttatcagacctacggtaatgttccgtttgtaggcctgataaaacgcacagcatcgcatcaggcaacggctgccggatgcggcgtaaacgccttatccgacctccggttatgttccgtttgtaggcctgataagacagcacagcgtcgcatcatgcaacggctgccggatgcggcgtgaacgccctatccgacctacggttatgttctggctcgttggcctttggcaacgattatcctatgagattggggcaattacgcgccctcgtcaaatcattgcgctttttctttacgcggttggcgcaaacattcgttgatttgcggatcgtccagcggacccgaaatgcagtgacgaagatccgggagtttattctccagaagatctactccttcagaaagcccatgaccaactaccagatcccccaggcggccctgctgaagtacagtgaagtgactgggattggacccaaggctccggaggtagttggagcacaggtgcaccacaccggcagttcgctggacaggatgacctcttcaaacttacctttggtttcccagggcgtggggcggagatatgctcatgtggtgttgaggaaagcagacatcgacctcaccaagagggctggagtactcacggaggatgaggtggagcgagtgatcaccatcatgcagaacccacgacagtacaagatcccagactggttcctgaacagacagaaggatgtgaaggatgggaagacatcagatacctacctcccctcggagccgctcagcctgcccacgctcaatcaaggcttcagcctccttcacgaatgccaccagacccccgaaggggggagacagcagctcctcaatgaactcctagagagaagtgcaagcacacacagg

SEQ ID NO: 22465 - DNA, 541 bp, Homo sapiens
  SIMILAR (424)..(498): 1001254mologous to Drosophila melanogaster ribosomal protein S18,accession number L22959,Smith-Waterman Score=128.
  misc_feature (1)...(541): n = a,t,c or g
gcacgagccgccgcttgtgctgcagccatgtctctagtgatccctgaaaagttccagcatattttgcgaggtactcaacaccaacatcgatgggcggcggaaaatagcctttgccatcactgccattaagggtgtgggccgaagatatgctcatgtggtgttgaggaaagcagacattgacctcaccaagagggcgggagaactcactgaggatgaggtggaacgtgtgatcaccattatgcagaatcccacgccagtacaagatcccagactggttcttgaacagacagaaggatgtaaaggatgggaaaattccagccagggtcctaggccaatggtcttggnacaaccaagctcccgtgagaacctgaagccacttaaggaagattcggggcccataaaaggcttgcggcaacttccgggggccttcgtgtccgaggccagcacaccaagaccactggccgccgtggccgcaccgtgggtgtgtccaagaagaaataagtctgtaggccttgtctgttaataaatagtttatatacct

SEQ ID NO: 22466 - DNA, 1200 bp, Homo sapiens
  SIMILAR (739)..(1197): 891254mologous to synthetic construct InsB peptide,accession number Z37515,Smith-Waterman Score=714.
atgggtcttcaccgacggttcatcttgatcctgcgtgcatgccgccttggacaaattcttccggcggggccaaccttgatggaggtgttctccagggctgtggtccgcagggatatcttgttgagtatgcgggagggatgtggctgccatcatacagaggccaacaccttgagcccaggggatggtgaagagagaaaatggaaggaacaaggttcctcatctccagactgttacgagaatgagcaacggccggatgtccttcctgctccgctactgaaggcgtggtgcgtaacggcaaaagcactgccggacatcagcgctatctctgctctccttgccgtaaaacatggcaactacagttcacttacaccgcctctcagcccgtgcacgcattatgggcgttggcctcaacacggttttacgtcacttaaaaaactcaggccgcagtcggtaacctcgcgcatacaaccgggcagtgatgtgattgtctgcgctgaaatggacgaacagtggggctacgtcggtgctaaatcacgtcagcgctggctgttttacgcgtatgacaggatacggaggacggttgtggcgcacgtcttcggacctgcaggcatgcaagattcgcgacagagcttacattcgagcaggcgtgacctgtcgctactgacggatgtgcgtacggcaaagcacgccgacttcggctatctcgctctcaagcgtaaaacatgcaactgcgtcacttacacgcttctcaacccgatcgcaccagaaaatcatgattatggcatgaatgacccgggcagtgacgtcatcgtctgcgcggaaatggacgaacagtggggctatgtcggggctaaatatcgccagcgctggctgttttacgcgtatgacagtctccggaagacggttgttgcgcacgtattcggtgaacgcactatggcgacgctggggcgtcttatgagcctgctgtcaccctttgacgtggtgatatggatgacggatggctggccgctgtatgaatcccgcctgaagggaaagctgcacgtaatcagcaagcgatatacgcagcgaattgagcggcataacctgaatctgaggcagcacctggcacggctgggacggaagtcgctgtcgttctcaaaatcggtggagctgcatgacaaagtcatcgggcattatctgaacataaaacactatcaataa

SEQ ID NO: 22467 - DNA, 1908 bp, Homo sapiens
  SIMILAR (388)..(816): 891254mologous to synthetic construct InsB peptide,accession number Z37515,Smith-Waterman Score=653.
atgagaaccgccatcgccactgtcatttgctgcaacaactgccaacgtcgccacaccaacagccgttgccacaccgacaactgtcgccgtgccgacagcgccagcagccacgccaccagtggtagtagcagtcgtggttgcgccggtagtggtcgttgtggtgccagtagtacccgtcgttgcctcggtcccgtttgttgcttcaggggcagcaaacgcagctggcgtcgtcaacatgaaggccataaggattgcagaaagcttgtgtttcataacttttcctttattcatcgcatggacaatacggctgtccctcctgttcagctactgacggggtggtgcgtaacggcaaaagcaccgccggacatcagcgctatctctgctctcactgccgtaaaacatggcaactgcagttcacttacaccgcttctcaacccgccgggcagtgacgtcatcgtctgcgcggaaatggacgaacagtggggctatgtcggggctaaatcgcgccagcgctggctgttttacgcgtatgacagtctccggaagacggttgttgcgcacgtattcggtgaacgcactatggcgacgctggggcgtcttatgagcctgctgtcaccctttgacgtggtgatatggatgacggatggctggccgctgtatgaatcccgcctgaagggaaagctgcacgtaatcagcaagcgatatacgcagcgaattgagcggcataacctgaatctgaggcagcacctggcacggctgggacggaagtcgctgtcgttctcaaaatcggtggagctgcatgacaaacagcaaggtcttgatgcggcgctgattgatgcgccgttagcagtcgatgcacaaacgcctcttagcgagttgctctctcatgtcggacaggcaccctgtgcggtgcccgtggtcgacgaggaccaacagtatgtcggcatcatttcgaaaggaatgctgctgcgcgctttagatcgtgaggggggcgtgcgcgttccggtgatatatcctaaacgtttccggaccactgatgtttgcatgcccctttctctgggtacctgtattcgtgagattgaagcagagtttccggatccgattttccgtcgttccgtggtctacatttgcgaacataataccaatggtgcaatggggatcatcgtcaacaagccgctggaaaatctcaaaattgaagggattctggaaaagctgaagatcacgccggagccgcgtgatgaatcaatccgtctggataaaccggttatgctcggcggtccgctggctgaagatcgcgggtttattttgcatactccggcctccaattttgcttccagcattcgcatttcagacaacacggtaatgaccacttcccgcgatgtgctggaaacgctcggcaccgataaacaaccgtctgacgtattggtggctctgggttatgcctcctgggagaaaggtcaactggaacaagaaattctcgataacgcgtggctaacggccccggcagatctgaatattctgttcaaaacgccgattgccgaccgctggcgcgaggcggcaaaactgattggtgtggatattctcaccatgcctgcacaggacggtacgccggactggaacattatcgagcgtttactgaaagagtggcagccggacgaaatcatcgtcggtttgccgctgaatatggacggcaccgagcaaccattgactgccagagcgcgtaaatttgccaaccgtattcatggccgtttcggtgttgaagtaaagctccatgacgagcgtcttagcactgtggaagcccgttccggtctgtttgaacagggcggctatcgggcgctcaacaaaggcaaagttgactctgcctctgcggttattattctcgaaagctatttcgagcagggatattaa

SEQ ID NO: 22468 - DNA, 5298 bp, Homo sapiens
  SIMILAR (4482)..(3520): 991254mologous to Escherichia coli K12 putative 2-component regulator,accession number AE000418,Smith-Waterman Score=1648.
ttaatttcgacgcgttaaagcagtattagcgtgtagtggacgtggtggttgaggtgttatgagaaccgccatcgccactgtcatttgctgcaacaactgccaacgtcgccacaccaacatgccgttgccacaccgacaactgtcgccgtgccgacagcgccagcagccacgccaccagtggtagtagcagtcgtggttgcgccggtagtggtcgttgtggtgccagtagtacccgtcgttgcctcggtcccgtttgttgagccgggcagtgacgtcatcgtctgcgcggaaatggacgaacagtggggctatgtcggggctaaatcgcgccagcgctggctgttttacgcgtatgacagtctccggaagacggttgttgcgcacgtattcggtgaacgcacctttgacgtggtgatatggatgacggatggctggcccgctgtatgaatcccgcccagcattcaccggacgagattgcgtagacgacgctttttttgccgtagcaggcgtctgacgctgggtcgccatcggcgtatgtttcgtcaacgccggacgggtattgcggttctggcgacgagcttcacgcatctcttcaatggttggcgcaggcactaagcaatcgcgacggctgccaatcagatgctttttgcccatcgcttccagcgcctggcggattaacggccagtttgccggatcgtggtaacgcaacaacgctttatgcaaacgacgctgtttgtcgcccttcggtacgaagacgtcttcgctcttataaccaatcttcgccagcgggtttttcccggtgtaatacatggtggttgagttcgccagcggcgacggatagaagttctgcacctggtcgaggcggaagcggtgctttttcagccacagcgccagattcaccatatcttcatcacgcgtaccggggtgcgcggagatgaaataggggatcagatactgctctttacctgcctgttttgagtaagtatcgaacagctctttaaagcggtcatagctgcccatgcccggcttcatcatcttcgataacggcccttcttcggtatgttccggggcaatcttcagataaccgccgacgtgatggtcgccagttctttgatatagcgcgatcttccgaatgcggaactgtgcgtgccgcaaactatcgatgcgggggccgaagggcgtgcggtggtgaatctcaaccgcttcgacctcgccatgctgaaaccgtttatgccagaaaccactcaggccagcggtatcttcacgggtaaagcggacgttgcctgggacaccacgaaagaggggctgccgcagggcagtatcaccctttcggggcgtaacgtgcaggtaacgcaaaccgtcaacgatgcggcgctgcccgtggcgtttcagacactgaatctgacggcggaattgcgtaacaaccgtgccgaattgggctggaccatccgcctgaccaataacggccagtttgatggacaggtgcaggtgaccgatccgcaaggccgccgtaatcttggtggcaacgtcaatatccgtaacttcaaccttgcgatgataaaccccatctttacccgtggggaaaaagcagcggggatggtgagtgccaacttgcgtctgggtggtgatgtgcaaagcccgcagttgtttggtcagcttcaggttacgggtgtggatatcgatggcaactttatgccgtttgatatgcaaccgagccagcttgcggtcaactttaacggtatgcgctcgacgcttgccggtacagtacggacccagcagggtgaaatctacctgaacggtgatgccgactggagccaaattgaaaactggcgggcgcgggtaacggcgaaaggcagtaaagtgcggatcaccgtgccgccgatggtacgaatggatgtatcgccagatgttgtattcgaggctacaccaaacctgtttaccctcgatggtcgcgtggatgtcccttgggcgcgcatcgtggtgcacgatctgccggaaagcgcagtaggcgtctccagcgatgtggtgatgcttaacgataacctgcgccacggaaagttcctgccagcgcaggccgcgcgcggtgatatctgccagtagttgtggcgcttccaccgtgccgcgtactttcaccagccctttcgctgtaccgccaagccccggcagcgcgttatccagccccggcgcgttgatggtggcatcaagattgagatcttttacccccagctcgcctttcacttcggcactgtttggcccgagttccagatgaagctctgggatcatccactgcatataactgttgcctttcagcgtgccgtcaacgttcactttgttctgtttaacgttaccggtcagcttcaactccggcacgtccatctgccaggtgccgccgtacaggctaccgcgggttttaatcaagccattgagtttcgacggccagtccgggaactctttggcggtgttaatgccgttaagcgttagctcaccgcgccaactaatggcctgttgccagtcgagcaacgccttgagttcagttttcccttccagcgccgcgacggtgagtttgtcgagattgacctgctgttcattacctttggcgtcgagggtaatagtcgcgggcgggatctcctgtcccttcactgccgtacgcatagagagcgtgtaatcggtcattttgccggtaagtttcagtttcagatcatccgcctgatactgcttctcaccagtgaacggccagtaaagctgtttgctgttcacttccacgttgagcggcaatccggcttccgccagtcgcgtctgggcgcgtaaatccatatccaccggaccggaaagattaacgccaatctccagctgttcgcgcagcgcgccgcccattttcagcttcactttttcacctttcaacggctccacgttcagtgtactgttgagagtgatgtccaccggccagttgtctgacagctgcgccgtgccgctggcgttgacgatcccttgactggaatcgatatccagggcgtccagtttagtattgccgtcaatgctgctcactcgtcgaaaacgccgggcgaagtgttgcaggataaaccggatacttatcttctcgctggagatgccatcagaacagatcatgatgcgttctctggcgtcgctgtcgcgcgttgaccagacgggcagctcgatgacgaagactgggcgcgcatttccggcaccatgggtattttgctcgaaaaacgcaatatctatatcgatgactcctccggcctgacgccaacggaagtgcgttcccgcgcacgccgtattgcccgtgaacacggggcatcgggcggcgctttccgataaccgtacgctggaaattgcagaaatctctcgctcgctgaaagcactggcgaaagaactgaacgtgccggtggtggcgctgtcccagttgaaccgttctctggaacaacgtgtccgactaacgcccggtctaactccgacctgctgtgaatctggctctatcgagcaggattcggacttgatcatgtttatctggcgatcgctgccaaacgggtaaaaggttttctcttcaatggctttcagcagcattgcctgttcgtctgcgcccagttcgccaatctcatcaagaaacaacattccgccgttggcgctgcgtaataaaccttcacgagattcccgcgccccggtaaacgcgccttttacatgaccaaacagcgtcgacatggcggtatcgccgcgcagggtggcgcagttcacttccacaaacgcgccgctaaactgatgccgcgcctgttttaactctaagatgcgtcgcgccagaaatgacttgcccgcgccggttggaccgttaagcagaatcggcgcgcgggatttgatcgccactttttcgatctgctcaatcatgcggttgaagtgggggttacgcgtggcaatgccggacttaagaaaatcaagcgtttgctggcgttcctcggcaaagcggctggcgatggcgttataacggcttaaatcgagatcgataatcgttacttcacctgggccgcgcggctgttcttttttgcgcggaggtgaagattgtatcagccgggcgggcaggtaacgcgcttctgccagcagaaaccagcaaatctgcgcgacgtgggtaccggtggtgatgtgaattaaatagtcttctttttctggctgaaactcgtaaccacgggcgaaatcatgcaggcaggcgtagacctcttcgaaatcccacgggttatgcagttcaatctcaacgctcaccacttctgtttctggcgaaacgctggcgatatcgcgtttaagcgtttcaaatagcgagcgcgagcgggcgtcgtgcaacaattccagtcgatcgatgaccaacgattcttgctggcataaacagagtgtcggacgccattttgaccagcgctgactgccgcgcccggcataatccagtacggtaccgacaaagcccaaagccactgttttacgcatcttagatatccttataaaagacgatatttcattatcggtaaattggctttgcgggaaatctccggttacgttgccgcaacatggctcattgacccccctcctttcatccggcttcgggttgagtaatgaagctatgcgctgggagcaggcattttctttgtggtatatgcgtttctgggtgttccggcgaatcttttgatgcgcaaactgggggccagaacctggattggtacgacaacactgctgtggggatttctttcggcagccatggcatgggccgatactgaagcgaaatttctgatagttcgcactctgcttcgtgctgcggaggccggatttttccctggtatgatttatctcacctcgcaatggtttccgcagcgtaatcgcgccagcattatggggctgttgcgccagacttttcagcacgttcacacaaacagccgtcaccactgctccgacagccactgctgcgatataacccagcttgccttcaaccaccggcagcacaatcagaccaccccagcctgcatagcactgcgcaccgaccagcgccgcagttactgcaccacaaactgaaccgaccatgatggaaggaatgacacgcagcggatcggcagcggcgaaaggaatcgccccttcagtaacgccaacacagcccatcaccagtgccgctttgccggtttcgcgctcttctgcggagaaatttttacgaccaatcagcgtcgccagccccatccccagcggcgggatacaaatacccacggcagcgatggccaccacggtataaacaccctgagcaacgcaaatcagcat

SEQ ID NO: 22469 - DNA, 474 bp, Homo sapiens
  SIMILAR (37)..(471): 1001254mologous to synthetic construct InsB peptide,accession number Z37515,Smith-Waterman Score=764.
atggcaactgcagttcacttacaccgcttctcaacccggccgcagtcggtaacctcgcgcatacagccgggcagtgacgtcatcgtctgcgcggaaatggacgaacagtggggctatgtcggggctaaatcgcgccagcgctggctgttttacgcgtatgacagtctccggaagacggttgttgcgcacgtattcggtgaacgcactatggcgacgctggggcgtcttatgagcctgctgtcaccctttgacgtggtgatatggatgacggatggctggccgctgtatgaatcccgcctgaagggaaagctgcacgtaatcagcaagcgatatacgcagcgaattgagcggcataacctgaatctgaggcagcacctggcacggctgggacggaagtcgctgtcgttctcaaaatcggtggagctgcatgacaaagtcatcgggcattatctgaacataaaacactatcaataa

SEQ ID NO: 22470 - DNA, 404 bp, Homo sapiens
  SIMILAR (200)..(394): 981254mologous to Escherichia coli member of cooF family containing 4Fe /4S iron sulfur centre,accession number X72298,Smith -Waterman Score=336.
ctcgcgcatacagccgggcagtgacgtcatcgtctgcgcggaaatggacgaacagtggggctatgtcggggctaaatcgcgccagcgctggctgttttacgcgtatgacagtctccggaagacggttgttgcgcacgtatcggtgaacgcacaatccgaactttaacccggcgtctgttccgttgcttaaggagcagccatgacctggtctcgtcgccagtttctcaccggcgtcggcgtgctggcagccgtcagcggcaccgcagggcgcgtggtggcgaaaacgttgaatatcaatggggtgcgttacggcatggtgcatgacgagtcgtaatgcatcggctgtaccgcctgtatggatgcttgtcgggaagtgaacaaggtgccggaaggcggtctcgcgc

SEQ ID NO: 22471 - DNA, 2313 bp, Homo sapiens
  SIMILAR (1926)..(1991): 771254mologous to Plasmid F helicase I,accession number M54796,Smith-Waterman Score=81.
atggaggaattcctagagaaaggttctatccttatgtacttaaatactgatttagaggttggttatggagacagaagaatactaagtgttgggagccgttaccagtggaggaccacccatgagcacggaagccagagcatatctggaccatcatcacagcactcttccaccttgcgcctacccagagtaggtttccgttcttcccacttccccttccgggtcgggaccctgcccatgttccggtcttcgcacgagtctagaacgcagcaactccgccggcgtttccatggtggcaatggccggttccttgcggggctgagcaacaaagtagtatcagtgttcggtgctccactggaactacgcagagccagaccagcgggaccacagaatgggcgaggcggcggcggctgtttggataaagtcaacagcgggacgtggggcgtacgccggtccggcatcctaagacttaggaccatctggttgcaggaaaacaagctcagggctcccctgattctacattatgctactgacggggtggtgcgtaacggaaaagcaccgccggacatcagcgctatctctgctctcactgccgtaaaaatggcaactgcagttcacttacaccgcttctcaacccgaaaatctgttggagcaggatttttacgccagtggcccgaccagaagtgggcaggagacatcacgtacttacgtacagatgaaggctggtgtatctggcagtggtcattgacctgtggtcacgtgccgttattggctgtcaatgtcgccacgcatgacggcgcaactggcctgcgatgccctgcagaggcgctgtggcggcgtaagaggccccggaacgttatcgttcacacggacgtggcgacttatgcttccgaaaccaaccggctgaaggcgctgttgcaaaactgcagcgcatgcagttcggtaaaagctcagaaaaacttccgcaaaaatcgaacggtaaatacaggaagcacaggagcgaatcagcgcattcaggaggaaatggcagaaacactgtggtgctacgtccgtgatgaccgtgatgccggctcggagatgccccggcggtctggttcgcgtacagtcctgctggaaaggtatccattcaaaaatcacctggccggttacagcgggaaggaaggtgccgcattcatggcgctgatggcaaaaaagcacgtttggtcgtcctgttgccggagggatggtcacgggacatacgacgttcctgtcactcagccaggaggtgctgttatccctgctcagttctgcattgcgtgcagcatccacggcgttcagacccgcgagtgtggtcaccgtcacgcagtccgcttgacccgctggaaaccgctatcggattccacatcgcgactggtggcagccgacaaaagcaaacttcttcggacacctgaaaagccgcagattatcgcagccctgaatgaggccggactgtccgaccatgaacgcacggaatatgaagatatccgggctgccggaagtgatgaacgccttcaccgggtaccggaaacggccatactgacacaggccattcgcattgagctgaaaacacagggcgtgtcggactcccggagccggagccgttatctgcgggatatgtaccgtccggggatggtgatgggcagtggaacccggagacacgcagtcatgaccgctatgttatcgaccggtgacggcgcagagtcacagcctgatctgcgggatgcgcagggtgaaacgaggtggtgcgtatttcctccctggacagcagctggtcgctgttccggccgaaaaaatgccggtggcagacggcgagcgactgagggtgacagggaaaatcccggactccgcgtctccggcggtgaccgcctgcagatggcaatggacaatgccaccctgaacggtctggcccgagtggtcgtgatgtccggctgtattcctcactggatgaaacccgctctaccggaaaaactgaaagagcaggttgaggcgctgggctatgaaactgaagtggtggtaagcacggtatgtgggaaatgccgggtgtaccggtggagctcttttcggacgctcacagactatccgggaggccgtcggggaagacgcctcgctgaatcccgggatgtggcggcgctggatacgccatgtgatccggagatcaaaatggccgagtggatgcagacgctgaaggaaaccggttcgacatccgggcatatcgtgacgcggcggatcagcgtgcggatctcgcacgtgacgcccgggcctgcttcacaggacgggccggatgtgcagcagcggtga

SEQ ID NO: 22472 - DNA, 4977 bp, Homo sapiens
  SIMILAR (2283)..(2333): 941254mologous to Escherichia coli arginine decarboxylase,accession number M93362,Smith-Waterman Score=84.
atgacttgtaggcgggacgctacacaggtggaggacacggccgaattcccattttccatgcttgcttatcaaagaacttgccccaacaactcaggtcacatttctcaacaggcacagcatggttcaattcgcactccaccagattccagccatgcattgggtggcagcccctcatggcaaacttcaccaatccattgtgtggtgcaggtttgcaaagggtgggccacatggcccccttccattccacaacagttccaaagttctcaatctgataaccagaaagccacaactggcctctcataccggacaaatgcacacaagctagtactcccagaaccaaccaggaccgagctaggacagaacccgtacaaaaccagccatggccacaaaaggggcacggccaacacacttacaccaccaacaaccgtacagaccaaagaccccaatcaagcacacacggcagctactgactacatgccatcgtatagcgccgattttcacaagcggtgggtaccatttacctacgtgcgtgctggccgggacccggtatgcatattaggttctggcctgcatggaatgcttggttgctacggccgataccggcagcgaataattttgcgcttattgcgggccgttgtgctttaccgggatcgtgatttcggttcacctaatgcaagtgccaggctcgacttcggtacctcctctcatcacggctctgcgtctatcgccacgtgggcttaccgtcttcgggggatcacggtcatgcctattaaactttactcactaagacttgcttacctggttgctcttcgtgggctctccactcacgagggatcgggtaccccccaaggaggacctacgtatcggttttacattccactattccggccacttcggagaaaggcgctgcactatctctcttccaaagtcgactcctctgccaagtcttctagtggggggaccgggagcagacatcacaaaccaatgagttgtaccacactccaccattacaactgtacaacggagccacagaccattcagtacaactattaccgacccaactcgcccaagaacaaccagggcgaatcacaactagaagtgtcgccgccaagaatagtagtcgttggaacaattggaccagaaggcgccaactaccgttattgtgaaagcagtgaaagacagggctacaccacgacaaacaaagagcaacacaacaaataccaacggaaacaacaacaaaagagggaggacaacccccagcaaaaacaaccgcaaaaccaccatggtgataccccaacaaacagagcagagaaacaaaacatctacaacaaccaacaccacacccgagggcccccacacagtgaacccaatgggaaaacaccaagacccgagaatagaggaccaacacccccaaccacatcagaaggggtgaccgtcagcagcaatacacaacactcaagagagcaagtaaagacgccaaccaaaagaaaaacaatcaatacacagagaagtcaaaacacaccccaaaagtgcagaacagcacgcagaaacacacgagacgaaccaaacagaaagcacaccaaccaagaaaaccaggaacaaaagaaagcagaaaaaaaaaagggcacgtgcaattgtagtactacctctactatgtcgagctgcatcagagatccccgtgaccccgaggtgactctctctcctgagcgcgaaaccgtctatatggtgccaagccgcaaccgctacggcattatcgggccaatcttccgcaggaaatgcaacctgaaaccttgcagaagaaaatcagtgaaagccgctgaccaaagacaaagccgggcaaaaaccgtcttactgcgtggtgacaactgcacctatgacggcgtgtgttataacgctaaagaagcgcaggatcgctggaaaaaacctccgatcgtctgcactttgacgaagcctggtacggcatgcacgtttcaacccgatctatgccgatcactatgccatgcgcggcgacctggcgatcacaacggtcctaccgcttcttatattcatgtacgtgaaggtgtggggcgattaaacttcttccgcttcaaccaggcctacatgatgcatgcaccacctccccgctgtatgccatctgcgcatccaacgacgtggcggtgcgatgatggacggcaacagcggcctgtcactgacacaggaagactgctgggtaatgcatccgggcgaaagctggccggcttcaaagatattccggataactggagtatgctcgacccgattaaatcagcatccttgctccgggaatgggtgaagatggtgaactggaagaaacggtgttccggcggcgctgtattcaaatctgtgtctctcatcaggcacaacaggcctttcaacagaagcactcttagaggcgtttgcatgactctacggctatcatctgcccgactcaacatgctctgcgtaacgcgttttgctccaccgattgtagaacgacagcgacttccgtcccagccgtgccaggttctgcctcagattaggttatgccgctcaattcgctgcgtatatcgcttgctgattacgtgcactttcccttcaggcgggattcatacagcggccagccatccgtcatccattcaccacgcatatacggtaaaaaccggaagttttaacgggggcgatggtggaatacttaaccaagaacccggctacgtggcgagacaacgccaaaagggtccccctattatacgagaagaaacagaagcatacaaaatgactacttcgggccgtcagttacgcgtaccctggaaagtggcgcgggcgccaaaggaaccaacgtccggttgtgtattatactatgccgcgacgcggcactgtgggagaggacggaggcaggcagctgcatcctgtcaggtgactctagaggacccggtctggattggctttgatgatcaccgtcgtaatctcggtcatacacggcttccggagcgattaaagatcagatctcagtgtgccggagcagccgctgacgccgccaccgggtattgtgacggtgaattcgatcgcagcaccgggcagttagctaatggtggcaacagccgcgaagatatttcatcgaagtttgctgacaaagtgcacttgtttatgcggatacggcgtgaacgcgttatccggctaacaaaatcgcaaactcacgcatttacactcgcccctgccctttcaaccattcgcgcacgaggacagcgcactgacattgcgcgcttcattgaagtcagggtcttccagcaaaccatcatatgcgccagcggccagcgcacctgtggtagcggctctggctctcgccttccagtgattccgggtagagatcttgcgctaccacgatattcatttgctggaaaaaacctattcgtagatcagtacagggataccggacggaccgtgtgtccaccggccaatcacgaccgctgggcgcctctaaaaacacagcacattgacaaaagccataaaacgaagaaaaacaaggggggttacttgggaccacactgctgtataggtcccgagggggagtgtttcaagcggcgttggggatatcccccatctatattagactacggcagcacgtttttgtgtcggagatgctcctcctggtggcaggagagcggtcgggtgggtggatgtttagtgtgtacgaccacgctgcggatagtgtgccctgcgcagcggtggtcgagggatggtggtctactactacagccatcgtatagcgccgattttgagcaaccaaaagaggaaaagcccgcgttacgcgtgatggatggagacacaggcgacggtgtactaaccattgcgggcctgcggtgtaaagatatgcacgctgccccagttcgctatcggaatcaggatgaccatggctacaaattacacacgggaacaagattctatgtggaattgtgtggtgatcgcttccggctgagggcacagggcttaccccacttaggacgcacgctagaatcagagccggccaggaagtggaacccaccaaaaacaaaggaaagcccgacggaactccacgggacatgggaaccacgatgggacccggccatcacaccaaaagcgccccgggacaacaccacaaccagagcacgcacggacctccacccccccccacgaaacacaattcatctaaatgaaaaatccatcacagatcatatgcgggtgtacccgggggcccctgttgttcacctccggagcaggggccgtcagcccggagtagacggcggcgactctctcacatcacgtgcggcagctataagagtccccccgcgtaaatgtccccagatgtgcatcacccaattccccccgcgtgttactcacacgaagcactacttgttctatattagcctgaaaacagaccaatacaaacagctgaaaaaagaactgccaataaataaggcattaagagccccagaagagctactctctccagccagaggaccaagtaaaggaagtcccgtgggacagaactttctgatcttacctgccctactcaaggcaaacaacaccaaagaaatacacatcctttgccccaccttccaccccagcttcagcttgggatgctacggagggagccctgtggcctctccccactacagagtaaacagcagccagcaacatagaaccacatccagctttactaaccacattcagatgatttacaaaagaagaggaggatcaccaatgaggaaggcaccagagatttatgaagaagagctagttggactagtcattcacttcttgggccttggttgcctaattagaagggtacagattcataacactaataatgctatatgtttttactggattgaaaaattaagcacatgggtggcagatggtgagacccaggtctctcctattgaagtgggaacttacagacagaccagaggaagaggatacagtgactatgtggtaataaattag

SEQ ID NO: 22473 - DNA, 1233 bp, Homo sapiens
  SIMILAR (379)..(777): 981254mologous to synthetic construct insB,accession number M27083,Smith-Waterman Score=696.
atgatcatgacttgggccaaggcgatcactgaaggctgtgagaaggccatgtgcttagctgctgccgcaaaggcaagcgaaagcaccagtactaccgctgccgttgccaacagaaaacgtacccgcagcgagagcgggaaaaaaagacgcagtaattttttcatcagcgcaattcgaacagatagccctggccgcgaacggtgctttcacgggcggttaataccagaatcggcagtgaaacatgcgttgctacgccagcggcgaatcagtgacagaccgtcctcgtctggcaatccgagatgcgacaatcggcatatccgggttttgttccttggcataataatcgggttgggtaccgaggtcgaattcggaatcatggtcaagccgggcagtgacgtcatcgtctgcgcggaaatggacgaacagtggggatacgtcggggctaaatcgcgccagcgctggctgttttacgcgtatgacaggctccggaagacggttgttgcgcacgtattcggtgaacgcactatggcgacgctggggcgtcttatgagcctgctgtcaccctttgacgtggtgatatggatgacggatggctggccgctgtatgaatcccgcctgaagggaaagctgcacgtaatcagcaagcgatatacgcagcgaattgagcggcataacctgaatctgaggcagcacctggcacggctgggacggaagtcgctgtcgttctcaaaatcggtggagctgcatgacaaagtcatcgggcattatctgaacataaacactatcaataagttggagtcattacccaacccgaataacaaactgccggtcacctgcaccaactgtcacggccagccatcaccgcaacaccgcgaaggggtgaaagatgtgatgcgctttaacgagccgatgtacaaggttggagagcagaacagcgtctgtatgtcctgtcatctgccggaacagttgcaaaaagcgttctggccgcacgatgtccacgtaaccaaagtggcgtgcgccagctgccattccctgcatccacagcaagatacgatgcagacgttaagtgacaaaggacggattaagatttgcgtcgattgccacagcgatcagcgcaccatccgaactttaacccggcgtctgttccgttgcttaaggagcagccatgacctggtctcgtcgccagtttctcaccggcgtcggcgtgctgcaaccgtcagggggatcctctag

SEQ ID NO: 22474 - DNA, 2655 bp, Homo sapiens
  SIMILAR (2655)..(2176): 981254mologous to Escherichia coli TorCAD response regulator,accession number D90736,Smith-Waterman Score=796.
tcatttgctgcaacaactgccaacgtcgccacaccaacagccgttgccacaccgacaactgtcgccgtgccgacagcgccagcagccacgccaccagtggtagtagcagtcgtggttgcgccggtagtggtcgttgtggtgccagtagtacccgtcgttgcctcggtcccgtttgttgcagaaaatcattgatatggccatgaatggcgttggatgccgggcaacagcccgcattatgggcgttggcctcaacacgattttccgccatttaaaaaactcaggccgcagtcggtaacctcgcgcatacagccgggcagtgacgtcatcgtctgcgcggaaatggacgaacagtggggatacgtcggggctaaatcgcgccagcgctggctgttttacgcgtatgacaggctccggaagacggttgttgcgcacgtattcggtgaacgcaccggtaacagatatatcgcctccatcaccgctgaagtaatgaagtaaggcagcaagcctcgccatgttctccgccattttagaagcaaacaactgttgcctcaccatttcgtcaacgtttactttgctgttgccgccgcgtgcaatatcaacctgatcgtgccaggaccattcacactccagtcccagttcatgttcgacatgcttaccaaaatggtctggaatctgaatcatgaaggcgcactgacgctgacacaggttgtcgatgtgccggggcaggtgcagccgatggtggtcagcccggacaaacgttatctctatgttggtgttcgccctgagtttcgcgtcctggcgtatcgtatcgccccggacgatggcgcactgacctttgccgcagagtctgcgctgccgggtagtccgacgcatatttccaccgatcaccaggggcagtttgtctttgtaggttcttacaatgcgggtaacgtgagcgtaacgcgtctggaagatggcctgaccatgctgcatgaagagctttccagccacatgatgaaagaagagcagatcctcttcccgatgatcaaacaaggcatgggcagccaggcaatggggccaatcagcgtaatggaaagcgagcacgatgaagcgggcgaactgctggaagtgattaaacacaccaccaataacgtcacaccgccgccagaagcctgcaccaccaataaacagccagcccaaccccagcgcgataaaccacagcggggtaaccagcagcgcctggcgagtgtcatcttccagtgtcagcaacacgaccacgaacacaaagaacgccatacatacccagcacatcagcttgccgagcggcatcttgtagatcgacttctcatgtagatgaggacgctgtttgcgatacacaaggtacgagcaaaggataatcgtccagacgaacataaacagaatcgcggaaacggttgtaatcatcgtgaacgcgccaatcacactaggattcacatacaacatcaccacgccgccgagcagacagatacacgagaacgtcagcccaggtcggcgtaatcgaaggcttctggcgcgatacgacgccgctcttacgtcctggtaaaaaaatcggtgtgtcaaccgatgcctcatgttttccgctggtgccatttgcaaaccgggtgatcggcaatcgttttgtctggcaggggcgtgagtatcaactgcaaccgaatgttgagtgggatgcgcactatctacacggcgatggctggctgggcgagtggcaatgtgtctcgcacagcgatgatagtttgtgtctggtgtatgaacatcgcagcggtgtctatcacgcaggaactggattttaaccagcccgcgccgttgccgcgccagtgggtgaacaatggttttgccggatggaatggtcaggcccgcatcgagcagccgcaggaaggttatgccatcatcatggaaacgacgccacctgcaccgtgttatttcatctttgtttccgaccctgcgtttgataaaggatatgcgtttgatttcttccagcgtgtagaaaataaacagcaccgccagcggacgggtgaaaaagccaagcacgattaatatcgcggcgggcacttccataactaccgcaataatcgctgccagcatcggcattggcgcgcccaacgaggccatatattggaccgtcccctgaccccgctccgggtcctttacttcacacaggtacccggcatgttgcgtcaccagtaaatccgcgctgagtttatgacgtaaacgacgaattaacacatcgacggtgcgcaggtcagggttttccacccgacgcgcagaaagcatacgtagcagacgttcacggctgagaatttcgcccggattcgtcacaaatgccaccaacatttcatactctgcgcgggtcagtttaatcggctcgccatcccgctccagcgtatggcgcgacacattcaggcaataaccggcaaagcgatagcagttgtcctgagtgtgcggttgagcttgtcgcgcgaggtcgattcgccagagcagatttttcacccgtactaccagttcgcgcagttccagcggtttggtgacgtaatcgtctgcgcccatttccagcccaacaatacggtcaatccgatcgctgcgtccggtaaccagaataatccccaccgttgagcgttctcgcagggcgcgggttaacat

SEQ ID NO: 22475 - DNA, 489 bp, Homo sapiens
  SIMILAR (304)..(486): 1001254mologous to synthetic construct insB,accession number M27083,Smith-Waterman Score=314.
atgtcttccagacgcgtaccttccagccccgtggtgaagaccttcataaacgacctcaacaaccagatttggagaatgcctgggttgctgaacacaagggagatagcaggaagatataagaaactcctggaaatgacaataaatatgttaaatgtatttggaaatgaagattttgattgccatggagacttaaaagcagatcaactgaaaatggatattctgattaagaagctaaaacagaagttcagtaaagaaccttcttcaccacggggcggaaggaccacccgcggtgaataccgtgatgaatcccgcctgaagggaaagctgcacgtaatcagcaagcgatatacgcagcgaattgagcggcataacctgaatctgaggcagcacctggcacggctgggacggaagtcgctgtcgttctcaaaatcggtggagctgcatgacaaagtcatcgggcattatctgaacataaaacactatcaataa

SEQ ID NO: 22476 - DNA, 1194 bp, Homo sapiens
  SIMILAR (1060)..(1098): 841254mologous to Escherichia coli alternate name ygiH; ORF_o205,accession number U28379,Smith-Waterman Score=66.
tcagttttttaagctgggcaagcgggaagggaccatgatcaaccgattccgttgaagatgacgctctgaccgcttgttaatccacggattttctttcccggcaatgggtttcaggctccggaagacggttgttgcgcacgtattcggtgaacgcactatggcgacgctggggcgtcttatgagcctgctgtcaccctttgacgtggtgatatggatgacggatggctggccgctgtatgaatcccgcctgaagggaaagctgcacgtaatcagcaagcgatatagcgcagcgaattgagcggcataacctgaatctgaggcagcacctggcacggctgggacggaagtcgctgtcgttctcaaaatcgggtactgcttgctgtggacattgtttgacgcgggatataccaatgttgcaccaccagggaaaccagcttttttaacgtctttgagagcaactttattatctcccaaactcactatgccaaagggaaagttaagtttgggaacgactctaggggatctccgagtatctgactgcatcagtgaagctgccacctgccacagaaaatctctaggggatctccgagcgcgaacgggatcccgccattgcgggtgatctccttcgccgccgcctgcatctgcatgccgatctcccaatatggctgggtcaagtggtatttctagttctagatccctctgcggctccatttccagtgccattctggtttgccgcttgtgtgggctgcccgatccgcgaaccagcggctccggcaatccaggcgcaaccaatgtgttacgtatcggtggcaagggagcagccgtagcagtactgattttcgacgttctgaaaggaatgttgcccgtctggggcgcgtatgaattaggtgtcagccccttctggctaggcttaattgccatcgccgcctgtcttggacacatctggcccgttttcttcggatttaaaggaggaaaaggcgttgctaccgcttttggtgccatcgcacccattggctgggatctcaccggagtaatggcgggaaccttcccggtttcgatgtctcctgcctggtcctgctgcgtcatcatgacaacatcacaggggatcctcataatgatagtgtcgtactgcatcagcaggcggtcttgctggatctccgccagcaggataccgtcggtcatcagcttgaccat

SEQ ID NO: 22477 - DNA, 1656 bp, Homo sapiens
  SIMILAR (978)..(1052): 661254mologous to Escherichia coli Transcription-repair coupling protein mfd,accession number D90747,Smith-Waterman Score= 83.
ttacgccttattattcgttatccacgtagtgtagccgcaaaaccagcatacgattgagcggcaccagcgccctctctcgcagcctttcatcacatgaacctcgtgattgcttccttcctgttctaatgcctctgcgatggctgaaggccattcatggccatccacggacaatgcgcgcagctgcggcagttgcaccctcacctgcggttggtgcttccagtaactctttatctggcacgcctgctgcattttgtagaaaataccccgatcggttgccacaataagccctgatgtggcaatgttttcgcagcagcgatcagttgactggtggaaccgccgcatccgccatatcgacaatagcttgtggtgattctggatgcaccagatggcagcatccgggtattcttcttgcaagcgggttaacgccacaccagcggcagcaggatcagcgacaggctgaatccgaaagatggcatttgccttcgccgagatgcggttcgctgatgtcgtcaggaatatgcagctcacgtaacggaggccaatcaggatcatccagccaaagtcggcatcatctgcgatgccagcagcatcggcgctggtccaggcaccagaaatgcgccggtttcttttatctggtggtcgggtggtggtggcgctggcggcggtggagatggcacaaattatcctcaccggggcagcagtattatggagtcgatttcgaaatatcaacagcgttgccacaccgacaactgtcgccgtgccgacagcgccagcagccacgcaccagtggtagtagcagtcgtggttgcgccggtagtggtcgttgtggtccagtagtacccgtcgttgcctcggtcccgtttgttgcttcaggggcagaaacgcagctggcgtcgtcaacatgaaggccttaaggattgcagacagctgtgtttcatatcttttcagcgcatgacttgcagcatagtgatccatgggaagtggcgatatgcgcagttccccctctcgagcagcagcattacgacaactcccgcgaccgtttcgccaactggcggtacgtatggaaatgatctcccgtttccgcagcgccaaagagcagaccaaatccttgcggaagtggcggaaggcaaaatcgatattctgatcggtagcacaaactggtttcaacgtgctggtttgtacaaccattatcgaaaccgggatcgactcccgacagccaacactattatcattgaacgcgcggatcacttcggtctgcgcagctgcaccagttacgcggtcgcgtcggacgttcgcatcatcaggatatgcatggttgctgacaccgcatccaaaagcgatgactaccgatgcaaaaaacgtcttgaagcaattgcctcgctggaagatctcggggcaggttcgcgctggcaccgcacgatctggagattcgcggcgctggtgaactgcttgcgaagaacaaaccggctcaatggaaaccatcggtttctcgctgtgtaccagttcccaggcgctgatccgcgcgataccagacttcggcaggcgatgccgcataaaagtcgcctcaatacgctgcccggcgctatcccacgctggaacagttaccgattggttgtcgtctggggccacgttgcccgtatcacaacgagaatgcat

SEQ ID NO: 22478 - DNA, 1050 bp, Homo sapiens
  SIMILAR (1)..(471): 991254mologous to Escherichia coli AgaR,accession number AF228498,Smith-Waterman Score=763.
atgagtaataccgacgcttcaggtgagaagcgagtgactggcaccagcgagcgacgagaacagatcattcagcgtctgcgacagcaagggagtgtgcaggttaacgatctgtcggcattgtatggcgtatctactgtgacgatccgcaacgatctggcgtttctggaaaagcaggggatcgctgtgcgtgcctatggtggcgcgttgatctgcgatagcacgacgccgtcagtcgagccatcagtggaagataaaagcgcactgaacaccgcgatgaaacgcagcgttgcgaaagctgccgttgagttgattcagccaggtcatcgggttatcctcgattccgggaccaccacttttgagattgctcgtctgatgcgcaagcacactgacgtaattgcgatgaccaacggtatgaacgtggctaatgcgttgctggaagcggaaggcgttgagctgctgatgaccgcgggcatttgcgccctactgacgggttgttgcgtaacggcaaaagcaccgccggacatcagcgctatctctgctctcactgccgtaaaacatggcaactgcagttcacttacaccgcttctcaacccgccgggcagtgacgtccccgtctgcgcggaaatggacgaacagtggggctatgtcggggctaaatcgcgccagcgctggctgttttacgcgtatgacagtctccggaagacggttgttgcgcacgtattcggtgaacgcactatggcgacgctggggcgtcttatgagcctgctgtcaccctttgacgtggtgatatggatgacggatggctggccgctgtatgaatcccgcctgaagggaaagctgcacgtaatcagcaagcgatatacgcagcgaattgagcggcataacctgaatctgaggcagcacctggcacggctgggacggaagtcgctgtcgttctcaaaatcggtggagctgcatgacaaagtcatcgggcattatctgaacggggactttctacaatcaacactacgcgaggcgccattaattccacacactagggaacacccatag

SEQ ID NO: 22479 - DNA, 1539 bp, Homo sapiens
  SIMILAR (595)..(1212): 981254mologous to Escherichia coli glycogen synthase,accession number U18997,Smith-Waterman Score=1090.
atgtctgtagaagccgttctcgatgagaactccagccacgactttggcaaagatttgattcccaagatcaccgaagccggtctggcctatgcgcacccgttcccgctctcttgcgtacaatccgacccggatgccgagccgtactggcgcgatgtgggtacgctggaagcttactggaaagcgaacctcgatctggcctctgtggtgccggaactggatatgtacgatcgcaattggccaattcgcacctacaatgaatcattaccgccagcgaaattcgtgcaggatcgctccggtagccacgggatgacccttaactcactggtttccggcggttgtgtgatctccggttcggtggtggtgcagtccgttctgttctcgcgcgttcgcgtgaattcattctgcaacattgattccgccgtattgttaccggaagtatgggtaggtcgctcgtgccgtctgcgccgctgcgtcatcgatcgtgcttgtgttattccggaaggcatggtgattggtgaaaacgcagaggaagatgcacgtcgtttctatcgttcagaagaaggcatcgtgctggtatcctctcctcggctgtctataaaacccggcgttctggctgatgttattggggcattacccgcagcacaaatcgcagacggcgttgacgctcgcgtactgttgcctgcatttcccgatattcgccgtggcgtgaccgatgcgcaggtagtatcccgtcgtgataccttcgccggacatatcacgctgttgttcggtcattacaacggggttggcatttacctgattgacgcgccgcatctctatgatcgtccgggaagcccgtatcacgataccaacttatttgcctataccgacaacgtattgcgttttgcgctgctggggtgggttggggcagaaatggccagcgggcttgacccattctggcgtcctgatgtggtgcatgcgcacgactggcatgcaggccttgcgcctgcgtatctggcggcgcgcgggcgtccggcgaagtcggtgtttactgtgcacaacctggcctatcaaggcatgttttatgcacatcacatgaatgacatccaattgccatggtcattctttaatattcatgggctggaattcaacggacaaatctctttcctgaaggccggtctgtactatgccgatcacattacggcggtcagtccaacctacgctcgcgagctgccattgcggttttgggtatggcccccttacgctgtttgcctttcccgggggccgtgttcccgatcacccgtccaggtgaattatcgccggctcaccacgatcagaatggaccgtagcattcgctacaccgtattcgccatcttccacgcggttgaggatgtaagccgtcgctacgcgggtatccggcgtgacgaggaacacaatggcgctgacggtggtaatggcgcgcacaaagctgtaaatcagcgccgagaggatcgccgggcgcagcagcggcagcaggatgtgcgtaatggtacgcagggaaccggcgcgcaggctgagtga

SEQ ID NO: 22480 - DNA, 2655 bp, Homo sapiens
  SIMILAR (1417)..(2106): 911254mologous to Escherichia coli serA,accession number A25268,Smith-Waterman Score=1066.
atggggtggggaaagtttgtggggtttgccttgctggaattccttgcccccttggggacccccgtgtttgttgggatgttgcagacccctgaccttcgggccctgccgccgagagtgctctggcgagttaccacggccatggaggcccggctgccacgatgtggaaggaagggtctaagaaacatcttgtatgatgtgctgtgggatatggaggaggtagagaacagggctaaaaataaccttcctagaggtgcagatatttggcagagaccctgtattcctgggcctctcgctgacatgggctgtcaacaaactgtcacgctcttctctagatatgtccacttctgtcctgaagcagatatttttatgtacacagccatggagcctgaaggatcggagaaacccacaccgcccccgagaggtcgaaggcgcacagggaccgtcggcggccagctcggacctggacacgcgcagcagttaggctctgatatccaattaaaattgcaaggcttgggctacctgagcaagggttttgcccctgatcttgggaaaatgcgggcgcacgtagaggctgcaatcggcaagtttttacaaaacttcggggttttggaaacgctgttaaaacgggccttgcccaaagcccctttgcccaatttaacggggccaagtccacttctcaatgggcctttagcaatggatggattcgaagttaatggattacgattatttagcctctcgattccagaaccttcagttaaaaacctttttgccgtaaatgaattttatagaaataatgatgatttcataaaccctgatctacaagaacggccgcagtcggtaacctcgcgcatacagccgggcagtgacgtcatcgtctgcgcggaaatggacgaacagtggggatacgtcggggctaaatcgcgccagcgctggctgttttacgcgtatgacaggctccggaagacggttgttgcgcacgtattcggtgaacgcactatggcgacgctggggcgtcttatgagcctgctgtcaccctttgacgtggtgatatggatgacggatggctggccgctgtatgaatcccgcctgaagggaaagctgcacgtaatcagcaagcgatatacgcagcgaattgagcggtataacctgaatctgaggcagcacctggcacggctgggacggaagtcgctgtcgttctcaaaatcggtggagctgcatgacaaagtcatcgggcatatgtggtacgagctgattatgtcttgttctcgttgtttcttttcgtttctctcctgtgttttgtcgttcgtctgtcttacctccgacccattatggctggatcggacctctgcgaaacgatcacgcccagaaactgtcgctatgctgtttcgtatcgaacaaccaggtgatctgatgcgcgcgaaagcgcggatccccggtatttacgcaccgttctcaaatacgcgctctgttgcggagctggtgattggcgaactgctgctgctattgcgcggcgtgccggaagccaatgctaaagcgcaccgtggcgtgtggaacaaactggcggcgggttcttttgaagcgcgcggcaaaaagctgggtatcatcggctacggtcatattggtacgcaattgggcattctggctgaatcgctgggaatgtatgtttacttttatgatattgaaaataaactgccgctgggcaacgccactcaggtacagcatctttctgacctgctgaatatgagcgatgtggtgagtctgcatgtaccagagaatccgtccaccaaaaatatgatgggcgcgaaagaaatttcactaatgaagcccggctcgctgctgattaatgcttcgcgcggtactgtggtggatattccggcgctgtgtgatgcgctggcgagcaaacatctggcgggggcggcaatcgacgtattcccgacggaaccggcgaccaatagcgatccatttacctctccgctgtgtgaattcgacaacgtccttctgacgccacacattggcggttcgactcaggaagcgcaggagaatatcggcctggaagttgcggtgcacatccacgaaaaccgtccgggcgtgctaactgcgctgaacaaaatcttcgccgagcagggcgtcaacatcgccgcgcaatatcttgccaactgccgcccagatggttatgtggaaagacaacaagaaaggggcaatacgggtagctgcgaaataagcataagtaatattcaacacattgggaacgtgcgattaaaaaacattagtaaactggagaatatggagttctgcgctacaaaacaacgggtgtattttagtgataaaaacaagaaggctagttataaaataattaattatggagactattatgatgttgattattatgataacaatttgaaaaatgaagtttttgactggattgtaattgcaggtgccgatgagtggcaggaaattgaagattttggacatgaaagacttgaatggctaaagaaatatggtgattttgataatggcattccggtcgatgacaccattgcacgcgttgtgagtaacattgacagtttggcctttgaaaagatgtttattgaatggatgcaggagtgccatgaaatcactgatggtgaaattatagcaatagatggaagaccataa

SEQ ID NO: 22481 - DNA, 855 bp, Homo sapiens
  SIMILAR (1)..(396): 991254mologous to Escherichia coli GLYCINE BETAINE/L-PROLINE TRANSPORT ATP-BINDING PROTEIN PROV,accession number D90891,Smith- Waterman Score=663.
atgcaggatgagctggtaaaattacaggcgaaacatcagcgcaccattgtctttatttcccacgatcttgatgaagccatgcgtattggcgaccgaattgccattatgcaaaatggtgaagtggtacaggtcggcacaccggatgaaattctcaataatccggcgaatgattatgtccgtaccttcttccgtggcgttgatattagtcaggtattcagtgcgaaagatattgcccgccggacaccgaatggcttaattcgtaaaacccctggcttcggcccacgttcggcactgaaattattgcaggatgaagatcgcgaatatggctacgttatcgaacgcggtaataagtttgtcggcgcagtctccatcgattcgcttaaaaccgcggctactgacggggtggtgcgtaacggcaaaagcaccgccggacatcagcgctatctctgctctcactgccgtaaaacatggcaactgcagttcacttacaccgcttctcaacccgcacgtcgtatcgaagtacgtttcccggatccggcagctaacccgtacctgtgctttgctgccctgctgatggccggtcttgatggtatcaagaacaagatccatccgggcgaagccatggacaaaaacctgtatgacctgccgccagaagaagcgaaagagatcccacaggttgcaggctctctggaagaagcactgaacgaactggatctggaccgcgagttcctgaaagccggtggcgtgttcactgacgaagcaattgatgcgtacatcgctctgcgtcgcgaagaagatgaccgcgtgcgtatgactccgcatccggtagagtttgagctgtactacagcgtctaa

SEQ ID NO: 22482 - DNA, 810 bp, Homo sapiens; identical to SEQ ID NO: 14851
  SIMILAR (394)..(807): 981254mologous to synthetic construct InsB peptide,accession number Z37515,Smith-Waterman Score=719.

SEQ ID NO: 22483 - DNA, 1740 bp, Homo sapiens
  SIMILAR (574)..(870): 951254mologous to synthetic construct InsB peptide,accession number Z37515,Smith-Waterman Score=494.
atgggtggttgtgtgtgcgatcacgcgcaaaggaggaccaagcagccccatgaggaccgccacccccgacatataagctgttgtggagagagtgataaatgtacgcgtcagagaggggtccacatacttgcagcacacctggctggctatgtgtacaaaatgctgctttgttcaggggaccttataaaacatggagaagtaggtcttccaggcccccggagcggaagggggtacgaggatcgcgagcggtttcgaaaaccagtccgatttcggataccacgtcggatatccataaagattccgctttacgaaggggcggtttcacattatgcgtcttccctgagagagtgggcgcaatctgagttggcgaatattgggaattccgcttatccgcagatcgcggataccgcgattgtggaattagcgaatgtccggtccccaatgttagaggtgcgggtggacaattacggaattctcaattctaaatatgcgatggcaaattgggggtcccagggcatccccctcctggagggttacggggggatgcagatcaagagcgggtccaattcggattcactaagaggcctcaattggccgcagtcggtaacctcgcgcatacagccgggcagtgacgtcatcgtctgcgcggaaatggacgaacagtggggctatgtcggggctaaatcgcgccagcgctggctgttttacgcgtatgacagtctccggaagacggttgttgcgcacgtattcggtgaacgcactatggcgacgctggggcgtcttatgagcctgctgtcaccctttgacgtggtgatatggatgacggatggctggccgctgtatgaatcccgcctgaagggaaagctgcacttttatcggcataaaagtcatatgcataaagcgttggggcaacgaagattgcattgtgcatcgcaccaaaagctttcatcaaagcggcatcatcaaactcgccgaggatttctacgtttaatccctgggcgatggagagagcccatttcaaaggaggtcagcgcagagagtccccaagtgttgtcaagccgggtctgtcagggcccccccggttccgtgggccccctgaagggcctgaacattccttcattcaattccagccgcaaaaacgcaggggccacccccgcgcaacactctcgtcgacactccgcaacacctttgacaccaacagcggagaacccgccagccacagctcgcgttgtctctcagaacctaggtcttcctaaacaggatattgcgcggcgccctgttcgcgcccaaggcgtgcctcaaaccggacctggtgatctccccccgtgggcctccccaagggctgggggttacgagggtacaagtctccgcacatacgaacccccgcacgacgcaccgcaacaccccgcactacacacgcaacacacagaccagaccggaaagcacgccgcgccgggacacaaccacaccacagcagagacataccccaccgccacatacagggaaaagacgcggaacacccgaaacctgaaagacttccagcccacagaacgccagctaacgacatccgaccacgacagccagcgacacgcagcgcggtgcagagctgggctcatcctactaacacacacagaacggcgaacgccgccacatccgtggtcccaagaagcactgaacggggccagcgaggccccagaacaccgaacccaacggacacaacagcgcgacctagccaatgtg

SEQ ID NO: 22484 - DNA, 3147 bp, Homo sapiens
  SIMILAR (1246)..(2256): 1001254mologous to Escherichia coli Transcription-repair coupling protein mfd,accession number D90747,Smith-Waterman Score= 1767.
atgggattatccggctcgggtaaatccacaatggtacgccttctcaatcgcctgattgaacccacccgcgggcaagtgctgattgatggtgtggatattgccaaaatatccgacgccgaactccgtgaggtgcgcagaaaaaagattgcgatggtcttccagtcctttgccttaatgccgcatatgaccgtgctggacaatactgcgttcggtatggaattggccggaattaatgccgaagaacgccgggaaaaagcccttgatgcactgcgtcaggtcgggctggaaaattatgcccacagctacccggatgaactctctggcgggatgcgtcaacgtgtgggattagcccgcgccattaatccggatatattattaatggacgaagccttctcggcgctcgatccattaattcgcaccgagatgcaggatgagctggtaaaattacaggcgaaacatcagcgcaccattgtctttatttcccacgatcttgatgaagccatgcgtattggcgaccgaattgccattatgcaaaatggtgaagtggtacaggtcggcacaccggatgaaattctcaataatccggcgaatgattatgtccgtaccttcttccgtggcgttgatattagtcaggtattcagtgcgaaagatattgcccgccggacaccgaatggcttaattcgtaaaacccctggcttcggcccacgttcggcactgaaattattgcaggatgaagatcgcgaatatggctacgttatcgaacgcggtaataagtttgtcggcgcagtctccatcgattcgcttaaaaccgcggctgtccctcctgttcagctactgacggggtggtgcgtaacggcaaaagcaccgccggacatcagcgctatctctgctctcactgccgtaaaacatggcaactgcagttcacttacaccgcttctcaacccgccgggcagtgacgtcatcgtctgcgcggaaatggacgaacagtggggctatgtcggggctaaatcgcgccagcgctggctgttttacgcgtatgacagtctccggaagacggttgttgcgcacgtattcggtgaacgcactatggcgacgctggggcgtcttatgagcctgctgtcaccctttgacgtggtgatatggatgacggatggctggccgctgtatgaatcccgcttgaagggaaacttcacagatatgcccccatatgttgaggcatatcctaacgagaatctgacaaccgttatgcctgaacaatatcgttatacgctgcccgtcaaagcgggtgagcagcgtctgctgggcgagttaaccggcgcagcttgtgcaacgctggtagcggaaattgccgaacgtcacgccggtccggtggtactcattgcaccagatatgcaaaatgctctgcgtttgcatgatgaaatcagccagtttaccgatcaaatggtgatgaatctggcggactgggaaactcttccctacgacagtttttcgcctcatcaggacattatctcctcgcgcctttccaccctttaccagctaccgacgatgcagcgtggcgtactgattgttccggtgaatacgcttatgcagcgcgtttgcccacacagttttctccacggtcatgcgctggtgatgaaaaaaggtcagcgcctgtcacgagatgcattacgaacccaactggacagcgccggttatcgccatgttgaccaggtgatggagcacggcgaatacgccacgcgcggcgcgttgctggatctcttcccgatggggagtgagctgccttatcgtcttgatttctttgatgatgaaatcgacagcctgcgggtgtttgacgtcgacagccagcgcacgctggaggaagtagaagcgatcaatctgctgcccgcgcacgaatttccgaccgataaagcggcaattgaactgttccgcagccagtggcgcgataccttcgaagtgaagcgcgatccagaacatatttaccagcaagtgagtaaaggcacattacctgccgggatcgagtactggcagccattgttcttcagcgaaccactgccgccgctgttcagttatttccctgccaataccttgctcgtgaatactggcgatctggaaaccagtgccgaacgtttccaggctgacacgctggcgcgttttgagaatcgcggcgtcgatccgatgcgcccgctgttgccaccacaatcgctctggctgcgggtggacgagctcttctcagagctgaaaaactggccccgggttgcacatccacgtctccggcaggaagtaaaggactctcagagatcccgagtaccagctcgatctgtccggtttctggttcttgccgctgcgtttctccgcatcagttgggtcttgagcctgtcaactggtatcgtcgcgaccgacgggttttatccctcaattccggagcagcctctggctaggctgatccagacgagcggtccccaaccaaggacaacggcctcacaggcgctcatggtccacacgcaggagggtgcccgcagagcttcaagaaggtggttgtcacgcgtgtcgccatctgccctaatcgagaaacgtaccctcagctcgacgcagttgatcaagaagagtggcaatatgcgtataacgattattctggtcgcacccgccagagcagaaaatattggggcagcggcgcgggcaatgaaaacgatggggtttagcgatctgcggattgtcgatagtcaggcacacctggagccagccacccgctgggtcgcacatggatctggtgatattattgataatattaaagttttcccgacattggctgaatcgttacacgatgtcgatttcactgtcgccaccactgcgcgcagtcgggcgaaatatcattactacgccacgccagttgaactggtgccgctgttagaggaaaaatcttcatggatgagccatgccgcgctggtgtttggtcgcgaagattccgggttgactaacgaagagttagcgttggctgacgttcttactggtgtgccgatggtggcccggaaaaactccgcgctcacttccaaaaagactggactcggacccgtgcccctccaagtttccccatttgaccagggcccgcgcgtacctattaaggcccagccgcagccagattgggcataa

SEQ ID NO: 22485 - DNA, 1986 bp, Homo sapiens; identical to SEQ ID NO: 7421
  SIMILAR (604)..(942): 971254mologous to Escherichia coli K12 putative transport system permease protein,accession number AE000134,Smith-Waterman Score=528.

SEQ ID NO: 22486 - DNA, 2193 bp, Homo sapiens
  SIMILAR (67)..(705): 991254mologous to Escherichia coli K12 diaminopimelate epimerase,accession number AE000457,Smith-Waterman Score=1097.
atgggagtaaatgatgcagtcctcgaaatgcatggccttggcaacgattttatggtcgtcgacgcggggtttgaccaactgctggtggttgagccgccgtatgatcttgagctggattttcactatcgcatgttcaatgctgatggcagtgaagtggcgcagtgcggcaacggtgcgcgctgctttgcccgttttgtgcgtctgaaaggactgaccaataagcgtgatatccgcgtcagcaccgccaacgggcggatggttctgaccgtcaccgatgatgatctggtccgcgtaaatatgggcgaacccaacttcgaaccttccgccgtgccgtttcgcgctaacaaagcggaaaagacctatattatgcgcgccgccgagcagacaatcttatgcggcgtggtgtcgatgggaaatccgcattgcgtgattcaggtcgatgatgtcgataccgcggcggtagaaacgcttggtcctgttctggaaagccacgagcgttttccggagcgcgccaatatcggttttatgcaagtggttaagcgcgagcatattcgtttacgcgtttatgagcgtggggcaggagaaacccaggcctgcggcagcggcgcgtgtgcggcggttgcagtagggattcagcaaggtttgctggccgaagaagtacgcgtggaactccccggcggtcgtcttgatatcgcctggaaaggggaagaactgcaggaaacactcacggagcttgatgaccgggcggttgtcgattatctgattaaaaatcctgagttttttatccgtaatgcgcgcgcagtagaagcgatacgtgtgccgcatccggtacgcggcaccgtttcgttggtcgagtggcacatggcccgcgcacgtaatcatattcatgttctggaagagaacatggcgctgttgatggaacaggctatcgccaacgaaggcctgttttatcgcctactctacctgcagcgcagtctcaccgccgccagcagtctcgacgatatgctgatgcgctttcaccgctgggcgcgcgatctcggcctggcagtcgcgatgccagtcactatcaacaagggcaaccagatcattgaaaaccaactggatacagaaacaataactattagttatgaatttatcctctgtcaacatcttatcgcaaataccgagttcagctatttggcactccctgaaaattataaccgtttgtgtttaccaaattcaaaaaaccaaacaaataatcgtttcaaaacgttaaacagcaaagctattggcaggctacttgctgctggtggcgtatacaatgggaacattgaaggattcagagatactgcggaaaaactggctgtccctcctgttcagctactgacggggtggtgcgtaacggcaaaagcactgccggacatcagcgctatctctgctctcactgccgtaaaacatggcaactgcagttcacttacaccgcttctcaacccgccgggcagtgacgtcatcgtctgcgcggaaatggacgaacagtggggctatgtcggggctaaatcgcgccagcgctggctgttttacgcgtatgacagtctccggaagacggttgttgcgcacgtattcggtgaacgcactatggcgacgctggggcgtcttatgagcctgctgtcaccctttgacgtggtgatatggatgacggatggctggccgctgtatgaatcccgcctgaagggaaagctggcacgtaatcagcaagcgatatacgcagcgaattgagcggcataacctgaatctgagcagcacttctatccttgtgttactgaatggtgccacacagttccaggatctgggcgacttgaacaaagaattggaagagacatatacagatagcaaaaatcatatttcctgcgtcggtaatgatttcggtttcaatgatattttctcccgctacgttgaagcggtaggtcgcgaaggcgatgtactgctggggatctccacctccggtaactctgcaaacgtgatcaaagcgatcgcagcggcgcgtgagaagggaatgaaagtgatcaccctgaccggtaaagacggcggcaaaatggctggcacggcggatatcgaaattcgcgtaccgcactttggttatgccgaccgcattcaggagattcacattaaagtgatccatatcctgatccagttgattgaaaaagagatggttaa

SEQ ID NO: 22487 - DNA, 1815 bp, Homo sapiens
  SIMILAR (1)..(798): 1001254mologous to Escherichia coli PHTHALATE TRANSPORTER,accession number D90856,Smith-Waterman Score=1338.
atggggctgttctatatgggcgcaccgctggcgttaacactgggatcaccgctttccggcgcgctgttggagatgcatggatttatggggcatcccggctggttctggatgtttgtgattgaaggattgttggcagtcggtgctggggtattcacattcttttggcttgatgacacaccggagcaggcacgttttctgagtaaacaagaaaaaacgttgcttatcaatcaactggcaagtgaagaacaacagaaagtgacttctcggctgagcgatgcgctgcgtaatggccgagtctggcaactagcgattatctacctgaccattcaggtggcggtttacggattaattttcttcctgccgacccaggttgcggcattgctgggaacaaaagtgggctttacagcgtcggtggtcaccgccattccgtgggttgcggccttgtttgggacctggcttattccgcgctattccgataaaaccggcgaacggcgtaatgtcgcagcgctgacattactggcggcgggcattggtattggtctgtccgggctgctttctccagtaatggcgatcgtagcgctgtgtgttgcagctatcgggtttattgccgtgcagccagtgttctggacgatgccgacacaactgctttccggtacggcgctggctgcgggaattggttttgtaaacctgtttggtgcagtgggcgggtttattgccccgatcctgcgcgtgaaagcagaaacgttatttgccagcgatgcggcgggattactgacgctggcagcggtggcggtcatcgaccgacgtggcacatcattaaataggttaaggaacacgatgatcgcattattaagcaatccctttaaagaacgtttacgcaagggcgaagtgcaaattggtctgtggttaagctcaacgactgcctatatggcagaaattgccgccacttctggttatgactggttgctgattgacggggagcacgcgccaaacaccattcaggatctttatcatcagctacaggcggtagcgccctatgccagccaacccgtgatccgtccggtggaaggcagtaaaccgctgattaaacaagtcctggatattggcgcgcaaactctactgatcccgatggtcgatactgccgaacaggcacgtcaggtggtgtctgccacgcgctatcctccctacgctgtccatcctgttcagctactgacggggtggtgcgtaacggcaaaagcaccgccggacatcagcgctatctctgctctcactgccgtaaaacatggcaactgcagttcacttacaccgcttctcaacccgccgggcagtgacgtcatcgtctgcgcggaaatggacgaacagtggggctatgtcggggctaaatcgcgccagcgctggctgttttacgcgtatgacagtctccggaagacggttgttgcgcacgtattcggtgaacgcactatggcgacgctggggcgtcttatgagcctgctgtcaccctttgacgtggtgatatggatgacggatggctggccgctgtatgaatcccgcctgaagggaaagctgcacacacaagaacggaaagcacgaagcaagcaacagaaagatgcagacaccgcaccacccatacaggtaggcacgcagacgccacagaccgtacacgccgcacgcgacactagacaagcgagcccacgagcaagcaagatatcacaacacagacaggctgacggagacaagcgccagacgagacacgccgaagctcaggcaacacgcacacacaccggaagaaggaagacgataaaagagacagcaacg

SEQ ID NO: 22488 - DNA, 3774 bp, Homo sapiens; identical to SEQ ID NO: 14859
  SIMILAR (2139)..(1663): 1001254mologous to Escherichia coli Spermidine/putrescine transport protein A,accession number D90748,Smith-Waterman Score= 834.

SEQ ID NO: 22489 - DNA, 1896 bp, Homo sapiens
  SIMILAR (1189)..(1893): 971254mologous to Escherichia coli Arginine transport system protein ArtQ,accession number D90724,Smith-Waterman Score=1153.
atggtgatctgccagccaattaacggtggctggcagtggccgccttcaaccggaaccgatccagcgccgtattttcgtattttcaacccgactacccagggcgagaaatttgatcatgagggcgagtttatccgccagtggctaccggaactgcgcgatgtgccagggaaagtggtgcatgagccgtggaagtgggcgcagaaagcagcagcacccccccagacccgccttcactccacccctaccaccatcccgcaccgggtcccaggccacacacccaacctcaagccaatctgggaggtggacttaccaaagttcagtcacaaagcaacatcacacgcaacagacaaaccctcagacacgacacagaatgaccaaatagttatcgcgtacatggaaccacctgagatagtccacgaaaccaccacatccagcacccatcctagtctctacattatactcaaaagacagacgagggaactcaggccgcagtcggtaacctcgcgcatacagccgggcagtgacgtcatcgtctgcgcggaaatggacgaacagtggggctatgtcggggctaaatcgcgccagcgctggctgttttacgcgtatgacagtctccggaagacggttgttgcgcacgtattcggtgaacgcactatggcgacgctggggcgtcttatgagcctgctgtcaccctttgacgtggtgatatggatgacggatggctggccgctgtatgaatcccgcctgaagggaaagctgcacgtaatcagcaagcgatatacgcagcgaattgagcggcataacctgaatctgaggcagcacctggcacggctgggacggaagtcgctgtcgttctcaaaatcggtggagctgcatgacaaagtcatcgggcatctatctgaacataaaacactatcaataagttggagtcattacccaacccgaataacaaactgccgccatcaccacaacaccgcggtaccagctatagtttcagtgctcgaagtggtcactgagtggctgaaagataacccgaaactggcggcggtgggcgacaaagtgaccgataaagattacttcggcactggcctcggcatcgcggtacgtcagggcaacactgagctgcagcagaaactcaacactgcgctggaaaaagtgaagaaagatggcacttacgaaaccatctacaacaaatggttccagaacgccgccgggatgaccgtcggccttgccgtttgtgcattgattgtcgggctggcgctggcgatgttctttgcggtatgggagtcggcaaaatggcgtcctgtcgcgtgggcaggttcagcgctggtaaccattctgcgtggcctgccagaaattctggtggtgctgtttatctattttggctcctcgcagctgctgctgacgctttcggatggcttcactatcaatcttgggttcgtgcagatcccagtgcagatggacattgagaacttcgacgttagcccgttcctttgtggtgtcatcgctctgtcactgctgtatgccgcctatgcctcgcaaacgcttcggggcgcgttgaaagcggtgccggtgggtcagtgggagtctggtcaggcgctggggctgtcgaaatcggctatctttttccgtctggtgatgccgcagatgtggcgtcatgcgctgcctggcctcggtaaccagtggctggtgctgctgaaagataccgcgctggtcagtttgattagtgtgaatgatttaatgctgcaaacaaaaagcatcgctactcgtacccaggaaccatttacctggtacattgtggcggcggcgatttacctggtgatcaccctgctcagtcagtacattctcaaacgcattgacctgcgcgcgacacgttttgagcggaggcccagctaa

SEQ ID NO: 22490 - DNA, 4356 bp, Homo sapiens
  SIMILAR (2799)..(1993): 971254mologous to Escherichia coli PTS enzyme II- asc,accession number M73326,Smith-Waterman Score=1307.
atggccgcattaccatacatgcaactgtacatagctgattacctggctgacaccatgcatttgtcagcagaggagcatggtgcgtatttgttgctgatgttcaattactggcaaacaggaaagccaatacctaaaaacaggctggcaaaaattgcccgtctgactaacgagcgatgggctgatgttgaaccatccttgcaggagtttttttgcgataacggcgaggaatgggtgcatcttcggattgaggaagatctggcatcagtcagggaaaaattaaccaaaaaatcagccgcaggaaaagcatctgttcaggccagaagaagcagaaaggaagcagatgttcaaacaaaacaagagagaaatttaacaggtgttcaaacagatgttgaagtggtgtttgaacatgatgtcaacacaaaggcaactaataaagatacagataaagatctaaaaacagatccccccctaaatcccccccgggggaatcgaggtgtcaaaaagtttgaccctctggatattactttgccgaactggatttctgtctcgctttggcgtgagtgggttgaatttcgccaggcattgcgaaaaccgattcgaacggagcagggcgctaacggggcgatacgggagctggaaaaattccgccagcagggtttttcacctgagcaggtgattcgacacagcatcgccaatgaataccagggcttgttcgcgccgaaaggtgttcgacctgagacgttactccgacagactggccccgtcacatgtaaccgcgccattcaagacggtagcggagtggcgcgagtggcaactttccgaagccagaaacgttgtgaggagatcaaccgtcagaatcgtcagttgcgggtggaaaaaattctgaatcgctctggcatccagccattgcaccgcaaatgctcgttttcgaattaccagcggaaaacctggtaccgggaagaaccacttagcggcactatcgggaatcgcctgctgaaagacggtcagacagtgattgtggttaccgtggctgatgttatgagtgccctgcacgccagctatgacgatgggcagtcaggcgaaaaatttttgcgggaactgtgcgaagtggatctgctggttcttgatgaaattggcattcagcgcgagacgaaaaacgagcaggtggtactgcaccagattgttgatcgccggacagcgtcgatgcgcactaaaagcattcgctttttcacccgtggaagatggcatagccgttcgccagttgctgtttactttgttggcaaccgcattgatcgtcccctatttcaaacgctcgtcgcggctactgacggggtggtgcgtaacggcaaaagcactgccggacatcagcgctatctctgctctcactgccgtaaaacatggcaactgcagttcacttacaccgcttctcaacccggtacgcaccagacaatcattgatatggccatgaatggcgttggatgccgggcaaccgcccgcacttatgggcgttggcctcaacacgattttccgccatttaaaaaactcaggccgcagtcggtaacctcgcgcatacagccgggcagtgacgtcatcgtctgcgcggaaatggacgaacagtggggatacgtcggggctaaatcgcgccagcactggctgttttacgcgtatgacaggctccggaagacggttgttgcgcacgtattcgtgtgaacgcactatggcgacgctggggcgtcttatgagcctgctgtcaccctttgacgtggtgatatggatgacggatggctggccgctgtatgaatcccgcctgaagggaaagctgcacgtaatcagcaagcgatatacgcagcgaattgagcggcataacctgaatctgaggcagcacctggcacggctgggacggaagtcgctgtcgttctcaaaatcggtggagaagatcacaagtgggccaaccaccaacgccacacccgggacacagaagacagccaccgacaagagaggcggcaaaaaactaccgatccagataccaatcgggccaatcagcaggattgccagcggtgcggcaatcaacacaatcagcattggtttgaggaagtttttggtcaccgccggtgtaatgctgtccacccagcgttcgatatatgacaggcaccaggtcatcaccagcgccgggatcaccgtgtaggtgtatttcaccgcggtgaccggaatcagggcaaattcgacatgttcaccctgggccgctttcgccatcagttcaataaaactcggatgtaccagcacacccgcgatggcaatcgccagcgacatattggttttaaatttgatggcggcagatgccgcgaccatcagcggcaggaagaagaaagcaccgtcaccaatcacattcagaatggttaaggtcggcgatccttttgtcagcacgccgctcatctcgaggatcattgccagcagtttgaccatcgatccgccgataatcgccgggatcagcggtgacatggtgccgatcagcgcatcgaggatccccgcaccaatgcgacgtagcgtgagtttgggtttacccacgggctgtgcgggctgcatatctcccggcagcaggctgacgacttcctgaaaggcttgtgaaacggtattgccgataatcacctgacactggttgtcactacgtaccacgccgagcacgccggggatggtttttaacgtcgggctgtcgataagtgcatcatctttgataacaaagcgcaaccgcgtcatacagtgcgtgaccgccgagatgttatcaacgccgcccagtgccgctgaatatttttcccgccgattgtgcaaggacaatcggcaaacggtgcagtacactgcgttgattgcgtgtaaagggatgaaaatgatgacgacgatgctggaagtggcgaagcgcgccggggtttcaaaagcgaccgtttcccgcgtgctttcaggtaatggtccggggctcccgacggcagagttcttccagcgagtggcgacactggcgtcgagatcgccttcatcggcggagactttacagccgccaggatggagggtgggatcgccccgcaagcgccagccatgcaaacttaaggtagcgccgagcatatcatccacacgttgcagatcatccgggtgcacgcgcagctgtggtttaccgctgaataacggttcttgctgcaacaactgttggatctgtttgatcagtgccgagttatccaccgttggcgtctgaccgatgacctgacgtgccgcctccagcgccatctgcatcaggcgcgacgctatcacactatcaagtgcatcaagggtagtttgaaattcgctgaccagttgctgcatccgggcatgaattggcgcttgttgagacttcgcctctgccagaccttgctccagcccctgggccagtccttcctgatagccctgcttatgaccttgctggcgaccttcggcaatacccgcctgataaccttgctcatgggcctgcatttgcagttgcgccagttgctgctcaaggctgggttcagcctcttcaatgatggtttcttccggctcgactatgggcacaaactctgccatctcgccagtttcggcaaggcggcgcacaatcagcagaatcgctttctgttcgttttccacctgcgacagacgcaccggaccacggttggcgagatcgtcgcgcagaatatcggcggcacgctgcgacatattgcgcaagaatttctcgcgcagtggctgctcggctcctttcagcgcgatcaacagcgattcggaatccacttcctgcaacagacgctgaatgctgcgatcgtcgacatccaccagattctcgaacaggaacatctcgtcgatgattttctgcgccagctcgccgtcgaattcacgcacggcggtaataacggcttcttcctgctgagttttcatcaggttgataatttcggctgccgttctcacgggggatcctttagagttcgaccactcaggaacacccttgtacacccaggctgcctcccgcacttctggctctcctctctttttcctcatcaccttcttgaacacagcagtactactaatagacttcatttcttcactttcctcagcccctgcaatccagcctttgctgtgttttgaaactgctttactaagatctccagtcccctcaatgtggccacactcattttgccttccaggaatcttccctttcttgaatcttctactgcttctgtcacactcgccagccttctccacaccttctttcttagccctcctcaggacctcgatgtcaggatgttgatgggttggtttgtctggtatcatggcagtagccagttcaaatctaggagtaggaaccat

SEQ ID NO: 22491 - DNA, 1521 bp, Homo sapiens
  SIMILAR (789)..(475): 991254mologous to Escherichia coli Integumentary mucin c.1 (fim-c.1) ,accession number D90736,Smith-Waterman Score=514.
ctagacgagcagcgcgtacgcgccaacgttgaaggccgcgaatgtaatatctacgttaacttcgccgttgaaccggggcaaaaactgcatgttctggttcgcgatcgtaactacaaaggacactgaacagccgttggaagtccgggtttgtgtgaaaccgtggaaagatggcaagatggtgatggtcagcgaattcttcaatgaagacgatcctgactttgaccactctctcgaccaaaaaatggccattaattgggtagaaagctgggagctcgtactgggttggggcaacacaagctttggttggaccacgacggactgacggccacgtgtttcgtcaaaatggtcttcacgctggataactacacgcgtctgctcgatccgctctatatttgaagtgctattgcactcgctgaatatggcgctgatcgccaccctcgccttgcctggtgctgggcctacccgatatgcctgagtattagtggtggttgaggtgttatgagaaccgccatcgccactgtcatttgctgcaacaactgccaacgtcgccacaccaacagccgttgccacaccgacaactgtcgccgtgccgacagcgccagcagccacgccaccagtggtagtagcagtcgtggttgcgccggtagtggtcgttgtggtgccagtagtacccgtcgttgcctcggtcccgtttgttgcttcaggggcagcaaacgcagctggcgtcgtcaacatgaaggccataaggattgcagaaagcttgtgtttcataacttttcctttattcatcgcatggacaatacggctgtccctcctgttcagctactgacggggtggtgcgtaacggcaaaagcactgccggacatcagcgctatctctgctctcactgccgtaaaacatggcaactgcagttcacttacaccgcttctcaacccgccgggcagtgacgtcatcgtctgcgcggaaatggacgaacagtggggatacgtcggggctaaatcgcgccagcgctggctgttttacgcgtatgacaggctccggaagacggttgttgcgcaccgtctgcggattcacagccgtctgccgattgtgatcccggcacgtatcaccgaggcgctggttgaatgctttgcccgttctacgctgcaaatcttgctggtgaatcacatcaaccatgcccatgaggtagatgaaacattccgtcaggcgatggctaagttgcgccgggtaggcgttactttgctgaaccagagcgttctgttacgtgatgtgaacgataacgcacaaacgctggcaaacctgagtaatgcgttgttcgatgccggcgtaatgccgtattacctgcatgtgctcgataaagtacagggcgcggcgcattttatggtgagtgatgacgaagcacggcagattatgcgtgagttgctgacactggtgtcgggatatctggtgccgaaactggcgcgagaaattggcggcgaacccagcaaaacgccgctggatctccagctacgccagcagtaa

SEQ ID NO: 22492 - DNA, 1598 bp, Homo sapiens
  SIMILAR (1)..(309): 1001254mologous to Escherichia coli IS5 39.3kDa protein,accession number U70214,Smith-Waterman Score=531.
atggaagatgctctgtacgaaatcgcctccatgcgtctgtttgcccggttatccctggatagcgccttgccggaccgcaccaccatcatgaatttccgccacctgctggagcagcatcaactggcccgccaattgttcaagaccatcaatcgctggctggccgaagcaggcgtcatgatgactcaaggcaccttggtcgatgccaccatcattgaggcacccagctcgaccaagaacaaagagcagcaacgcgatccggagatgcatcagaccaagaaaggcaatcagtggcactttggcatgaaggccccacattggtgtcgatgccaagagtggcctgacccacagcctggtcaccaccgcggccaacgagcatgacctcaatcagctgggtaatctgctgcatggagaggagcaatttgtctcagccgatgccggctaccaaggggcgccacagcgcgaggagctggccgaggtggatgtggactggctgatcgccgagcgccccggcaaggtaagaaccttgaaacagcatccacgcaagaacaaaacggccatcaacatcgaatacatgaaagccagcatccgggccagggtggagcacccatttcgcatcatcaagcgacagttcggcttcgtgaaagccagatacaaggggttgctgaaaaacgataaccaactggcgatgttattcacgctggccaacctgtttcgggcggaccaaatgatacacagtcaatattccgcgttgaggagacatcaagatggatcagtctcgtttaagccggagacacacacctgcgatgctcatcgccctgctctaaagccggcgaatgattatgtccgtaccttcttccgtggcgttgatattagtcaggtattcagtgcgaaagatattgcccgccggacaccgaatggcttaattcgtaaaacccctggcttcggcccacgttcggcactgaaattattgcaggatgaagatcgcgaatatggctacgttatcgaacgcggtaataagtttgtcggcgcagtctccatcgattcgcttaaaaccgcggctgtccctcctgattcagctactgacggggtggtgcgtaacggcaaaagcaccgccggacatcagcgctatctctgctctcactgccgtaaaacatggcaactgcagttcacttacaccgcttctcaacccgccgggcagtgacgtcatcgtctgcgcggaaatggacgaacagtggggatacgtcggggctaaatcgcgccagcgctggctgttttacgcgtatgacaggctccggaagacggttgttgcgcacgtattcggtgaacgcactatggcgacgctggggcgtcttatgagcctgctgtcaccctttgacgtggtgatatggatgacggatggctggccgctgtatgaatcccgcctgaagggaaagctgcacgtaatcagcaagcgatatacgcagcgaattgagcggcataacctgaatctgaggcagcacctggcacggctgggacggaagtcgctgtcgttctcaaaatcggtggagcagcatgacaaagtcatcgggcattatctgaacataaaacactatcaataa

SEQ ID NO: 22493 - DNA, 4071 bp, Homo sapiens
  SIMILAR (3048)..(3998): 901254mologous to Escherichia coli K12 putative membrane protein,accession number AE000312,Smith-Waterman Score=1441.
  misc_feature (1)...(4071): n = a,t,c or g
atggccacggattcggtcgggttaaactgcacgccagctccccacgccagagacgtgttgctgtggcgaccgtcatcacttccggtcagcacgtcgtgcgttttccccttgggaaggattggcgacgtgtctgacgagagcgacgacaaaacagaagcccccacacctcaccgactagaaaaagcgcgggaagaggggcaaatcccgcgttcccgtgaactgacctcactgctgattttgctggtgggcgttagtgttatctggtttggcggtgtgtcgctggcccgtcgattgtcgggcatgctctccgctgggctgcattttgatcacagtattatcaatgacccgaatctgatcctcgggcagattattctgctgatcagagaagccatgctggcgctgctgccgctgattagcggcgtggtgctggtggcgctcatttctccggtcatgctgggagggctggtatttagcggcaaatccttgcagccgaagttttccaaactcaacccgctaccgggcattaaacggatgttctcggctcagactggcgcggagttgcttaaagcaattttgaaaaccatcctggttggcagcgtgacggggttttttctctggcatcactggccgcagatgatgcgcttgatggccgagtctccgattaccgccatgggtaatgcgatggatttggtagggctatgcgcactgctggtggtgcttggtgtcattccaatggtgggatttgacgtctttttccaaatattcagccacctgaaaaagctgcgtatgtcacggcaggatattcgtgatgagttcaaacaaagcgaaggtgaccctcatgttaaagggcgatccgccgcccctgcaaaatcggtttaccgggtggaccaaccgaatgtcccgatagggcccaagtgcgccgaacacacgcgcgttagaaagagatttctcccgtggcgcgacatggtattcatagacaccactgtcagtacaattgcggctaagtcatcggaaatattgtcggggattttgaaggcgttgaatgccgggatcaccagatattcggcaaagcagcccgggcgattaacaccaacgcctatcgtgttgcggcacaaatgggtgatatggccttcgccagaaacgcgatcgccgatcttgaagcctttcacttccgtgaccgaatacctgaccactgtcaccgaacagtattgcagtggcccaacgaacacatctggcaaccgggatggtttatttgcgaccactcatcccagttatagatgtgaacgcgataacgcccagttgtttaccaatacgcgtaaatgcttctactgcacgcgtaatttgctcaggggtatgcgccgcagacatctgggtacgaatacgcgcctgacctttcggaacgaccggatagaagaaaccggtaacgtaaatgccctctttttgcagctcacgggcaaagttctgcgccactaccgcatcaccaagcatgaccggaataatggcgtgatcggctcccgccaggacggtcacgcagttcggctgcccgcttcgaccatctccagtactttgatggacgcggcaacaatggccggtgccagcgagttggagaacagggtcaacgccggtgatcatttctgtaaccgggtgttctacctgaatacgggtgttcatttcgatgaaatagaactcgccgttttcgaacaggaactcgaaagtacctgcaccgcgatagccgatatcaacacacgctttagcgcaacgttcgccgatgtagcgacgcagttccggggtaatgcccgttggtggcgattcttcgaccactttctggtggcggcattttttcgcttccgcacgggttatggagatggattgtgccagttatgcgtcgccgcgcattacgcgcataccgcagacacgccgcactccgccggaggctttgataatcaccggataaccaaagcgtttaacaatggaacggtttttatccagatcgtcgcccatcgggctgtcagaacccgccaccttcgccatgtgcgccatccagcacaatcatccttttcatcatttatccttttacgcacaccacctgacgcagggaggaacccctgggaggattctaaacgggctgtgcatattgtcccttattatttcgctaacgacacgaagcttcctccattttttgggcccccttccgtcctgataactcataagtcaagaattcgacccagttcttgcagcgcaggggaatatgggcacatccgggcaatacgaacaatgtttgcgaatctgctagtggaacatggtccgaaagagatgacaacggaaggggccaggaaacaagcaggcccgagttcggtaaccctgggcatacagccggccagtgacgtcatcgtctgcgcggaaatggacgaacagtggggctatgtcggggctaaatcgcgccagcgctggctgttttacgcgtatgacagtctccggaagacggttgttgcgcacgtattcggtgaacgcactatggcgacgctggggcgtcttatgagcctgctgtcaccctttgacgtggtgatatggatgacggatggctggccgctgtatgaatcccgccctgaagggaaagctgcacgtaatcagcaagcgatatacgcagcgaattgagcggcataacctgaatctgaggcagcacctggcacggctgggacggaagtcgctgtcgttctcaaaatcggtggagctgcatgacaaattggagtcattaccgggccaaatcgataaatcgctcgatgaagcctcactcagcctgcgcgccggttccctgcgtaccattacgcacatcctgctgccgctgctgcgcccggcgatcctctcggcgctgatttacagctttgtgcgcgccattaccaccgtcagcgccattgtgttcctcgtcacgccggatacccgcgtagcgacggcttacatcctcaaccgcgtggaagatggcgaatacggtgtagcgattgcctacgggttccattctgatcgtggtgatgctggcgattatcttcatctttgactggctgatcggtgaatcacgtacctcccgttcaaaagccaaagacaggcgcggcaaatcctttaccgtcaatttcgctaaacctggcaactacaatctgacattacgcgataaagacggcttaattctcgctgggttaagtcatgccgtcagcggtaagggcagcacggcgcatactggtacggtagatatcgtggcggataaaacgctgtaccagccaggcgaaaccgcgaagatgctgattacctttccggagccaattgatgaagcattattgacgctggaacgcgatcgcgtggaacagcagtcgctgctttcgcatccggcaaactggctaacgctacaacgtttaaacgatacccagtatgaagcccgggttccagtgagcaattcctttgcgcctaacatcactttttcggtgctgtatacccgtaacggtcagtacagttttcagaacgccgggatcaaagttgccgttccccagctggatatccgggtgaaaacggacaaaacccattaccagcctggtgaactggtcaatgtcgaattaacctcgtcgctgaaaggtaaacctgtttctgcgcagctaacggtaggcgtggtcgatgaaatgatctacgcgctgcaaccagaaatcgcgccgaatatcggcaaatttttctatccgctggggcgtaacaatgtgcgtaccagctccagtctgtcgtttatcagctacgatccaggcgctctccagcgagccggttgcgctctggcgcaactaaccgntcagcgagcggcgaaagtaaaaatgcttgaacgtccacggcgtgaagaggtggataccgcggcatggatgccgtcactcacaaccgataaacaaggcaaagcgtatttcacgttcctgatgcctgattcgttaacccgctggcgtatcaccgcgcgtgggatgaacggcgacgggctgtcggcaggggcgtgcttagaattcatccgcatgccagcaggaggggacggccgctgggattggcagaaatact

SEQ ID NO: 22494 - DNA, 1236 bp, Homo sapiens
  SIMILAR (433)..(594): 661254mologous to synthetic construct InsB peptide,accession number Z37515,Smith-Waterman Score=180.
atggcaaatgacttgccacacagcaattcaggggatggccagaaacccagttcccctgatttattcacggctccactcctggcagatcccaccgtgggcttcctccctaatgatgccgaggaactattcatctttctcacggaaataactgagatcaccattccatgccgagtaacagacccacagctggtggtgacactgcacgagaagaaaggggacgttgcactgcctgtcccctatgatcaccaacgtggcttttctggtatctttgaggacagaagctacatctgcaaaaccaccattggggacagggaggtggattctgatgcctactatgtctacagactccaggctgtccctcctgttcagctactgacggggtggtgcgtaacggcaaaagcaccgccggacatcagcgctatctctgctctcactgccgtaaaacatggcaactgcagttcacttacaccgcttctcaacccgccgggcagtgacgtcatcgtctgcgcggaaatggacgaacagtggggctatgtcggggctaaatcgcgccagcgctggctgttttacgcgtatgcacagtctccgcgcacgacgcgttgttgcgcacgtattcggctgcacgcactatggcgacgctggggcgtcttatgagcctgctgtcaccctttgacgtggtgatatggatgacggatggctggccgctgtatgaatcccgcctgaagggaaagctgcacgtaatcagcaagcgatatacgcagcgaattgacgcggcataacctgaatctgaggcagcacctggcacggctgggacggaagtcgctgtcgttctcaaaatcggtggagctgcatgacaaaccatcaccgcaacaccgcgaaggggtgaaagatgtgatgcgctttaacgagccgatgtacccgttggagagccgaccgcgtctgtatgtctgtcatttgcggaacggtgcacaagcgtctggccgacgatgtcagttaccaatggggtgcgcatgccatcccgtatcccagagaaacgatcgacccaaccgaagaccggagagacacgcaacaagaaagacaacaacacgacaaagacagcaaaacagccgacagcacaaacagacacaaaagaaggccaaaccgaacaaacgcagagcaacagaacgaggaaagggaccacaacaaaaggcagagaggcccaagagacacacccactgctttttaaagctgcagtga

SEQ ID NO: 22495 - DNA, 2892 bp, Homo sapiens
  SIMILAR (322)..(1386): 581254mologous to Homo sapiens phosphotyrosine independent ligand for the Lck SH2 domain p62,accession number U46751,Smith- Waterman Score=856.
  misc_feature (1)...(2892): n = a,t,c or g
ggcacgaggccagctcgccgctcgctatggcgtcgctcaccgtgaaggcctaccttctgggcaaggaggacgcggcgcgcgagattcgccgcttcagcttctgctgcagccccgagcctgaggcggaagccgaggctgcggcgggtccgggaccctgcgagcggctgctgagccgggtggccgccctgttccccgcgctgcggcctggcggcttccaggcgcactaccgcgatgaggacggggacttggttgccttttccagtgacgaggaattgacaatggccatgtcctacgtgaaggatgacatcttccgaatctagattaaagagaaaaaagagtgccggcgggaccaccgcccaccggtgtgctcaggaggcgccccgcaacatggtgcaccccaatgtgatctgcgatggctgcaatgggcctgtggtaggaacccgctacaagtgcagcgtctgcccttactatcgacttgtgtagcgtctgcgagggaaagggcttgcaccgggggcacaccaagctcgcattccccaagccccttcgggcacctgttctgagggcttcttcgcacagccgctggcttccggaaggttgaaacacggacactttcgggtggccagggtggggaaatgggtccaccagggaaactgggagcccacgttccttcctcgtgcagggggaggcccggcctgggccccacggcagaatcagcttctggtccatcggaggatccgagtgtgaatttcctgaaagaacgttggggagagtgtggcaagctgcctttagccctctggaattttgaagttgatatcgatgtggagcacggagggaaaagaagccgcctgacccccgtctctccagagagttccagcacagaggagaagagccagctcacagccaagcagctgctgctctgatcccagcaagccgggtgggaatgttgagggcgccacgcagtctctggcggagcagatgagaaagatcgccttggagtccgaggggcgccctgaggaacagatggagtcggataactgttcaggaggagatgatgactggacccatctgtcttcaaaagaagtggacccgtctacaggtgaactccagtccctacagatgccagaatccgaagggccaagctctctggacccctcccagggagggaacccacagggctggaaggaagctgccttgtacccacatcttcccgccagaggttgaacccgcggcttgatttgagtccctctcccagatggttgttccatggggtttctcttgattgaagggcggctgggttcaccagggttcctgcagaccaagaaactatgacattcggagcggctctgggacaccatcccagttattcaaaagcatcccccgccgttgtgaacactttttggccacctcttcttgcggtgcccctcttctgtctcatagttgtgttaaagcttgcgttagaattggcaggtctctgtacgggccagtttctcttgccttcttccaggatcaggggttagggtgcaaaaaagccatttagggcagcaaaaccaagtgacatgaaggggagggtccctgtgtgtgtgtgtgtgctgaatgtttccctggggtgcccctggctccttggcaagcaagggctggnccctgcgaggacccaaggcttcacttgcagcgcggcttccctgacccccttccntgccagggggcttaccgttagccaggcccagcacataggcttgccttaatggcttttcactttcctcttttgttttaaatgactcataggtccctgacatttaagttgattattttcctgctaacagaccctggtacactctgattttaagataaagtaagcctaaggtgttgtcaagcaggcaggctggggaaggccaagtgttgtggggcttccctgcctgggactgaagaaggctccacgaagggcaatccgcaaatgttggtttcacttgagaacttgcctcctgggtctcctcaccactgtagttctctcagtttccaaacccatcagctggcttttaaaataagatctcttatgtagccaatcctgttaaatttgtaaaccaactaatttaaatggcatcagcactttaaccaatgacgtttgcatagagagaaatgattgacagtaagtttattgttaatggttcttacagagtatctttaaaagtgccttatgggaaccctgtccctcctaacaagtgtatctcgattaataacctgccagtcccagatcacacatcatcatcgaagtcttccccagttataaagaggtcacatagtcgtgtgggtcgaggattctgtgcctccaggaccagtggcccaccctctgcccagggagtccttgcgtcccatgaggtcttcccgcaaggcctctcagacccagatgtgacgggagacctggacgcccgagccaagaatgagtgctaccgagccacgttccggctgcccagggatgagcggctagacggccacacaagctgcaccctgtggacgccgttcaacaagctgcacatccctggccagatgttcatctccaacaactacatctgcttcgccagcaaggaggaggacgcttgccacctcatcatacccctgagggagtgtgggggccttatttaccgcccacctacagcagacacggaggcggtgcagaggagtggcttgcttctgggtccttctcaagaacttatgccccagaggatgaagtcccagagagaggctgacccgcggctgattgagtccctctcccagatgctgtccatgggcttctctgatgaaggcggctggctcaccaggctcctgcagaccaagaactatgacatcggagcggctctggacaccatccagtattcaaagcatcccccgccgttgtga

SEQ ID NO: 22496 - DNA, 1371 bp, Homo sapiens; identical to SEQ ID NO: 21735
  SIMILAR (358)..(690): 971254mologous to Escherichia coli K12 putative fimbrial protein,accession number AE000322,Smith-Waterman Score=555.

SEQ ID NO: 22497 - DNA, 671 bp, Homo sapiens
  SIMILAR (206)..(15): 351254mologous to Chironomus tentans salivary protein 115,140 (101 AA),accession number X15688,Smith-Waterman Score=74.
ctatgctatcacaacctgacagtttatttttgcataggaccttccggtgtgccgccttgtggtcattgtggtcccatggaccccttctctgtaacgcgttggtttccgcgttgcccctaagtgttccctggtcctttgggatctcttgtcgatatttgcggcccttcccgggttcccttcccctgggtggtccccgcggtcttgcccgtacagtttgtgcaacgcctgccccgtttttttcgctgtccccccgtactggtcacatcggtcatcaggagtattagcacactgattcaggctctgggctcctccccgttcgctcgccgctactgggggaatctcggttgatttcttttcctcggggtacttagatgtttcagttccaccggttcgcctcattaacctatgaattcagttaatgatagtgtgtcgaaacacactgggttaccccattcggaaatcgccggtaataacggttcatatcaccttaccgacgcttatcgcagattagcacgtccttcatcgcctttgactgccagggcatccaccgttgtacggttagtcgcttaacctcacaacccgaagatgtttctttcgattcatcatcgtgttgcgaaaatttgagagactcacgaacaactttcgttgttcagtgtttcaattttcagctt

SEQ ID NO: 22498 - DNA, 1200 bp, Homo sapiens; identical to SEQ ID NO: 22466
  SIMILAR (739)..(1197): 891254mologous to synthetic construct InsB peptide,accession number Z37515,Smith-Waterman Score=714.

SEQ ID NO: 22499 - DNA, 641 bp, Homo sapiens
  SIMILAR (176)..(307): 841254mologous to Shigella flexneri TnpH,accession number AF141323,Smith-Waterman Score=217.
ctactgacggggtggtgcgtaacggcaaaagcaccgccggacatcagcgctatctctgctctcactgccgtaaaacatggcaactgcagttcacttacaccgcttctcaacccggtacgcaccagaaaatcattgatatggccatgaatggcgttggatgccgggcaacagcccgcattatgggcgttggcctcaacacgattttacgtcacttaaaaaactcaggccgcagtcgccgggcagtgacgtcatcgtctgcgcggaaatggacgaacagtggggctatgtcggggctaaatcgcgccagctggctgttttacgcgtatgacagtctccggaagacggttgttgcgcacgtattcggtgaacgcactatggcgacgctggggcgtcttatgagcctgctgtcaccctttgacgtggtgatatggatgacggatggctggccgctgtatgaatcccgcctgaagggaaagctgcacgtaatcagcaagcgatatacgcagcgaattgagcggcataacctgaatctgaggcagcacctggcacggctgggacggaagtcgctgtcgttctcaaaatcggtggagctgcatgacaaagtcatcgggcattatctgaacataaaacactatcaataa

SEQ ID NO: 22500 - DNA, 754 bp, Homo sapiens
  SIMILAR (729)..(31): 751254mologous to Escherichia coli SecY (PrlA) polypeptide (aa 1-443),accession number X01563,Smith-Waterman Score=856.
  misc_feature (1)...(754): n = a,t,c or g
gccatgaggacgcctctagaggatatggcggatataaggaatatacagcgcctcaaccagggtcaggcgggacattactttatggatatattttgacgtttgctctcccgcacgaattcctggtacaaatgcaccggacttcttcaggttatctgctgtttcacgcgggttgaaaaccaacgccgtgtagaagaaacagaagaagatgattgcagacgcatagagtaacacataaagcggttgcccaggctgcaaatacagcgaaattgttgtcagccagttccaaccagtaccgcccccgaaccatgacgcgatggtcgccgggaacagaataatactggaagcgaagattgccgggattacccccgccatattcactttcagcgctaaatgcgccctctgtgcagcatagacacgacgaccttgctcacgttccgcgtagtttaccacaatgcggcgctccccacgctcaacaaatacaacaaagaccgtcactgcnaatactaatactgccaccaacagcaacacgaggaagtgcaggttgccttgacgcgcttgcttgatagtatgggcaatggctgggcgggagtcccgggaaaatacccgggaaagataatgcattgaataaaggtggtggaaacgtggtcaagaaaccggtcccccaacaaattagggaatatggttcttggacccgcctaacaacaccgggaagtagaatgcaaagcccggttaatcaccaggctttgataccagg

SEQ ID NO: 22501 - DNA, 739 bp, Homo sapiens
  SIMILAR (1)..(552): 961254mologous to Escherichia coli K12 putative enzyme,accession number AE000183,Smith-Waterman Score=933.
atgaccgctcaagtgctggcgcaagagcactcgcaaccgcagctgattgttctacatctgatgggctcacatccgcaggcctgcgacaggacacaaggaaaatacgaaaccttagtgcaatcgaaagaaacgtcgggctatctctatcccatgccgcaaacggacgatttcctgcgcaagctgtacgatcagttacgcaacagcggcagcagcttctcgctggtttacttttctgaccacggtctggcctttaaagagcacggtaaagacgtgcaataccttgcccatgatgataaatatcagcaaaatttccaggtgccttttatggtcatttccagcgacgataaagcgcatcgtgtgattaaagcccgccgctcagccaatgacttcttaggctttttctcccagtggacggggattaaagcgaaggaaattaacatcaaatacccgtttatatctgagaagaaagccgggccgatatacatcaccaacttccagttacagaaggtggattacaaccatctcggaaccgatattttcgacccgaaaccttaaaaacaaaaatccgccccgagaggcggattttttatatcaccaaagtgattagaagcggtaaccaacaccggcaatccaggtgcctacgtcaacgctacgaatacggctctgctcgtaagagaagtccagagcaacgttttccatcgggttgaactgcagacccgcaccgtaggagaaaccgtag

SEQ ID NO: 22502 - DNA, 1908 bp, Homo sapiens; identical to SEQ ID NO: 22467
  SIMILAR (388)..(816): 891254mologous to synthetic construct InsB peptide,accession number Z37515,Smith-Waterman Score=653.

SEQ ID NO: 22503 - DNA, 2340 bp, Homo sapiens
  SIMILAR (604)..(918): 821254mologous to synthetic construct InsB peptide,accession number Z37515,Smith-Waterman Score=453.
atggctcagttagtaaagagcttcctgaagaaggagagggagaaggaggagaaggaggaggtagaagaggaggaggaggaggagaagaagaagaggaggagagaaggagagaaggaggagaaggaggagaaggagaaggagaagaagaagaagtttaagaagaagaagaagaagaagaagaagaagaagaagaagaagaagaagaagaagaagaagaagaagaagaagaagaagcagctgtcactagtcacagtaatgtcacagcaatgccagctctggagaaatgaagccaggaccactggggcttgcttgcccagccccacagtttcagctgcagcaccccccatcgtctcaacaacagtcacagcatttgcagcagctacacttgcaaagggtgacctgaggtccagggcctccagcaagcaggtgccgctgctcgtcgtcctggtgtgggtctggccgcacccagggtggtttgtgaaggcaggctccgtggctctgggctccagtccaggctgtgtcctggagcttctgtgtaagctactgacggggtggtgcgtaacggcaaaagcaccgccggacatcagcgctatctctgctctcactgccgtaaaacatggcaactgcagttcacttacaccgcttctcaacccgccgggcagtgacgtcatcgtctgcgcggaaatggacgaacagtggggctatgtcggggctaaatcgcgccagcgctggctgttttacgcgtatgacagtctccggaagacggttgttgcgcacgtattcggtgaacgcactatggcgacgctggggcgtcttatgagcctgctgtcaccctttgacgtggtgatatggatgacggatggctggccgctgtatgaatcccgcctgaagggaaagctgcacacacaagaacggaaagcacgaagcaagcaacagaaagatgcagacaccgcaccacccatacaggtaggcacgcagacgccacagaccgtacacgccgcacgcgacactagacaagcgagcccacgagcaagcaagatatcacaacacagacaggctgacggagacaagcgccagacgagacacgccgaagctcaggcaacacgcacacacaccggaagaaggaagacgataaaagagacagcaacgcagcaagcatacgccgacgagcagacacgacgaacagcaagaacacaccgcagaacagcacgacacacagcagcacacacacacagaacaagagtagcagcaagacagacgacagagaaagataacgagcagagcgacacgcaaccaccgacacaaaagacaccgagcgcgaccgcaacagcacacacaccacggcgaacagagacgaccactaacatagtacaagcacgacacacgagcgcgcgtgagagaaaccacacgcgacagcaccaggcgacacgccgagagacaacaacaaacgcacacaccaacacaccacactaccacgcagagcacacacaatcacgcagccagcaacagacgacaagcaccgagcgaccaacaacagacagcagcacaacaataaacaacaacaaccacacaccacgaacagtcagagacgaacgacgcatgacacagcacaagcacccgagcagagcatcaaccacaacgaacagaaccacaaccacaggcgcataccaacacacacagagagatacacgagacacgagacgagatactcacgaagacaccacaacacaacagccgcacactactacaccgacagccaacgaagcagcatacactgcacacacgacaaagacagacgaccaccgacacacagcagacgacacgcagaaaaacaacaaagacgagacaaaacgacaagcgagacaacatcaacgaagcgcaacacacacaagcacaggcaaaacagaagacgaccacaagaacagaaagaagacagaccaagaagcaaagaaacaagagcacacacacacagacaaacgcagcacgaagatacaaaacgcgaggcgaacacaccaagcacaccgagaaccgctacgcgctgtgttgccgcgggtcccgtcctttctctttatcgttggtcgccgttctttctgtttggtcctccaccctgtttcttctctgtgttgttgtgtgggagtgtctgtatttgtgttctccctctctcctcgccgcctctgcgtcgcctgcctccggccggccggtcctggcccgggacagtttctgattagctgcgtcctgaacgctcgagctagcttcctctcctgccaacctggattaggcagtgaccccaccaccatcatggtcttttgtgtaaccagagtcttgagcagatgctattaa

SEQ ID NO: 22504 - DNA, 500 bp, Homo sapiens
  SIMILAR (245)..(460): 1001254mologous to Shigella boydii transposase,accession number U96388,Smith-Waterman Score=399.
tggctgccatcatacagaggccaacaccttgagcccaggggatggtgaagagagaaaatggaaggaacaaggttcctcatctccagactgttacgagaatgagcaacggccggatgtccttcctgctccgctactgaaggcgtggtgcgtaacggcaaaagcactgccggacatcagcgctatctctgctctccttgccgtaaaacatggcaactacagttcacttacaccgcctctcagcccgtgcacgcattatgggcgttggcctcaacacggttttacgtcacttaaaaaactcaggccgcagtcggtaacctcgcgcatacaaccgggcagtgatgtgattgtctgcgctgaaatggacgaacagtggggctacgtcggtgctaaatcacgtcagcgctggctgttttacgcgtatgacaggatacggaggacggttgtggcgcacgtcttcggacctgcaggcatgcaagattcgcgacagagcttacattcga

SEQ ID NO: 22505 - DNA, 832 bp, Homo sapiens
  SIMILAR (832)..(20): 981254mologous to Escherichia coli SecY (PrlA) polypeptide (aa 1-443),accession number X01563,Smith-Waterman Score=1375.
actgagcccgactctagaggatcaggcagataaaggtaatatacagtgcaccaaccagggtcaggcgggtcattactttatcgatatacttcgccgtttgctctcccggacgaattcctggtacaaatgcaccggacttcttcaggttatctgctgtttcacgcgggttgaaaaccaacgccgtgtagaagaaacagaagaagatgattgcagacgcatagagtaacacataaagcggttgcccaggctgcaaatacagcgaaattgttgtcagccagttccaaccagtaccgcccccgaaccatgacgcgatggtcgccgggaacagaataatactggaagcgaagattgccgggattacccccgccatattcactttcagcggtaaatgtgtgctctgtgcagcatagacacgacgaccttgctgacgtttcgcgtagtttaccacaatgcggcgttgaccacgctcaacaaatacaacaaagaacgtcactgcaaatactaatactgcaaccaacagcaacacgaggaagtgcaggtcgccttgacgcgcttgctcgatagtatgggcaatggctggcgggagtcccgcgacaataccggcgaagataatgattgaaacgccgttgccgatacctcgttcagtaatctgttcgcccaaccacatcaggaacatggttcctgtgaccagacttacaacagcggtgaagtagaatgcaaagcccgggttaatcaccaggccttgcataccaggcatattcggcagaccgctagcaataccgatcggctggaatattgccagcaccagagtaccgtagcgggtgtactggct

SEQ ID NO: 22506 - DNA, 1050 bp, Homo sapiens; identical to SEQ ID NO: 22478
  SIMILAR (1)..(471): 991254mologous to Escherichia coli AgaR,accession number AF228498,Smith-Waterman Score=763.

SEQ ID NO: 22507 - DNA, 1689 bp, Homo sapiens
  SIMILAR (1)..(798): 1001254mologous to Escherichia coli PHTHALATE TRANSPORTER,accession number D90856,Smith-Waterman Score=1338.
atggggctgttctatatgggcgcaccgctggcgttaacactgggatcaccgctttccggcgcgctgttggagatgcatggatttatggggcatcccggctggttctggatgtttgtgattgaaggattgttggcagtcggtgctggggtattcacattcttttggcttgatgacacaccggagcaggcacgttttctgagtaaacaagaaaaaacgttgcttatcaatcaactggcaagtgaagaacaacagaaagtgacttctcggctgagcgatgcgctgcgtaatggccgagtctggcaactagcgattatctacctgaccattcaggtggcggtttacggattaattttcttcctgccgacccaggttgcggcattgctgggaacaaaagtgggctttacagcgtcggtggtcaccgccattccgtgggttgcggccttgtttgggacctggcttattccgcgctattccgataaaaccggcgaacggcgtaatgtcgcagcgctgacattactggcggcgggcattggtattggtctgtccgggctgctttctccagtaatggcgatcgtagcgctgtgtgttgcagctatcgggtttattgccgtgcagccagtgttctggacgatgccgacacaactgctttccggtacggcgctggctgcgggaattggttttgtaaacctgtttggtgcagtgggcgggtttattgccccgatcctgcgcgtgaaagcagaaacgttatttgccagcgatgcggcgggattactgacgctggcagcggtggcggtcatcgaccgacgtggcacatcattaaataggttaaggaacacgatgatcgcattattaagcaatccctttaaagaacgtttacgcaagggcgaagtgcaaattggtctgtggttaagctcaacgactgcctatatggcagaaattgccgccacttctggttatgactggttgctgattgacggggagcacgcgccaaacaccattcaggatctttatcatcagctacaggcggtagcgccctatgccagccaacccgtgatccgtccggtggaaggcagtaaaccgctgattaaacaagtcctggatattggcgcgcaaactctactgatcccgatggtcgatactgccgaacaggcacgtcaggtggtgtctgccacgcgctatcctccctacgctgtccatcctgttcagctactgacggggtggtgcgtaacggcaaaagcaccgccggacatcagcgctatctctgctctcactgccgtaaaacatggcaactgcagttcacttacaccgcttctcaacccgccgggcagtgacgtcatcgtctgcgcggaaatggacgaacagtggggctatgtcggggctaaatcgcgccagcgctggctgttttacgcgtatgacagtctccggaagacggttgttgcgcacgtattcggtgaacgcactatggcgacgctggggcgtcttatgagcctgctgtcaccctttgacgtggtgatatggatgacggatggctggccgctgtatgaatcccgcctgaagggaaagctgcacgtaatcagcaagcgatatacgcagcgaattgagcggcataacctgaatctgaggcagcacactggcactggctgggacggaagtcgctgtcgttctcaaaaatccggtggagctgcatga

SEQ ID NO: 22508 - DNA, 701 bp, Homo sapiens
  SIMILAR (294)..(698): 1001254mologous to Escherichia coli InsB,accession number U70214,Smith-Waterman Score=718.
aaccttcagttaaaaacctttttgccgtaaatgaattttatagaaataatgatgatttcataaaccctgatctacaagaacggttagtgatcggggattatagcatttcaatatttacttatgacattaaaggtgctaccagtggcttctgtttctatcagctgtccctcctgattcagctactgacggggtggtgcgtaacggcaaaagcaccgccggacatcagcgctatctctgctctcactgccgtaaaacatggcaactgcagttcacttacaccgcttctcaacccgccgggcagtgacgtcatcgtctgcgcggaaatggacgaacagtggggatacgtcggggctaaatcgcgccagcgctggctgttttacgcgtatgacaggctccggaagacggttgttgcgcacgtattcggtgaacgcactatggcgacgctggggcgtcttatgagcctgctgtcaccctttgacgtggtgatatggatgacggatggctggccgctgtatgaatcccgcctgaagggaaagctgcacgtaatcagcaagcgatatacgcagcgaattgagcggcataacctgaatctgaggcagcacctggcacggctgggacggaagtcgctgtcgttctcaaaatcggtggagcagcatgacaaagtcatcgggcattatctgaacataaaacactatcaataa

SEQ ID NO: 22509 - DNA, 3273 bp, Homo sapiens
  SIMILAR (313)..(1149): 741254mologous to Binary vector pCAMBIA-1201 GUSA, hexaHis tagged,accession number AF234293,Smith-Waterman Score=1062.
atggcggaagggatgcgtaccataggtcgcgccatgcttaaaaataagcatatgacgatcacggaatttgttgcccagcggatgcgtgatgcccagcaaaaaggcgagataagcccagacatcaacacggcaatgacttcacgtttactgctggatctgacctacggtgtactggccgatatcgaagcggaagacctggcgcgtaagcgtcgtttgctcaggattacgcgcgatgattggcggtatcttaaccgcatcctgattctctctctttttcggcgggctggtgataactgtgcccgcgtttcatatcaaaccccaacccgtgaaatcaaaaaactcgacggcctgtgggcattcagtctggatcgcgaaaactgtggaattgatcagcgttggtgggaaagcgcgttacaagaaagccgggcaattgctgtgccaggcagttttaacgatcagttcgccgatgcagatattcgtaattatgcgggcaacgtctggtatcagcgcgaagtctttataccgaaaggttgggcaggccagcgtatcgtgctgcgtttcgatgcggtcactcattacggcaaagtgtgggtcaataatcaggaagtgatggagcatcagggcggctatacgccatttgaagccgatgtcacgccgtatgttattgccgggaaaagtgtacgtatcaccgtttgtgtgaacaacgaactgaactggcagactatcccgccgggaatggtgattaccgacgaaaacggcaagaaaaagcagtcttacttccatgatttctttaactatgccgggatccatcgcagcgtaatgctctacaccacgccgaacacctgggtggacgatatcaccgtggtgacgcatgtcgcgccagactgtgaacacgccaacaacattgtctacagagctgttatccagttcagtaccgttgtctacgtcgccgttaccgttgatagtcaggtgaccatcagagttcatagcaacaataccgtaaccgtagttagacttggaagtatcccaggtacggtcgttcaccagatcagcgttcagaacgtaatcgctgctatggatatcgaacacaccagatactacgttaccgttatggtcagcgatgttgccgctggtcagttccagtttgtcagtacggaaagcttcagtatcgaactgatcaacgttcacatccaatacaccgccgttagttacggtgatagtattggcgtacagcattcgcctgaatttcgcagtgaagccctgaagcttgctgaacgcatcggtgttactgccgcagcccgtgaactcagcctgtatgaatcacaactctacaactggcgcagtaaacagcaaaatcagcagacgtcttctgaacgtgaactggagatgtctaccgagattgcacgccgcgacatacttcgcgaagcgcctgaaatgaagtatgtctttattgaaaaacatcaggctgagttcagcatcaaagcaatgtgccgcgtgctccgggtggcccgcagcggctggtatacgtggtgtcagcggcggacaaggataagcacgcgtcagcagttccgccaacactgcgacagcgttgtcctcgcggcttttacccggtcaaaacagcgttacggtgccccacgcctgacggatgaactgcgtgctcaggctgtaccctttaacgtaaaaacccgggcggcaagctgcgccgtcagggctgagggcaaggccccccgaattcagcccgtagttacgcgcaaagcctgctggtcgaaactgtgggcagaatttagcaggcaaaaatcagccagccagctgcatgcctgttttgtcagaatctcagcaggcatccccctcatggcagggattatggggccaagaaccaagtacccaacacaattgaacaaccaccgggaccataataattcccacaaagatttccagcggagcaacacaagcacaattgagatccaggtggtccccccagtgcagtgggcacaatttaaacagttggcacaacttaccgatgagccaccaacagcagcccgaccgcgcgcgcgccgcagcctgggcgtaagggccgccggagccgatagcaataagatcgttttctggctgcaccacgtcaccgttaccggtgatgataagcgatgcagtttcatccgcgactgccagcagtgcttcaagtttgcgcagcatgcgatcggtacgccagtcttttgccagctcaacggcggctttgaccagatggccctgatgcatttccagtttacgttcaaacagttcgaacagcgtaaaagcatccgcagtaccgcccgcaaagcccgcgatgactttgtcgttgtacagacggcggacctttttcacgttgcctttcattacggtattgcccaacgtggcctgaccatcaccagcgatgaccacatggccgttacggcgtacgcttactatagttgtcacgagctgaccccttggttacgaatacagagtacaaaccccgtacaaaaccttgaacgaacggatggaccatccaaggggtcggatattctccgacgtcggtttgggcgtaagggacgacatgggcaattgctgataaatggcattgttcgagttcgaatcggaagatgtaaaaccgtgtatgatggtgtttttgaggtgctccagtggcttctgtttctatcagctgtccctcctgttcagctactgacggggtggtgcgtaacggcaaaagcactgccggacatcagcgctatctctgctctcactgccgtaaaacatggcaactgcagttcacttacaccgcttctcaacccgccgggcagtgacgtcatcgtctgcgcggaaatggacgaacagtggggctatgtcggggctaaatcgcgccagcgctggctgttttacgcgtatgacagtctccggaagacggttgttgcgcacgtattcggtgaacgcactatggcggcgctggcgaacgttttcctggggacgcctgacggtcatgcaccgtggtctaggcagagcatacctgatgtcgacccatgcttgtatggtcgagagcaatccttgcagcgtaacacgtcgaaatgtgtacaggctacagatgggttcggatgtgacgttaaagctgattgcggtaccatacgacgcgactgtggtcgatgcggagactcgactattacccgaagcttgccggacacttggggattctctagaagtcacctgcaagcattgcagccttgggactggcccgtcgtgttacaacagtctgagactgggtaa

SEQ ID NO: 22510 - DNA, 2730 bp, Homo sapiens
  SIMILAR (1)..(489): 1001254mologous to Homo sapiens Maltose binding protein- zalpha11 fusion protein,accession number Y79316,Smith-Waterman Score=834.
atgaatgcagacaccgattactccatcgcagaagctgcctttaataaaggcgaaacagcgatgaccatcaacggcccgtgggcatggtccaacatcgacaccagcaaagtgaattatggtgtaacggtactgccgaccttcaagggtcaaccatccaaaccgttcgttggcgtgctgagcgcaggtattaacgccgccagtccgaacaaagagctggcgaaagagttcctcgaaaactatctgctgactgatgaaggtctggaagcggttaataaagacaaaccgctgggtgccgtagcgctgaagtcttacgaggaagagttggcgaaagatccacgtattgccgccaccatggaaaacgcccagaaaggtgaaatcatgccgaacatcccgcagatgtccgctttctggtatgccgtgcgtactgcggtgatcaacgccgccagcggtcgtcagactgtcgatgaagccctgaaagacgcgcagactcgtatcaccaattgttgtcggataaggcgtgaaagccttatccgtcctggaatgaggaagaaccccatggatgtcattaaaaagaaacattggtggcaaagcgacgcgctgaaatggtcagtgctaggtctgctcggcctgctggtgggttaccttgttgttttaatgtacgcacaaggggaatacctgttcgccattaccacgctgatattgagttcagcggggctgtatattttcgccaatcgtaaagcctacgcctggcgctatgtttacccgggaatggctggaatgggattattcgtcctcttccctctggtctgcaccatcgccattggcttcaacaattacaggaggactaaacaggtagctgggatgccagcgaagtcttcttcgttgcgtagttcacaagaccgggaaatgcgccccggtgcgaaggccgaacggacccgatacgactcccccggttcctacggtgtggccggccctgggttcctaggttcccgggggggttcgccttttgggggccctggaaaatataacaacaccattaccaaatatgcattaaacatagcgccctctgcacaaaatcagagtccacatggcccgaaactgaaccggagacaagaaacacagcatgcgttagactggttagatgcaggttataccttcacctacagcgaagatcaggctctgactccgtacttcaaactggcttacgtctacgacgactctaacaacgataacgatgtgaacggcgattccatcgataacggtactgaagggtctgcggtacgtgttggtctgggtactcagtttagcttcaccaagaacttcagcgcctataccgatgctaactacctcggtggtggtgacgtagatcaagactggtccgcgaacgatttgacgggcattactgcaaaggacgcgcaaatgttatctgtagttaaacctcttcaggaatttggtaagctcgataaatgtttgtccagatacggtacgcgcttcgagtttaataatgaaaagcaagttatattttccagtgatgtcaataacgaagatactttcgttattttagagggagttatctctctgcgtagagaagaaaacgtacttatcggtattacccaggctccttatattatggggctggctgatggtttaatgaaaaacgatataccatacaaattaatatcagaaggaaattgtacgggatatcatctaccagccaaacaaaccattacgcttattgaacaaaatcaactctggcgagacgctttttactggttagcctggcacaatagaattctggaattacgcgacgtgcagctcatcgggcataattcctacgaacaattcgcgcacattatattcatgattgccgcaatgcaaatgggatccgtatggggtgacgatttctcctcaggtcagcattcggtcgcgcgcaaatcccagctgcacaagcccattcttcgtgtgaagtgccacgaagggtttactatatcagcaaacccgaattccagccctagatatcccaccatcatcgaacaggcggaacagccacggatagttgatttctccatcgtccggttcatgtcgatcagccagtgcctgatactggctggctctatgatgcgtactttcatcaagaaagtatacgcagctatcgaagctggcgacaaagctgctgcacagaaagcatttaacgaaatgcaaccgatcgtggaccgtcaggctgctaaagctactgacggggtggtgcgtaacggcaaaagcaccgccggacatcagcgctatctctgctctcactgccgtaaaacatggcaactgcagttcacttacaccgcttctcaatccggtacgcaccagaaaatcattgatatggccatgaatggcgttggatgccgggcaacagcccgcattatgggcgttgggctcaacacgattttacgtcacttgaaaaaactcaggccgcagtcggtaacctcgtgcatacagccgggcagtgacgtgcatcgtctgcgcggaaatggacgaacatgctccggaagacggtcgttgcgcacgtattcggtgaacgcagctatggcgacgctggggcgtcttatgagcctgcggtcaccctttgacgtggtgatatggatgacggatgggtgggcgctgtatgaataccgcctgaagggagagctgcacgtaagtcagcagcgatatacgcagcgaattgagcggatcaacgtgatctga

SEQ ID NO: 22511 - DNA, 855 bp, Homo sapiens; identical to SEQ ID NO: 22481
  SIMILAR (1)..(396): 991254mologous to Escherichia coli GLYCINE BETAINE/L-PROLINE TRANSPORT ATP-BINDING PROTEIN PROV,accession number D90891,Smith- Waterman Score=663.

SEQ ID NO: 22512 - DNA, 750 bp, Homo sapiens; identical to SEQ ID NO: 14855
  SIMILAR (292)..(747): 911254mologous to synthetic construct InsB peptide,accession number Z37515,Smith-Waterman Score=720.

SEQ ID NO: 22513 - DNA, 2466 bp, Homo sapiens; identical to SEQ ID NO: 14856
  SIMILAR (1)..(516): 991254mologous to Escherichia coli UDP-MurNAc-Tripeptide:D- Ala-D-Ala-Adding Enzyme,accession number U67893,Smith-Waterman Score=865.

SEQ ID NO: 22514 - DNA, 1257 bp, Homo sapiens
  SIMILAR (250)..(549): 1001254mologous to synthetic construct insB,accession number M27083,Smith-Waterman Score=535.
atgctcacggcaccaatcattgtggtcaccttcagagacatagttctgacaaaactgatgatggtctggcactcacagagcgggtatgaaaaggcttatgctcacattcagagatggtggtaccgagctattctgctactgacggggtggtgcgtaacggcaaaagcactgccggacatcagcgctatctctgctctcactgccgtaaaacatggcaactgcagttcacttacaccgcttctcaacccgccgggcagtgacgtcatcgtctgcgcggaaatggacgaacagtggggatacgtcggggctaaatcgcgccagcgctggctgttttacgcgtatgacaggctccggaagacggttgttgcgcacgtattcggtgaacgcactatggcgacgctggggcgtcttatgagcctgctgtcaccctttgacgtggtgatatggatgacggatggctggccgctgtatgaatcccgcctgaagggaaagctgcacgtaatcagcaagcgatatacgcagcgaattgagcggcataacctgaatctgagcagcacttctatccttgtgttactgaatggtgccacacagttccaggatctgggcgacttgaacaaagaattggaagagacatatacagatagcaaaaatcatatttcctgcgtcggtaatgatttcggtttcaatgatattttctcccgctacgttgaagcggtaggtcgcgaaggcgatgtactgctggggatctccacctccggtaactctgcaaacgtgatcaaagcgatcgcagcggcgcgtgagaagggaatgaaagtgatcaccctgaccggtaaagacggcggcaaaatggctggcacggcggatatcgaaattcgcgtaccgcactttggttatgccgaccgcattcaggagattcacattaaagtgatccatatcctgatccagttgattgaaaaagagatggttaatttcaccgggcttgtacagcgtggtggtggaaccgggccacataaagatggctggggcattaccttttacgaagtggcctttgaggatgtggcagtgaacttcacccaggaggagtgggctttgctggatccttggcagaaaaaactctacagagatgtgatgctggaaacctataggaacctggcttcagtaggtgatgacgacaacattccttcacttagagaacaagttgcccatcaacgatatttcaagacctggcatgtggaaagggaatacttcagtaaataa

SEQ ID NO: 22515 - DNA, 1236 bp, Homo sapiens
  SIMILAR (750)..(232): 991254mologous to Escherichia coli ThiJ,accession number U34923,Smith-Waterman Score=873.
atggccctggaaacctttatcatctacacatctcaactcactatccccgctttacccaaacaacaccccaaaaaaccaacccccttgggggccttcggaccatttggcacccacaggcttttggggcccaaaaaccgcccccgtgaacaaaactggctgctgtggtgtgagcgcggggtgatgagccgtctgcaggcgctctatctgcgcgagcagggctttaacaatgtgaaggtcgataattttcagaccaaagtcgatagctgtacccggcccctggctggtcagcaattttacccgtgcatcccagacgacgcgcttgtccagccattgttcggcgggaattttgtctttcagcgtcgggaagccggtcatattaccaatcgggaagatatcgtgcggcaccagcacggtggctggcgcggcgcaaatagccgcgacgatacgcccggaacggtggaactgtttaacggtttcaaccagcagagtgctatcgcgaaaacactccgcgcctttaatgccaccaggcagcacgatcacgtcatattcgccatcagccacttcgaccagcggcgcatccgccagcagcttcacgccgcgcgagcaggtaatcgccaggttaccatcgctggcgacgctggcagtggtgactttgataccgccgcgaaccagcagatcgatagtggtgacggcttcagtctcttcactaccaggggcgaggcaaaccagtgccgatgcgctcatattcactctcctttctttttaccatttcaaacagtgcgggtgttttccgctgtccctcctgttcagctactgacggggtggtgcgtaacggcaaaagcaccgccggacatcagcgctatctctgctctcactgccgtaaaacatggcaactgcagttcacttacaccgcttctcaacccgccgggcagtgacgtcatcgtctgcgcggaaatggacgaacagtggggctatgtcggggctaaatcgcgccagcgctggctgttttacgcgtatgacagtctccggaagacggttgttgcgcacgttttcgctgtaaagccctattgggacactggggggggcttccactgccgctggatttacatgcagcaggaaaaagagttgctgcaactcagtttgcaacaagggaaatataaccagaagcgcgcggctgaattactggggttaacttatcatcagttccgcgcgttgttgaaaaagcaccagatttag

SEQ ID NO: 22516 - DNA, 1756 bp, Homo sapiens
  SIMILAR (67)..(705): 991254mologous to Escherichia coli K12 diaminopimelate epimerase,accession number AE000457,Smith-Waterman Score=1097.
atgggagtaaatgatgcagtcctcgaaatgcatggccttggcaacgattttatggtcgtcgacgcggggtttgaccaactgctggtggttgagccgccgtatgatcttgagctggattttcactatcgcatgttcaatgctgatggcagtgaagtggcgcagtgcggcaacggtgcgcgctgctttgcccgttttgtgcgtctgaaaggactgaccaataagcgtgatatccgcgtcagcaccgccaacgggcggatggttctgaccgtcaccgatgatgatctggtccgcgtaaatatgggcgaacccaacttcgaaccttccgccgtgccgtttcgcgctaacaaagcggaaaagacctatattatgcgcgccgccgagcagacaatcttatgcggcgtggtgtcgatgggaaatccgcattgcgtgattcaggtcgatgatgtcgataccgcggcggtagaaacgcttggtcctgttctggaaagccacgagcgttttccggagcgcgccaatatcggttttatgcaagtggttaagcgcgagcatattcgtttacgcgtttatgagcgtggggcaggagaaacccaggcctgcggcagcggcgcgtgtgcggcggttgcagtagggattcagcaaggtttgctggccgaagaagtacgcgtggaactccccggcggtcgtcttgatatcgcctggaaaggggaagaactgcaggaaacactcacggagcttgatgaccgggcggttgtcgattatctgattaaaaatcctgagttttttatccgtaatgcgcgcgcagtagaagcgatacgtgtgccgcatccggtacgcggcaccgtttcgttggtcgagtggcacatggcccgcgcacgtaatcatattcatgttctggaagagaacatggcgctgttgatggaacaggctatcgccaacgaaggcctgttttatcgcctactctacctgcagcgcagtctcaccgccgccagcagtctcgacgatatgctgatgcgctttcaccgctgggcgcgcgatctcggcctggcagtcgcgatgccagtcactatcaacaagggcaaccagatcattgaaaaccaactggatacagaaacaataactattagttatgaatttatcctctgtcaacatcttatcgcaaataccgagttcagctatttggcactccctgaaaattataaccgtttgtgtttaccaaattcaaaaaaccaaacaaataatcgtttcaaaacgttaaacagcaaagctattggcaggctacttgctgctggtggcgtatacaatgggaacattgaaggattcagagatactgcggaaaaactggctgtccctcctgttcagctactgacggggtggtgcgtaacggcaaaagcactgccggacatcagcgctatctctgctctcactgccgtaaaacatggcaactgcagttcactttacaccgcttctcaacccgccgggcagtgacgtcatcgtctgcgcggaaatggacgaacagtggggctatgtcggggctaaatcgcgccagcgctggctgttttacgcgtatgacagtctccggaagacggttgttgcgcacgtattcggtgaacgcactatggcgacgctggggcgtcttatgagcctgctgtcaccctttgacgtggtgatatggatgacggatggctggccgctgtatgaatcccgcctgaagggaaagctggcacgtaatcagcaagcgatatacgcagcgaattga

SEQ ID NO: 22517 - DNA, 2036 bp, Homo sapiens; identical to SEQ ID NO: 14858
  SIMILAR (28)..(774): 941254mologous to Escherichia coli alternate gene name srlQ,accession number U29579,Smith-Waterman Score=1161.

SEQ ID NO: 22518 - DNA, 1353 bp, Homo sapiens
  SIMILAR (1)..(1014): 841254mologous to Escherichia coli GLYCINE BETAINE/L-PROLINE TRANSPORT ATP-BINDING PROTEIN PROV,accession number D90891,Smith- Waterman Score=1348.
atgggattatccggctcgggtaaatccacaatggtacgccttctcaatcgcctgattgaacccacccgcgggcaagtgctgattgatggtgtggatattgccaaaatatccgacgccgaactccgtgaggtgcgcagaaaaaagattgcgatggtcttccagtcctttgccttaatgccgcatatgaccgtgctggacaatactgcgttcggtatggaattggccggaattaatgccgaagaacgccgggaaaaagcccttgatgcactgcgtcaggtcgggctggaaaattatgcccacagctacccggatgaactctctggcgggatgcgtcaacgtgtgggattagcccgcgccattaatccggatatattattaatggacgaagccttctcggcgctcgatccattaattcgcaccgagatgcaggatgagctggtaaaattacaggcgaaacatcagcgcaccattgtctttatttcccacgatcttgatgaagccatgcgtattggcgaccgaattgccattatgcaaaatggtgaagtggtacaggtcggcacaccggatgaaattctcaataatccggcgaatgattatgtccgtaccttcttccgtggcgttgatattagtcaggtattcagtgcgaaagatattgcccgccggacaccgaatggcttaattcgtaaaacccctggcttcggcccacgttcggcactgaaattattgcaggatgaagatcgcgaatatggctacgttatcgaacgcggtaataagtttgtcggcgcagtctccatcgattcgcttaaaaccgcggctgtccctcctgttcagctactgacggggtggtgcgtaacggcaaaagcaccgccggacatcagcgctatctctgctctcactgccgtaaaacatggcaactgcagttcacttacaccgcttctcaacccgccgggcagtgacgtcatcgtctgcgcggaaatggacgaacagtggggctatgtcggggctaaatcgcgccagcgctggctgttttacgcgtatgacagtctccggaagacggttgttgcgcacgtattcggtgaacgcactatggcgacgctggggcgtcttatgagcctgctgtcaccctttgacgtggtgatatggatgacggatggctggccgctgtatgaatcccgcctgaagggaaagctgcacgtaatcagcaagcgatatacgcagcgaattgagcggcataacctgaatctgaggcagcacctggcacggctgggacggaagtcgctgtcgttctcaaaatcggtggagctgcatgacaaagtcatcgggcattatctgaacataaaacactatcaataa

SEQ ID NO: 22519 - DNA, 1692 bp, Homo sapiens
  SIMILAR (1210)..(1689): 981254mologous to synthetic construct insB,accession number M27083,Smith-Waterman Score=851.
atgacggcggcgacggaacagcttaacgcgtcacgcggtcttagcacgcgcgaaatggaacgacaagcggaactggctaaaataaccactgattacatcaactctggaggtagtgagggagacgaaaaactccagaacatgattaaggcgcaaaatgattactacgctgcggaagatgccaaacgcgctgactggttggctggcgctgaaagcgcattcgctgattacggcgactctgcaatggatatgtacggaaacgttaatgagatcgcatcaagtgctctaaacggtatgacggacatgatggttcagttcctcactaccgggaaagcaaactttgctgactttgctaaaaatatcatcagcatgattataaagatgattgctcaaatggtaatcttcaatacgagtctcaggaatgatgggcgatctgtatcttccggcggggccgctgtatcacttgctgccgcagcgggtagcgtggcaacatctggattcaacgcatcaaactcggctccaaaggtggtaaccattcgggaggtggaacggtcagttgacgttagtggaatggaggcctccagtacctcctggatcacaatccgctctttcaccgccgagacatccacttttggcccgacgatgaccgcatcaatgacctttttaccaacatactgctccataattgccagcttgctttccagcttcaagttagccgcagctactgacggggtggtgcgtaacggcaaaagcaccgccggacatcagcgctatctctgctctcactgccgtaaaacatggcaactgcagttcacttacaccgcttctcaacccgcgttggcgcgtaacccaaaccgtgatatcaccatttactggggcgggcgtgaagagcagcatctgtatgatctctgcgagcttgaggcgctttcgttgaagcatcctggtctgcaagtggtgccggtggttgaacaaccggaagcgggctggcgtgggcgtactggcaccgtgttaacggcggtattgcaggatcacgctactgacggggtggtgcgtaacggcaaaagcactgccggacatcagcgctatctctgctctcactgccgtaaaacatggcaactgcagttcacttacaccgcttctcaacccggtacgcaccagaaaatcattgatatggccatgaatggcgttggatgccgggcaaccgcccgcacttatgggcgttggcctcaacacgattttccgccatttaaaaaactcaggccgcagtcggtaacctcgcgcatacagccgggcagtgacgtcatcgtctgcgcggaaatggacgaacagtggggatacgtcggggctaaatcgcgccagcactggctgttttacgcgtatgacaggctccggaagacggttgttgcgcacgtattcggtgaacgcactatggcgacgctggggcgtcttatgaagctgctgtcaccctttgacgtggtgatatggatgacggatggctggccgctgtatgaatcccgcctgaagggaaagctgcacgtaatcagcaagcgatatacgcagcgaattgagcggcataacctgaatctgaggcagcacctggcacggctgggacggaagtcgctgtcgttctcaaaatcggtggagctgcatgacaaagtcatcgggcattatctgaacataaaacactatcaataa

SEQ ID NO: 22520 - DNA, 948 bp, Homo sapiens; identical to SEQ ID NO: 14862
  SIMILAR (490)..(945): 911254mologous to synthetic construct InsB peptide,accession number Z37515,Smith-Waterman Score=720.

SEQ ID NO: 22521 - DNA, 1122 bp, Homo sapiens
  SIMILAR (664)..(1119): 911254mologous to synthetic construct InsB peptide,accession number Z37515,Smith-Waterman Score=720.
atgctggccaatatcgggttttataatagtaatgtcatccataggagcaaaggagcaattggagagggcccgccagatcctcgaggaattgtagagcagaacctgggaggagacattagcatcccgtgctacaatggaccaaggcctcggcggagcgcgcagaagacaactctgggcccgctaaaccaacccaggatacccagcgcgcagtgcgcaggcgccttcccgcgggtcgcggcggcgggagcgggaggcggcggcggcggcggcagcggcgggagcggcttctgcctcggctggagactgaggcgaaggcggcagcggcggaggaggtggaggagaggcgagggtgaaggcgatggcgacgcggggcacatgaggccgcgaccggcgggacgggccgaggcccggcggaggaggcggctccgggggaacccgccgccgggcgcgcggctcccaaatcgggagggaaacggctcgggggtgtcctgggccgcggaggtgtcgggcgacggtcggggagcccggacagaagcggcgcgcactcggcggcgccccggcggtgccgacaactacccgggcgctgtccctcctgttcagctactgacggggtggtgcgtaacggcaaaagcaccgccggacatcagcgctatctctgctctcactgccgtaaaacatggcaactgcagttcacttacaccgcttctcaacccgccgggcagtgacgtcatcgtctgcgcggaaatggacgaacagtggggctatgtcggggctaaatcgcgccagcgctggctgttttacgcgtatgacagtctccggaagacggttgttgcgcacgtattcggtgaacgcactatggcgacgctggggcgtcttatgagcctgctgtcaccctttgacgtggtgatatggatgacggatggctggccgctgtatgaatcccgcctgaagggaaagctgcacgtaatcagcaagcgatatacgcagcgaattgagcggcataacctgaatctgaggcagcacctggcacggctgggacggaagtcgctgtcgttctcaaaatcggtggagctgcatgacaaagtcatcgggcattatctgaacataaaacactatcaataa

SEQ ID NO: 22522 - DNA, 2943 bp, Homo sapiens
  SIMILAR (377)..(478): 381254mologous to Salmonella typhi IS1 transposase,accession number AF250878,Smith-Waterman Score=56.
atgaaattgaacaaaggtctaagtaataagcagacctgggagttccattcaggtgagagggctgttgctcagcaggcatgggctggctctcggctctgctccggatttgtggaaactgccctgggtgaaccttgttcagggaatgggccagcagtcccaaggcagcagctgcagggagggttgcagcaggccccagtgtcccagcgcagcaccgtgtggagcagccccagcgcacttctgctcagcagccacattctgggagtccgaggtccagagtataccacggtgagagctactgacggggtggtgcgtaacggcaaaagcacgccggacatcagcgctatctctgctctcactgccgtaaaacatggcaacgcagttcacttacaccgcttctcaacccgaagttatacgatccagccccacttcagcaccacggtcagacggaacaaagacggttccccccctgatggggatatcgccctagagcgcacaccatcgactagccacctcagacccctcgttatgtctctccgagagcctatgctccagagagccagccgctgtccctcgggcatccaaccaacagccacagggtgtcaaggatgtacaccaccagtttacagccagaacttcgcgatacccatcgaaatgctaagggtactggacacagaatgcgcccctagaaggtggaacctgggatgtgcaagcccgctaagagtgacatatgcccagagagcaaaacaggctgttcgtgcccgaagactacgtggaccaacgatacataagtacgtcgtacagcagacccccgtgggtctgttcgaaacacaagagctaagtgtaaatacggttcgacagtttactatgggcgttagatatctcgagtgtacgtgggtgtctatgaaacatcttgaacgcctttgccagagcgcgttcagcgacagctttacccacagctgcagccgcgttttgttaccggtgtacttcagttgttcagcgatagctttttctacagtaaagcagctaccagaacttcagaaccgttcggtgcaattacctgtgcgtaatgtgacgcgggccttcaactccgtaggcgacatttcagccctcgtggtacgcttccaagactccacggacgaacgtcatcttagcataggtctcgatagccgaacctgttttgggaaaaaggcggcctcgaaggagttaagtgtgccgagcggatttcgatcccgtagtacgattccaatgcggaaggtttccgacctggtggttttccaaccagggtcaaatggcgaatacgataccgctatcgccagcatcgccaaacgagcagatgaaggacacaaggaaaatacgaaacctttgtgcaatcgaaagaaacgtcggctatctctataccatgacgcaaacggacgatttactgcgcaagctgtagatcagttacgcaacagcggcagcagcttctcgctggtttacttttctgccacggtctggcctttaaagagcgcgtattattctgttcccggcgaccacgcgtcatggttcgggggcggtactggttggaactggctgacaacaattcgctgtatttgcagcctgggcaaccgctttatgtgttactctatgcgtcgcaatcatcttcttctgtttcttctacacggcgttggttttcaacccgctgaaacagcagataacctgaagaagtccggtgcatttgtaccaggaattgtccgggagagcaaacggcgaagtatatcgataaacgtaatgacccgccgacactggttggcgggtcgccatagcgatcatatagacgtgtacgcagccaccaagcttcgtagcgagtggcgaagagtacgagtgtacctgacaccggaccacgggctcaaagtgtccctaccgcatggtggcattcgctacgcgacatgcgatatcgaccttcttagtgaaggatatacacctctcaggcatgagatcgagccagacacctatgaaggcaggactcaattgggaaatgtacaacaggggggttcaatttcacaccaggccgccataccccccctggggcaaacccgtgatcagagaggtacacagtgctcagcccaacgtggcaaacactgttctcaccggacccctggtgagtgcactggacacatcgacaaggaaccaaaaggctcttacaccacgggctcagcactggatcccgtactcccggacgggccaggttatcccacgttgccttccgccctccacgcaaagttgaccgcggactttaccaaggaccgctgcccccacgaagcccacacaactcggaagatttgttacttcaaactttggacctaccacttggggagccagactatgtgcgcgaaagtcgctgcacccaaactctactgcgacgggattggaccacggaggaccgggattgcggacaacggttgttcaggacctaacaatgtactctggcgaattggctactcattcttgaaaatgttcagtgcgtatgttcgtgcgaatctgcccgccgcaagcctcgagctagttcgccggtggtggggataccagctggcggtggacgattctatgtacagtcgagtgaacgataagtgtcctcgtagtgatgttcctggagcctatttgtcgcgacaggtggatgcgcctaatggcggggagcacaacttggtgtgtcgccgcctccgtggagtgtccacggtggaaccgcctggttggtcggcacactgcgtcgatgtcatcgccaagtggctgtggtggaataacaccaaagttgcccctacggagattccactctcgagagaggaatccgggcttacccaccggtctgatgacacgacttccggatccgttatggcccctataccccgggacgtaatatgcgcctgtagaagagagggcaatatccaccagtacgatcaagtgccctaa

SEQ ID NO: 22523 - DNA, 1440 bp, Homo sapiens
  SIMILAR (566)..(492): 1001254mologous to Escherichia coli ORF_o492,accession number U14003,Smith-Waterman Score=116.
ctattcttccggcggcatacagacgccaattccgccaattctacagtaaccatacgggtttttatgcagatattgctggtggtcatcttcgtcattataaaactgtgtggcgttagcgatttccgtggtgatgtgtcgatcgtcatcttcggcaagcatcgtcgccgataccgaggtgtcatcaatcttaatgttgacgttgtccagtgccacccgtgtcagggttatgggatacggcgtggagagatccagcggaccgctatcttcctcttcttcaacctgttcagaaggaggcatttttttactgtcgatgttgacctgaatgtctttcagcgccagatcattaatacaaacactgctgttccacaggcactcaagcccgacagccagatgcagattgcccgcttttaccgccacgcctggctgctcataacgaacgtcagacaaggtgagatcgcgccagccgccggtgaccttgccaatatccagtccagaaacgccaccgatcccagcaacagtaagataacgataaccacgccgaggctgatttttttccataaactcataattctggccccagaccgatgtaaaactgtaacccgtgttcgtctttatccgcgatcggtacggcaaaatcgagtttgatttgcccgaccggcgattcccagcgcacgccgaccctcgtacctgttttaaaagtcgctgcggcgaatatcgcttacccgcttcggcactatcgacaaacaccgcgccccaccattttccggccacgttgtaccctgagcccttgctgggaggcgaagcaggtgtgggagggaggcagtcgtacttctccgacgtctccttcagggccttcagctctgccgcctgtttctctctggccagctccatcattttggagatttgctgcagggagaggaagtaagcttggcgagaagcccttttaggtgaatgttcgtgtcttgtcgactctagaggatccccggtaagcgagggcatagcgtcattgtttcgcctcatgccggagcaggtaggaccgctgatgacgatggttacatcgatgccagccttagccagcacctctttttcataatcaagactgaagaaccacacgccgccgttttccagccagtggttaacgtttccatactccgatagcccatcaatcatcatctgctcatggttacctcgcacagcccggaaccaaggcatagtaatcagctccaggcactcgacgttttccgcgccgcggtcaacaaggtctccaaccgaaatcagcaaatcacacgcagggtcgaacgaaaccttttcgagttcattcatcagcagcgtgtagcacccatgcagatcgccgacgacgaaaatattgcgccagtcagcgccattaatgcgttgatacatgctcatgcagattttctcctcgccgcgagtcgcagccat

SEQ ID NO: 22524 - DNA, 818 bp, Homo sapiens
  SIMILAR (471)..(815): 881254mologous to Bacteriophage phi-80 cII gene (AA 1 - 132),accession number X13065,Smith-Waterman Score=502.
acctcattctcggtacccggggatcaacaaaaaatccaacgccagcaccccgcttgagaaagccattaatgcagtgggcggctctcaaaaggtgcttgctgaaaagggcggcggaacgcctcaggccatcaatatgcttaaaaagcgaggtggcagccttccagtaacaaaaatgcgtaaatacgaagaagtaaccggacttcctcgcgaagttctatatccaggtatctttgccgcctaaccggcggctctaaccacgaaatggaaagcaatgcattcacttgcgtatcaacacaataccggaatacacccgggagcgatgataaaccgcgctcaacctaaggcggagccaggtcacgacaaaatccgcgatgcggtccgtgcatggtcgtcgtccctggacaatcaggacgtagtgtcagcgctgattcatcaacagaattccgggagcagggcgggtcccgccatcaagtttcccaaaaagcatcaacagggcgggcccagaactttttcgctttatggaaaacccctttaactccgtatagtaccggaagaacgttagagaactgaccccggcaatcatggctgttcttcctgttgagtttcgtacacgcctggcgccgcagaacgacaccatgtcgctgatcgcatctgccatgaaggaatgttcagaagcaaagcaagccgttctcctgaacgcgcctgagcaccagaaaatgaaggaggtaagcgagggcatagcgtcattgtttcgcctcatgccggagcaggtaggaccgctgatgacgatggttacatcgatgctgggggttatatga

SEQ ID NO: 22525 - DNA, 1514 bp, Homo sapiens
  SIMILAR (1458)..(535): 961254mologous to Escherichia coli K12 putative transport system permease,accession number AE000500,Smith-Waterman Score= 1481.
  misc_feature (1)...(1514): n = a,t,c or g
cgagctagtcaggcgcagcttgtcgcgcaggtattcagcaaagaaagtaaagccgccggaggcaatcgccactttccagcccagcgtttccagcttgagcaccagttgcgttaagcctggcatcagcggcagattttcacgcacctgttgcagaatattggcgtcagcgcctttcagcgtcgccacacggctgcgcaggctggcggtaaaatcgagttcgccgcgcatcgcccgttcggttacttccgccaccatctcgcccgttccggccagtttggcaatttcatcaatacattcaatctggatggcggtggagtccatatccatcaccagcaaacccggcgtgcgcaggtgcgggattttccccagcggggcgacatccagctgcgcttcgtgggccaggcgtgtagcccgtgcggtgagtgaacctgccagacgaatcacctgataatcttccacgcaccaggcggcaacaatcaccatcgccgcacccagtttgctgaccatacagcagccagccgctacgacctgcgtgtaatctttaatcatccagaaactggcatcgttaacgtgagaacaaatacaggatccggcaccggtagccagcgtaatcaaggccaggttggtattgggatgtactgccaacaatgggatgaccagaccggcggtagagatcgccgcgacggtggctgaacccagacaaatacgcaggaatgcggccacgccccaggccatcaggatcgggttaaatatccatacccgaaaccaggggtgggaaatatactgaccaacgccagagtcgatgagaacttgcttgaatgcaccaccaccaccgatnatcagcagcagaccggcaatacccgcgatagcttttccgcaagaatccatcaggtcagggattgttttcccgcgccccaggcccatggtatagatcgcgaatagcagtgaaatcagcatggcgatcgttgaattacctaagaacagtatcacgttgtaaaataagcctgaatccgcggcacttttggcatgagtcatctggatgatggtgacaaccgccatcaggatcaccggcagcattgccgtgagaaaactgatcccaaagcctggcatttcgctttcgctgaatcggcgggtcgcgccgagacaggctatattcccctcttttttaaaggcgtccggaataatgcgctggcagaatttattcaataccgggccgcaaagaataaaggttggaatgccgacaatgataccgtatatcagtaccaatcctacatcagcgccatattccctggcgataacagtcgggccggggtgcggcggcaaaaaaccgtgtgcgaccagcaaaccagaaagcatcggcacacacataaacatcggtgatatttttgcttcacgggcaatagcgaataaaataggtaccagaagaattaaaccgacttcgaaaaaaagtgcgataccggactgcgcgaagccgacgaatttcatattgaacagtcgatctgcttcctgcggtc

SEQ ID NO: 22526 - DNA, 1177 bp, Homo sapiens
  SIMILAR (1177)..(419): 951254mologous to Escherichia coli similar to Y. enterocolitica RosB,accession number U82664,Smith-Waterman Score= 1157.
gcgcatcttcgatggtcatatccagcacttcgtggatggttttgcctttgtacttaatctccagcgtttcacggttatagcgtttacctttgcactggtcgcacggcacgtagatatccggcaggaagtgcatctccactttgatcacgccatcgccctgacaggcctcgcagcgtccgccacgaacgttaaagctgaaacgtcccggcgtatagccgcgcgcacgggattccggtacgcccgcaaacagttcgcgcacaggcgtaaacacgccggtataggtcgccgggttagaacgtggagtacgaccaattgggctttggtcgatatcgatcactttatcgaaatgctccagcccctgaatatcgcgatacggtgctggttcggcgatggtcgccccattcaactggcgttgggcaatcgggaacagtgtgtcgttaatcagcgtcgatttaccggaaccaacccctaacgccagcgccagcaccgacagggtaaacagctcgcgagaaccggttgccgcgctgcgtgccataatccacggcaccagacggcgacctaccagcatcataatggcgataaatgcgatcactttgccgatggtgatccccatatcgactgcaagagtggcaaagcccacatcgccctgttccatcattcctgccactgcgggcagcaacaccagcgtcagaaccattaccaggtcttccacaatcaaccaaccgatggcgatttgcccacgctgactgtcaattaattgccgttcttcaagtgcgcgcagtaacaccacggtactggcggtggaaagacataaaccgaacacgataccggtcattaacgaccagcccagcacggcagagagcgccatacccagcagcgtcgccacggctatctgggcgatcgcaccgggaatggcgatggcctttaccgccatcaaatccttcagcgaaaagtgcaaaccgacgccaaacatcaacagaatgacgcccagttcagccagttccggggcaagcttggtatcggcaacaaagcccggagtgaatggtcctgccagcacacccgctaacagatatcccaccagaggagaaatacgtagtttattggccagcatgccgaggataaaggcgagcacaaggccgccaacaatggtggtgataagcggggtggcgtgatgcat

SEQ ID NO: 22527 - DNA, 2712 bp, Homo sapiens
  SIMILAR (1666)..(2220): 951254mologous to Escherichia coli K12 low-affinity phosphate transport,accession number AE000381,Smith-Waterman Score=903.
atggcccatatgaagctggtcgacgaagccaaagcccgcgccgatgtggtcgtcgtcagtattttcgttaacccgatgcagttcgaccgcccggaagatctggctcgttatccacggaccttgcaggaggactgcgagaagctaaacaaacgtaaagtggatttagttttcgccccttcggtaaaagagatctacccgaacggtactgaaacccacacttacgttgacgttcctggcctttcgaccatgctggaaggtgccagccgtccgggacattttcgcggcgtttcgactattgtcagcaagctgttcaacctggtccagccggacatcgcctgcttcggtgaaaaagattttcagcaactggcgctgatccgcaaaatggttgccgatatgggcttcgatattgagattgtcggtgtgccaattatgcgcgccaaagacggtctggcgctaagtcccgtgtgcgaaaagcgcggctggaaaaaatgggcgcagcagcgtggactgcgcaacatgcaatttttcccgctgcaatcgtatgacgctttacccgcactgctgaagatgggcgattgccatctggtggtgcaaaaacgcggcgcggcagatgccgtattgccgtcgaaactgaccaatattctggcagtaggcggtaacgcggtgattactgctgaagcctacacagaactggggcagctttgcgaaacctttccgggcattgcggtttgcgttgaaccggaatcggtcgaggcgctggtggcggggatccgtcaggcgctcctgctgcccaaacacaacacggtggcacgtgaatatgccgaacgcacgctcggggcgttcatacattccgagccccatgtcgttatcttcgggcacattgatctgaattttcgggcagccacgagcaatcagctttttctccagccgattaagcaacgcattggcaatcccacgcccacgaaactctggatgcacgccaagataataagcagacccgcgatgcccgtcataaccgcccatcaccgttccgaccacgtcaccgtttacctcagcgaccaaaaacaaactgacgtcatggttcatcttacgctcgatgtccatttccggatcgttccacggacgcagcaagtcgcaacgctcccaaagggtgatgacctcttcgaaatcttcctggcgaaatacgcgtatctccatggtattcgttacctttttgcggaaaataacaaaatggcggaaatcgcccaattcctgcatgaaaattatttgagcgttgacaccacagtggaagtatctattaccgtaacccgcgatgaaaagcttatcgcgtgcggtggaattgccggaaatattattaaatgcgttgctatcagtgaatccgtccgcggtgaaggactggcgctgacattagccactgaattgataaacctcgcctatgagcggcacagcacgcatctgtttatttataccaaaaccgaatacgaggcgctgttccgccagtgcggtttttccacgctgaccagcgtacccggcgtgatggtgctgatggaaaacagcgccacgcgactgaaacgctatgccgaatcgctgaaaaaatttcgtcatccagggaacaagattggctgcattgtgatgaacgccaatccctttacgaatggacatggtgaccgtattcaccgcattccggaagatcgcaaaaagaaaaaaggcaaacgtaaaccgccattctggacgcgtattgcgctgattgtttccgctgcgggcgtggcgttttcgcacggcgcgaacgacggacaaaaagggatcggcctggtaatgctggtactggtggggattgcccctgctggcttcgtcgtcaatatgaatgcgtccggctatgaaattacccgtacccgcgatgccgttaccaacttcgaacactacctgcaacagcatcctgaactgccgcagaagttgattgcgatggaacctccattgcctgcagcatcgactgatggcacgcaagtaacagagtttcactgtcatccggcaaatacctttgatgctattgcgcgcgttaaaacgatgctgccaggcaatatggaaagttacgagccgttaagcgtgagtcagcgcagccagctgcgccgcattatgctgtgcatctctgatacctccgcgaagctagcgaaactgccaggcgtcagttcacccttccgggtgatcctgtacaactttcgggatctgacgggtcaggacttaaccccggaaaccgtgacgcgtctggctctgcaaaacgagaatatcgttggcatcaaagacaccatcgacagcgttggtcacttgcgtacgatgatcaacacagttaagtcggtacgcccgtcgttttcggtattctgcggttacgatgatcatttgctgaatacgatgctgctgggcggcgacggtgcgataaccgccagcgctaactttgctccggaactctccgtcggcatctaccgcgcctggcgtgaaggcgatctggcgaccgctgcgacgctgaataaaaaactactacaactgcccgctatttacgccctcgaaacaccgtttgtctcactgatcaaatacagcatgcagtgtgtcgggctgcctgtagagacatattgcttaccaccgattcttgaagcatctgaagaagcaaaagataaagtccacgtgctgcttaccgcgcagggcattttaccagtctga

SEQ ID NO: 22528 - DNA, 2586 bp, Homo sapiens; identical to SEQ ID NO: 18073
  SIMILAR (1354)..(1908): 931254mologous to Escherichia coli ybaE,accession number Z54355,Smith-Waterman Score=947.

SEQ ID NO: 22529 - DNA, 1662 bp, Homo sapiens
  SIMILAR (1356)..(943): 871254mologous to Escherichia coli K12 putative 2-component regulator,accession number AE000418,Smith-Waterman Score=622.
tcatccgtaaataaagatgctccaagatggtgcgaaaatgaaggaagcccataaacgttcccttgggccgggcttttgcacttgggaacccggttctctagccttgggccaccaaccctgtaccaatttgccggcccgccccagaatcccccccggtttccccttgggggaccgtgccgctacatgcaggacaaacggtgttagttcgcctgccagtttgtacagcgtcgggatcatcagcagcaaaccctgcgatgacgtaaacgatgttgaaagggcacccgtctgcaaagcgccatgcacggtagcgatagcacccgcttccgactgcatttcaaccacgcgtggtgtgtctccccaaacgttctttaagccgtttccggcccaggcatcagcctgttctgccatctgtggaacctgaggggtaactttcatatggagatccagcaagatcacgtcgatatccagtctattcgccagatcgatagcgctcgcgccgtcgcccgcttcggcgaccacttcagagccaggatcaagctccagtaactgacgaacaccgcgtcgcataagtggatgatcatccacaatcatcacctgaaaaggtgttgcttcgccgacagtgaattcagcagtaagcgccgtcagaccagaaaagagattttcttgtcccgcatggagcagattctgccatggcaaaatctggctgatgcgagtccgggaacgacttgctatcgtccagccacatgaaccagctgcgggcgaagcattccggaagatgtgattgccggagcctcggcactggttctcaccttcataatcaagtttgtcattgccgagaatccgcagtggtggcagcaattcctcaaagatcacgtctctatccttgcgatgaacgaagatgaagccgaagcgttgaccggagaaagcgatccgttgttggcatctgacaaggcgctggactgggtagatctggtgctgtgcaccgccgggccaatcggcttgtatatggcgggcggtggtgatgtgaattaaatagtcttctttttctggctgaaactcgtaaccacgggcgaaatcatgcaggcaggcgtagacctcttcgaaatcccacgggttatgcagttcaatctcaacgctcaccacttctgtttctggcgaaacgctggcgatatcgcgtttaagcgtttcaaatagcgagcgcgagcgggcgtcgtgcaacaattccagtcgatcgatgaccaacgattcttgctggcataaacagagtgtcggacgccattttgaccagcgctgactgccgcgcccggcataatccagtacggtaccgacaaagccaaaagccactgttttacgcatcttagaaatccttataaaagacgatatttcattatcggtaaattggctttgcgggaaatctccggttacggacgtaaagatataatcaatccgaatggaacccggcatcagtccagtgcttaaggaccagcaaggaccggtactcgtcgcccgtgacgcaccggcgtcggcgtgctggcagccgtcagcggcaccacagggcgcatgttggcgcaaacgatgaaaatcaatgggatgcgcagcactgcgatacatgcgccgtgcgttgacgtctgcccgaccggtgcgtctatttcgccgatacat

SEQ ID NO: 22530 - DNA, 4502 bp, Homo sapiens
  SIMILAR (1898)..(2911): 921254mologous to Escherichia coli inosine-guanosine kinase,accession number D00798,Smith-Waterman Score=1617.
gtaaagtgggataaacgtatcgccagaacgcgttaaacgcgcatcaatcccatgattacgcaaaatggaacggacgtttttagcaatcgccagcaccacatgtttttctttcgaaccgttgcgtccgatcgctccggtatcaattccgccgtgacctggatcgagaacaacgacacgtttgccgccagattttttggctttcggcttgctgtgtccgttgctggtttttaaaagttcgtctttggcgatggcttgcgacattcctgacaacgtcagggcagccaaaccggctttcagcacctggcggcgcgaagtgagtgtttttagtggtttaaaagtgctcatacggcctgagttgtaataataaagttccagatgttatatcgtatcgcgtaatccgttacgacggtttgctgttgagaattgttttacttttcatttcaatagttgacaactccccattatgccgctttttcaaccgattttcgtcagatattggttaattgggccgttcacgccataatcagccttttaacccgcaaaaaggtaacgaatgccatggagatacgcgtatttcgccaggaagacttcgaagaggtcatcaccctttgggagcgttgaaacttggtgcgtccgtggaacgatccggaaatggacatcgagcgtaagatgaaccatgacgtcagtttgtttttggtcgctgaggtaaacggtgacgtggtcggaacggtgatgggcggttatgacgggcatcgcgggtctgcttattatcttggcgtgcatccagagtttcgtgggcgtgggattgccaatgcgttgcttaatcggctggagaaaaagctgattgctcgtggctgcccgaaaattcagatcaatgtgccggaagataacgacatggtgctcggaatgtatgaacgcctgggatatgaacaggccgacgtgctgagtctgggtaagcgtttgattgaagatgaagagaccaccacaacgtgccggaaaccacctttatcgaatggtgtggaccagacatccttcttcctgggaacaaatggtcagtctaaccgtaaggccgagcactacttcctcaacggtaaactcgctgctgtgcgtatggatgagttcaagtatcacgtcctgattcagcaaccttacgcttatacccagagcggatatcaggctaaagcgcgtaatatcgacgtcctgattgccgatacagccggacgcctgcagaacaaatcgcacctgatggaagagttgaagaaaatcgtccgcgtgatgaagaaactcgacgttgaagcgccgcatgaagttatgctgactattgatgccagcaccgggcagaacgcgcttgccccggaactggctgaactgggcgtcattctgttgatgtttggcgtcggtttgcacttttcgctgaaggatttgatggcggtaaaggccatcgccattcccggtgcgatcgcccagatagccgtggcgacgctgctgggtatggcgctctctgccgtgctgggctggtcgttaatgaccggtatcgtgttcggtttatgtctttccaccgccagtaccgtggtgttactgcgcgcacttgaagaacggcaattaattgacagtcagcgtgggcaaatcgccatcggttggttgattgtggaagacctggtaatggttctgacgctggtgttgctgcccgcagtggcaggaatgatggaacagggcgatgtgggctttgccactcttgcagtcgatatggggatcaccatcggcaaagtgatcgcatttatcgccattatgatgctggtaggtcgccgtctggtgccgtggattatggcacgcagcgcggcaaccggttctcgcgagctgtttaccctgtcggtgctggcgctggcgttaggggttgcctttggtgcgcaattccagccagaaaacgaaaccagcgctgcctggggtagtgggtatcaatcaaccgctggtcgatattgaagcgaaagtggatgatgaatttattgagcgttatggattaagcgccgggcattcactggtgattgaggatgatgtagccgaagcgctttatcaggacgtacaacagaaaaacctgattacccatcagtctgcgggtggcaccattggtaacaccatgcacaactactcggtgctcgcggacgaccgttcggtgctgctgggcgtcatgtgcagcaatattgaaattggcagttatgcctatcgttacctgtgtaacacttccagccgtaccgatcttaactatctacaaggcgtggatggcccgattggtcgttgctttacgctgattggcgagtccggggaacgtacctttgctatcagtccaggccacatgaaccagctgcgggctgaaagcattccggaagatgtgattgccggagcctcggccctggttctcacctcatatctggtgcgttgcaagccgggtgaacccatgccggaagcaaccatgaaagccattgagtacgcgaagaaatataacgtaccggtggtgctgacgctgggcaccaagtttgtcattgccaagaatccgcagtggtggcagcaattcctcaaagatcacgtctctatccttgcgatgaacgaagatgaagccgaagcgttgaccggagaaagcgatccgttgttggcatctgacaaggcgctggactgggtagatctggtgctgtgcaccgccgggccaatcggcttgtatatggcgggctttaccgaagacgaagcgaaacgtaaaacccagcatccgctgctgccgggcgctatagcggaattcaaccagtatgagtttagccgcgccatgcgccacaaggattgccagaatccgctgcgtgtatattcgcacattgcgccgtacatgggcgggccggaaaaatgcaacatactgggtcgtagcggctggctgctgtatggtcgtgggctggataaacaacgtctgacccaataccagagcaaactgggtgcggcgatggtgattgttgccgcctggtgcgtggaagattatcaggtgattcgtctggcaggttcactcaccgcacgggctacacgcctggcccacgaagcgcagctggatgtcgccccgctggggaaaatcccgcacctgcgcacgccgggtttgctggtgatggatatggactccaccgccatccagattgaatgtattgatgaaattgccaaactggccggaacgggcgagatggtggcggaagtaacccgaacgggcgatgcgcggcgaactcgattttaccgccagcctgcgcagccgtgtggcgacgctgaaaggcgctgacgccaatattctgcaacaggtgcgtgaaaatctgccgctgatgccaggcttaacgcaactggtgctcaagctggaaacgctgggctggaaagtggcgattgcctccggcggctttactttctttgctgaatacctgcgcgacaagctgcgcctgaccgccgtggtagccaatgaactggagatcatggacggtaaatttaccggcaatgtgatcggcgacatcgtaaacgcgcagtacaaagcgaaaactctgactcgcctcgcgcaggagtatgaaatcccgctggcgcagaccgtgggtcgataccttgctcctactgatggcgatcaacggcgataccaaccaaaagataatatatggaaactattggccccactggtggtgatgggtgtcatgtttcttatccctgtccccgacggtatgccgccgcaggcatggcattacttcgctgtgtttgtggcaatgattgtcggcatgatcctcgagccaattccggcaacagcgatcagttttattgcggttactatttgcgttattggcagtaattacctgctctttgatgccaaagaattagctgacccagcgtttaatgcgcaaaaacaggcgctgaaatggggcctggctggtttttccagcaccacggtatggctggtatttggcgcatttatttttgcattagggtatgaagtttccgggttaggtcgtcgcattgcccttttcctggtgaaattcatgggcaaacgcacgctgacgttgggttatgcgattgtcattatcgacattctgctggcaccgtttacaccttccaacaccgcgcgtaccgggggtacggtttttccggtcattaaaaacctgccgccgttgtttaaatcattcccgaacgatccgtccgcgcgtcgtattggcggctatttgatgtggatgatggtcattagtaccagtctgagttcgtccatgtttgtcaccggtgcggcaccaaacgtgctgggtctggagttcgtcagcaaaattgccggtatccagattagctggttgcagtggttcctctgcttcctgccggttggggttatcttgcttatcattgcgccgtggctttcctacgtgctgtacaaaccggaaatcacacacagtgaagaagtggcaacctgggcgggtgatgaactgaaaaccatgggtgcgctgacacgcagagagctttag

SEQ ID NO: 22531 - DNA, 586 bp, Homo sapiens
  SIMILAR (344)..(3): 1001254mologous to Escherichia coli O157:H7 UDP-N-acetyl-D- mannosaminuronic acid dehydrogenase; synthesis of enterobacterial common antigen (ECA),accession number AE005610,Smith-Waterman Score =572.
accagcgcgcctttttttagcactggcgcaatggagcgagcagccgattcaacgtaggtcatatctggctcatgatcgcccttaaacggcgtgggtacagcaatcagccaggcatccgcttcaactggcgtcgtgctcgctcgtaaaaaaccgccttctacggcagtttttactacactcgccaaatcaggttcgacgatatggatttcgccacgattgatggtatcaaccgcatgttggttgatatcgacaccaattacctgtttttgccgtgaggcaaacgctgctgccgttggcagcccgatataacccagtccgataacagaaatggtcgcaaaactcatagtgatatccgattattttttaacgcttccagaatgcgagagcatgcctgaccatcaccatacgggttatgggcgcggctcatagcttgatattcgttttcgtcttttaaaagacgcgtcacttcctcgacaattcgctgcttatccgtgcctaccaaacgcaccgtacccgccgtcacccgtttcggacgctcagtgggatcgcgcatcaccaacacaggtttccccaacgaaggcgcttc

SEQ ID NO: 22532 - DNA, 557 bp, Homo sapiens
  SIMILAR (310)..(137): 1001254mologous to Escherichia coli O157:H7 UDP-N-acetyl-D- mannosaminuronic acid dehydrogenase; synthesis of enterobacterial common antigen (ECA),accession number AE005610,Smith-Waterman Score =301.
ctgtcttcgggtcagtgttggctcccgggtgtccgcacgggcggacggccagctgggcctccggggcctgggtggcgtggcccccatggccagggtcgctgtctccctggatgcccagctctgacctcatgaagggatgatcgcccttaaacggcgtgggtacagcaatcagccaggcatccgcttcaactggcgtcgtgctcgctcgtaaaaaaccgccttctacggcagtttttactacactcgccaaatcaggttcgacgatatggatttcgccacgattgatggtatcaaccgcatgttggttgatagtaccgtagtgactcgcgttatagtgtgatatcgtatgatgacgtcgcgtgtgcgatacagtggaggatgtgatatgcgatagagacacgtataagcggatgtcgtctgaaggtctgcaaagagatgtgtacattgttcgggccccagtttgtgcgcgaacttcaacagcgtggttgtgatatctttctttgacctgaaaggccacgatatccccaacactgcagcgcacgctgtcgctgctgcag

SEQ ID NO: 22533 - DNA, 1708 bp, Homo sapiens
  SIMILAR (340)..(1281): 671254mologous to Homo sapiens unknown,accession number AF091080,Smith-Waterman Score=1022.
atgctgccagctcacctagatgcgtgcgtcactacgctgcagaagatccgatggactcttagcgtggtcgatccaactctggctctacgagttccgttaccagccctgtctatacgtgatgacccaccgctcagggcttatctgccaggcaggggtgcactaaaggtcatcaggttcgacgatatggatttcgccacgattgatggtatcaaccgcatgttggttgatatcgacaccaattacctgtttttgccacgcgtcacttcctcgacaattcgctgcttatccgtgcctaccagacgcaccgtacccgccgtcaccgcttccggacgctcagtgaaatactacccgccggactttgacccatcaaagatccccaaactcaagctccccaaagaccggcagtacgtggtgcggctgatggcccccttcaacatgaggtgtaagacgtgcggagaatacatctacaaggggaagaaattcaaacgctcggaaggagacagtgcagaacgaggtctacctggggcctgcccattcttccgcttttacatcaagtggcacgcgctgcctgggcagagattcacctttcaagacagacccttgaaaacacagactacaccatgggagcttgggagccacgcggaatttccagggttgagaagcttcctgggaggaggaggagaagagggttgcagaagggagcgggaggacgagggagcttgaacaaccccatgaaggtgctggagaaccggaccaaggactccaagctggagatggaggtgctggagaacctccaggagctgaaagacctgaaccagcggcaggcgcacgtggactttgagggttatgctgaggcagcaccgcctgtcggaggaggagcggcggagtcagcagcaggaggagttcgagcagaagaccgcggccctgttggaggaagccagaaagcgaagactgctggaggactccgactcagaggatgaggctgctccctcgcccctgcagccagcccttcggcccaaccccaccgccaccctggatgaggccccaaagcccaagaggaaggtggaggtctgggagcagagcgttggcagcctgggcagccggcccccgctgtcgaggctggtcgtggtgaagaaggcaaaggccgacccggactgcagcaacgggcagcctcaggcggccccccaccccaggagccccgcagaacaggaaggaggccaaccctacacccctgacgcctggcgcgtcctccctgagccaactgggtgcatacctggacagtgacgacagcaacggcagcaactgagccctcccaggacccccttcaggggttaaaagtcacacgtccagtttcagccacattgaggcaagcattgctggtggtcagggcaggaggccttggcgtgactggaggccggacagacaagcgcccagcgtgctccaacacatatgggccatccaggtgcctcagcccccaggaggtcccttcctctgtgccctcaccagcctctcaacacctcggggacccctgctgctcctgcccccacctgtcactgtgcttagggctgcaacatccctggagcagcttccaacactacttcagggtggcagtgtttggggcactgggcgagcctgccggcctctagatggcctcatctcttccttccacaaactgtctagaaccgaataaaaggaaacctgccaacca

SEQ ID NO: 22534 - DNA, 475 bp, Homo sapiens
  SIMILAR (1)..(288): 421254mologous to Caenorhabditis elegans putative,accession number L23646,Smith-Waterman Score=216.
gtcttgaaattgcaaaaggtctactatgcacagtcccagcaaaaggtatttgatgtacgattgaatggccacgtcgtggtgaaggacttggatatctttgatcgtgttgggcatagcacagctcgcgatgaaattatacctatgagcatcagaaaggggaagctgagtgtccagggggaggtgtccaccttcacagggaaactttacattgagtttgtcaaggggtactatgacaatcccaaggtctgtgcactatacatcatggctgggacagtggatgatgtaccaaagcttcattccaaccctcttctgcctctgccggttgtgagaacaaatgactatcctgaacagggtggaggggtgtgggaaagaaaccagccatattggttttggtttctgtatttttcacaatgattaatgaacaaaaacaaagagaaaaaaacacacatcaattaaaggagacaaaaagaggcaa

SEQ ID NO: 22535 - DNA, 534 bp, Homo sapiens
  SIMILAR (230)..(343): 441254mologous to Bos taurus elastin,accession number M31898,Smith-Waterman Score=67.
  misc_feature (1)...(534): n = a,t,c or g
ttttgtcactgcaaattgtttattaaaacacaaagcaatggacagtgaaaaacatcctgattttgtactttttggtgggagtggggtgggacatggaaggggtagggtcagatggagacagcccagaaggaaagccagctctatccacccctacagcttccccggccaaccaggttcaaagcccatcagttatatctcactgtgccgctgtcaatgcatgttgtggaagggtgggcttggtttcctgacaagccaggttagaccaataatggttgaagaggctgccctgggctcanaatgggcagctggtccttgcctgggagaactttgtggaaggaaaaggtaagattccttaagtccaaggagagaaccaatccagggtcaaatttcttttcattccctggatcacaacacaccagggaagagaggagtcaagaatgtctctccctgccagtgctcccctcctacctcgcaactcggctctcccttcccgacagttgtcctttgaaaggacggaaagcgcacttcagtttg

SEQ ID NO: 22536 - DNA, 193 bp, Homo sapiens
  SIMILAR (1)..(192): 371254mologous to Caenorhabditis elegans putative,accession number L23646,Smith-Waterman Score=122.
gtatttgatgtacgattgaatggccacgtcgtggtgaaggacttggatatctttgatcgtgttgggcatagcacagctcacgatgaaattatacctatgagcatcagaaaggggaagctgagtgtccagggggaggggtactatgacaatcccaaggtctgtgcactctacatcatggctgggacagtggatg

SEQ ID NO: 22537 - DNA, 397 bp, Homo sapiens
  SIMILAR (3)..(326): 471254mologous to Caenorhabditis elegans putative,accession number L23646,Smith-Waterman Score=283.
  misc_feature (1)...(397): n = a,t,c or g
acgaagtgcccatcaaagaggagggggactacgtgctggtcttgaaatttgcagaggtctactttgcacagtcccagcaaaaggtatttgatgtacgattgaatggccacgtcgtggtgaaggacttggatatctttgatcgtgttgggcatagcacagctcacgatgaaattatacctatgagcatcagaaaggggaagctgagtgtccagggggaggtgtccaccttcacagggaaactctacattgagtttgtcaaggggtactatgacaatcccaaggtctgtgcactctacatcatggctgggacagtggatgatgtaccaaagcttcagcctcatccgggattggagaagnnnnnnnnnnnnnnnnnnnnnnnnnnntatgatgaagggtc

SEQ ID NO: 22538 - DNA, 398 bp, Homo sapiens
  SIMILAR (88)..(171): 391254mologous to Neisseria meningitidis MC58 hypothetical protein,accession number AE002479,Smith-Waterman Score=58.
  misc_feature (1)...(398): n = a,t,c or g
cccacgcgtccggtgtgtcacagttcagccagttttggtttatgcctagagctacttcaaggaactagactaattagctatataggcccagcgatgcttcttattgatcttaatagtatgcccctccttcccctgtcctttcatttctctatccaagtagcagtcaggttcttggtgtgatgggactgaaagaattccagtcagccagagccttggcagctctgaagctaaccttagcatctaagtgtcgatcttgaattccctgnnnnnnnnnnnnnnnnnnnnnnnnnnnnnnnngggggggggnnnnnnnnnnnannnannnnnngagcggggcgccgccgcaaaaaaaccttatttgggtggccaaaattatagtcaggggggcggggggacag

SEQ ID NO: 22539 - DNA, 6557 bp, Homo sapiens
  SIMILAR (799)..(933): 291254mologous to Caenorhabditis elegans putative,accession number L23646,Smith-Waterman Score=48.
  misc_feature (1)...(6557): n = a,t,c or g
ggcacgagggcgacatgtccccggcggctcaggcggagcggcccgtggcgctgtttttctgagtccggggtggcctggcagccggccgaggacgagggtcggcgggggctgcccccgtggtggtggccgccatgctgggagcctgggcggttgagggaaccgctgtggcgctcctgcgactgctgctgctgctgctgccgccggcgatccggggacccgggctcggcgtggccggcgtggccggcgcggcgggggccgggctgcccgagagcgtcatttgggcggtcaacgcgggtggagaggcgcatgtggacgtgcacgggatccacttccgcaagtgtatccctttgtaaggccgggtgggccgagccttatactatggcatgaaactgccaatcctgcgttccaaccctgaggaccaatcctgttatcaaactgagccgttccaatggaggagacctttggctacgaaagtcccattcaaagagaagggggacttacgtgctggtctttgaaatttgcagagggtctactttgcacagtcccagcaaaaggtatttgatgtacgattgaatggccacgtcgtggtgaaggacttggatatctttgatcgtgttgggcatagcacagctcacgatgaaattatacctatgagcatcagaaaggggaagctgagtgtccagggggaagttgtccaccctttacacaggggaaacttctaccattgagtttttccaaggggtacctatgaccaattcccaaggtctgtgcactcttacatcatggctggggacagtggatgatgtaccaaaagcttcagccttcaatccgggattggagaagaaagaagaggaagaagaagaagaagaatatgatgaagggtctaatctcaaaaaacagaccaataagaaccgggtgcagtcatggcccccgcacacccaacccctatgccttggacaacagcagcctcatgtttcccatcctggtgggccttcggagtcttcattccaaccctcttctgcctctgccggttgtgagaacaaatgactattcttgaacagggtggaggggtgtgggaaagaaaccagccatattggttttggtttctagaattttccacaatgattaatgaacaaaaacaaagagaaaaaaaacacacatcaattaaaggagacaaaaagaggcagagcgagtagagagcagccctcattcaccacctggtcccagacgtgcttcagtcctcgtcctctctttgtggctggctcccagccttctctttcctcttgaggatacttagggtaaactggatccttcctgctcaaggatcctcatttgtatacctagtggaaaggactctgaactcagaggagtcactgtttcttttttttaggttagaaattaacagcagggaaatgccatcttattacctgagacgaccagcactgggagttaggtacggtctgaagttatgtctagataagacttcagacgtcctgggattgaaagaatgtgtgtgaaggggtagaatttgtgcggtaaagacttaaaaaaaaaaagtagggagattaaaaaaaaagaaagaaaatgcttccttatctggaagcctttctggattaatccagtgatggtcccacctttagtgtttcgagctttgtcattgcttgtctcccctggcatgtgccagtttatagactgtccagcatccaagacgtttcggttatgtcgggtcctcagatcgcctctgacttgttaccacaacaaatcattttgatttcagtgcctgttggggacttgatttcttctcaggttttgtttgtttgtttgtttccttaatctggctcatttgaaatttcttctccctctcaaccatcccactaagttatagccaagaagggaaggagacacggggatttggggttctctgcttgaatgtcttctcctttaccacctcaccttgttggtacctccctccctggatctctgagccagcagccaggaggacctgacccagcagttctttactggcccctttgtagggccttgctgccagggggcagggatgctttccagcctgcagcaacagaacacttgaccttaaaagtctcttctggtctttgggattaggaaaaggcttatggttaagcatagcttaaagagcaacctcaagagacttggagcccctactaaagtgactgacccactgtttaagagtgtcctagtatctgatgttcatttattcccatgttcttgtgtgtcaacagttcaagcccagttttgggtttaatgccctagagctacttccaaggaactagactaattagctataataggcccagcgatgcttcttattgatcttaatagtatgcccttccttcccctgtcctttcatttctctatccaagtagcagtcaggttcttggtgtgatgggactgaaagaattccagtcagccagagccttggcagctctgaagctaaccttagcatctaagtgtcgatcttgaattccctgaaaaaatttctataggaaatgaagcttccctggtcccctcctttctggccattgtcatccatttcccagttagggcaacaatgaaggaggacccagccaagctagaaggaattttgtggatgggagacagcaggattagcttcagcttgggctggagcagtcaatataggatctcaggccaggcccgcttttctagaatgtgtttaattttgagtttgctttattagatatgttttttaagagctctgtatatttgaactgctccttatgtgacaaaataggtagctcttgggctcatgtcctgggttttggctctttaatgattactccaggccagcatttagtcgtttgagaattgtagcctgttgttttcgctgtgacttgggtctcagtgctagggtattgagtcaggcagctggagggttgtggcccgaggctgcagtcagaggtatacttcccatagtgcttcacacagctcccctgcttctaaaggataaggtactgtagccttggtcctggggaccacctgcctggggcagtggacatcctaactaaacaggcttctggcagtagctttggttcctatcccatcgaaattccccaaagccctgggccactgccattgggttagtcaagatgaaggaggaggactggctgcctccattttgccttgtttgttagtttgcctgggtctgtctgaggaaggagggggtcccgccttccacctcaacacatcccttcagtgactcagagtctcagaaggaaaccctgactcctggggccatttcctaatggtactgtaagccaagcagctttgcttctgcctctgtttccaagcccacccttttcccctgagctcagggttagggatgggcgcttttcctctctggttgtgaacgaaaagaaggaacatctttctatggctaacaaaaacttaagggggaagtgaggaaacaggaagaagtatggtgggggctggggtagactcccctggagccaagcctatccagctaacaagagctccctggggctggtcacagctggctcatgatgctgaacttgaaagtttttttgtttttgtttttgttttgtggctcctccaagatataggtacatgaagtttaggttaaaggggtgggattctttatttttatttttgtattgtatgtgtcaagaattactctgttgttcaccttttgctttttgcactgtttgttctcttatctgtattttgagcttagtgctaggactgagaggctgcaccatagggaatgtatgggagatggtgaggggtgccagtgaggggtgcgtggaggagaggcctgggctcctctactggatctacactctgtcccaggtttttagatcccactgagcccagctgactgaaaacaaggacagtcagggtgaaacttcttttgccagaagtgtggcctgagttgaatttctgggaggatgacgcagatgtctgctgcagagctgggctgagagttctgcagtctagctctgacttaggtcaggggcctgttggtctctcattggacgtttttgggtctcactcatgcttactgaaacattgtgccaagaaactcctgtgggatttgtgtcccttaaaccagactcacttttctgaaaaatcctccattgtttgaggagaggctgctcaatcgacaccccgagttctcatgactggggaagaaaagttttcttcaggtgtcaatggcgttagactcccaggaagactagccctgcccacagggccacctgttggtttgagagcgtgttcgtgttctctttgccctccctgcctaagagctactgggatcacgttagcgggcatttaggctttgattgagagggcacagttttgagttaggtttacctcccccttttctgtgcctggggaactgttttggtccagctttagaactgtggttttgacttccttatctcttgggagaagcttctgttttaaggaatttctcttccttcttctcctgcctctagcctttcctggaaaggcccggatatggtttctaaaatctcagctgagaactttagaaaacagcagcagtatttttccttttcctagtgctaaaatccctttccctagaaattggctcaccttgggaaacccagggaaagaatcagcaggttctctgccctccctaggggtttggggaaggacccaccccggtcagcacagtgccttttcctctcttgctctgagccagggtggggcattccctctagattcaggtttgggcaggggtcctatagtccctgccatggggctgacttccctgtcccttccctcccctttgctggcctactctgggcataattcaagtgtcttcttggccttggggaatccttagtgggcatcaaatgggcaacatgggaattatttgtcctccatggcccctccagaagggacctaggaagagtagggtgaagctttccaaaagtgaagaagacgaatcttttctttcttttttgtttttaaaggggcaggatggggtatgctttgggctttctcctttctgtgggccccggaggaagggagagattgagggcaagggcaaagttgatagttacattgaaagcagaaccggaaacacccaggaactgttcagaaatctcagaagaaatctgcttctcttccgatggaaacgatataattaacgatcaaagaagctctaagaaaattgcaaaagaagccttaatgttcaagctttagaaagatcagagcaatttttctctttcagtccaaactaagactctctgtatttaaatctctctggggcaagagggctagatttcctcattttgttatgagactagattggtaccagtagatcagctgcctagcgagggcagggtttccttccttgcatctgtgtgggcttgcttcccagtctgggcctggtcctttccagctggccttttggtctagcctgctatgggggggccagattatcttgataaggagcagggtgatttgggggactaggctggggttgggcagggaaaagagcagggatgggatctctttggggacaggttcccccagggagtattaaacacaagggagccagggatttgttgntgggcagcccaagggaaacagttagttgcctgttttggagtttggcagagagggccttggcacctcttgcatccaggcagtcttgtggagatggggggcacatagcactggggaaagcagaactccattctcacctctattttgagcttcagtgctttattttcagtatggaggaaaaacagcaaccaaactgaagttgcgcttttccgtccctttcaaaggacaactgtccgggaacgggagacgccgacgttgcgacggtacggaggggaagcacctggcacgggagacgacacttccttgactcctcctccttccctggtgtggctgggaatccagggaatgaaaaagaaatttgaccctggattggttctctccttggacttaagggaatcttaccttttcccttccacaaagttctcccagggcaaaggaccagctgcctcattctggagcccaggggcagccttcttcaaaccattattgggtctaaccctggcttgtcaagggaaacccaagccccacccttcccacatttgggccctggcttgcttctattcgtgtaccgaagtacttggagaaaaagccatcaagttctttaggcccttgttagctttttaccctaagtttccccatccgtctctcgtgtggaggccaaaccaacttcttttgccagcagcccacaacatgcattgacagcggcacagtgagatataactgatgggctttgaacctggttggccaggggaagctgtaggggtggatagagctggctttccttctgggctgtctccatctgaccctaccccttccatgtcccaccccactcccaccaaaaagtacaaaatcgaggatgtttttcactgtcccattgtctttgtgttttaataaacaatttgcagagacaaaaaaaaaaaaaaaaaaaaaaaaagtcgacc

SEQ ID NO: 22540 - DNA, 2958 bp, Homo sapiens
  SIMILAR (750)..(4): 981254mologous to Escherichia coli 100 pct identical to sp:YI5B_ECOLI,accession number AP002527,Smith-Waterman Score=1284.
ttataatttcaggctaattcttctgctgttgtagtattcaatatattccgtaacagcatccttcagttcgcttatattactgaactcatcaagataaaaacactccgactttaaggttccaaagaaacactccaccacagcattatccagacaattgccttttctggacatgctttgtttaataccatgttctttaaggatattttgatatcttctcatacgatactgccatccctggtcagagtgcagaacaggatgctcgtgaggattaagctttttgaatgcctgatcgagcatattctcaaccatgttcatcactggtctttccgaaaggctgtaagaaataacttcgttgttgaagagatctattactggagacaaatacagcttgcgcccattgactgcaaattcagtaacatcggtaacccacttctcgtttggccgcgtagccttgaaatctctttggagaacattaggggcggtttgccctacctctcctctgtaagagcggtatcgcttgaccttaatcgctgctttaagtgagagggttcccatcaggcgctgaacagctttatggttaatctgtttcccttctcgatgacgagacagcgttaccctacggtatccgtatcggcttctattctcgtgataaatctcactaatacgcttattaacgtccgcatacttgtcaggcttgctgagagcctttagatgataataaaacgtactgcgcggtatctccgcagcctttttcgtgggatgagctaaggctttcagcttttttagatacataagccgcgtttcaagaaatcgaacttgcctttcaagatcctcaatgcgtcggtcttttgacagctccaatgctgatgccgctttttctggatcaactgatattgcaatgtttcttttggtgccaatcttgagcgcgcgtaaaccagcttctccgcgctcttcatagaccttcagccacctggctacagaaccactaccagcaagcataaagtgagcagcagcctgattaagggacatgtgctgctcgatcacagctttcacgaccttaatacgcaactctggatcagcactaacgcctttaggtttgggaattaaacctttttctccatgtttttcatagagggcaacccatgtcctgacctgggttcgggggacaccaaaacgtgccgagatgatcctgtaaccatcatcagttgtgaagtagtgattcacgacttcaaggcgcttttcaaaagggtattttggctgtgtatttttattgacttcagtactatctatgtggatcttagatgaccgcagagctttcccttttctttcctttcttcgtagcaatttagaacaaagggataaccctagggagaacgtagcaaacacataatgtaggtcatctagaggtcccttcataatagtttccagttgcatccgctgctcggctttatcgccattgagcaacatccacaaatcctgaacggctggaccattacgtgcatcatccagatcaacaaacattggaccatcgcgccagagaatattcccggcgtggcagtctccatgtagccgcagaacggtgaaatcttcccgccagtgtgctgtaacggcggcaatcagctcatctgtcgctttcaggaatgccgctttcaacccggaaggtatcagtgtagcgtcctcaaacagcttgcgtggctcaatgagatattcgttcaaaccgatggtcgggcgatggataaaaagctgtttgcgccccgtctggtgcatacgccctaaataacgcccaaccgcttccatctgatcgatattatcagcttcgaactggcgaccaccgacgcttggaaaaacagcgaaataaaatccctgatgattcaataaagtctgaccgttaaaggccacaggtgctgcgaccggaacttcatcatttaccagctgcaacgcaaattgatgttcttcgaggatttgatcggctgtccaacgttcagggcgataaaatttgacgacaaaacgtcgacgatcttcgtctcgaaaggcgcatccccattttcgccatctgccggggtttacaagaactggtggtggcaaccggtggttcgttgcatcgcaagctgtgcgaacagcctgaattgctggaacatcgggaagatcccgaactgccggtggaacagcaatatgcaccgtcgcatgaagttcaggttgaagaggggggattactgtctgcgttgttacctgaatgtagcaacttttgggtaaactctcttggctcctgtcttctctgtggttcagtggcatggcagtcttaaaaatggcagcttgggtgcccagtgtgggacctgacccttggtttggtcgagtcggcctgcgcggaagatgtaacggggctaaaccatgcaccgaagctgcggcagcgacgcttatgcgttgttgggtaggggagcgttctgtaagcctgcgaaggtgtgctgtgaggcatgctggaggtatcagaagtgcgaatgctgacataagtaacgataaagcgggtgaaaagcccgctcgccggaagaccaagggttcctgtccaacgttaatcggggcagggtgagtcgaccccttgaaataccagcctttaatgtttgatgttctaacgttgaccgtaatccgggttgcggacagtgtctggtgggtagtttgactggggcggtctcctcctaaagagtaacggaggagcacgaagttggctaatccgcccaagagttcatatcgacggcggtgtttggcacctcgatgtcggctcatcacatcctggggctgaagtaggtcccaagggtatggctgttcgccatttaaagtggtacgcgagctgggtttagaacgtcgtgagacagttcggtccctatctgccgtgggcgctggagaactgaggggggctgctcgagaggaccggagtggacgcatcactggtgttcgggttgtcat

SEQ ID NO: 22541 - DNA, 690 bp, Homo sapiens
  SIMILAR (133)..(294): 561254mologous to Escherichia coli ORF_o145,accession number L19201,Smith-Waterman Score=129.
atggtgtatcgtcttgcttggcgcggaaattacttcactctcggggaataccgtatactaaaacaagcagctgaacaagaagagacgacgaaccatgattgcattaattcaacgcgtaacccgtgccagcgtaccgtggagggagaagtgacgggcgaaattggcgcgggacttttggtgtattgggtgtcgaaaaggatgacgacgaacagaaagcaaacccgatgccgaaggccagatgaactcaacgtgcaacaggcgggcggcagtgtgctggtggtttcccagtttacctcgccgcagataccgaacgggggatgcgcccaagtttctcccaaggtcatcaccggattcgcgcacaggcgttttatgactatttcgtcgaaagctgcgtcagcagagatgatacgcccaaggaggcctctccgcggaattcaggttgctgaacagctgaatagatttgctggatttggtattggactgcaagaaccaagggtcaggtcccacactgggcacccaactgccatttttaagactgccatgccactgaaccacagagaagacaggagcaaggagggatgggagtctggagctgcctatttgtcatttttctgttgttacctcgctagattggtgaaatgggggagtcctctagtagtcgacctgcaaaatgccggctgtcgcttgtga

SEQ ID NO: 22542 - DNA, 1930 bp, Homo sapiens
  SIMILAR (1930)..(1166): 991254mologous to Escherichia coli Cell division protein FtsK,accession number D90726,Smith-Waterman Score=1347.
atggctggcaagccggagtacgataaaactatctccacgtcgattgtgctcaatgcgctgaacgcgctcggcgtcagcgccgaagcgtccggacgtaacgatctggtggtgaaaaccgtcgaaggcgaccgcaaagtctcaggctcggcctatcgcgaaaccaaagatcgcggcttccaccacggcaccttgctactcaatgccgacctcagccgcctggcaaactatctcaatccggataaaaagaaactggcggcgaaaggcattacgtcggtacgttcccgcgtgaccaacctcaccgagctgttgccggggatcacccatgagcaggtttgcgaggccataaccgaggcctttttcgcccattatggcgagcgcgtggaagcggaaatcatctccccgaacaaaacgccagacttgccaaacttcgccgaaacctttgcccgccagagtagctgggaatggaacttcggtcaggctccggcattctcgcatctgctggatgaacgctttacctggggcggcgtggaactgcatttcgacgttgaaaaaggccatatcacccgcgcccaggtgtttaccgacagcctcaaccccgcgccgctggaagccctcgccggacgactgcaaggctgccttttctctctctacaatagcgatctcaatactgtcatcgacaacgtgctgcgtatttttccgttgctgttgtcgtggatctccttctggttgctgtacagcattgttcctaccatccgcgtacctaaccgcgacgcgattgtcggcgcgtttgtcgccgcactcctgttcgaagcaggaaagaaaggtttcgcgctttatatcaccatgttcccgtcatatcagctcatttatggtgtgctggcggtgatccccattctctttgtttgggtctactggacatgcgtcaccgtggagggagaagtgacgggcgaaattggcgcgggacttttggtgttattgggtgtcgaaaaggatgacgacgaacagaaagcaaaccgtctgtgcgagcgtgtgctcggctaccgcatctttagcgatgccgaagggcaagatgaatctcaacgtgcaacaggcgggcggcagtgtgctggtggtttcccagtttaccctcgccgcagataccgaacgggggatgcgcccaagtttctccaaaggagtaattgacgacatcggctttaatacggaaatcagccagacgcgcttccaccaggcgagccatttgttcaagcgcaaaggtatctaccggctccacttcgctcggcggcggtgtcagcaaatccagagaaggcagcggcgtcgtcggtttatgcaacggacggctgtcgccattacgcatcaacagcggatgaagcagggtatcctgcggttgtggcgcaactggctgttgtggctgctgatactgctgctgcggcgcaaccggttgttgcggctgctgatattgctgctgtggcgcaaccggttgttgcggctgctgatattgtggctgcggcgcaaccggctgttgtggctgctgatactgcggctgcggcggaactggttgttgcggctgctgatattgctgctgcggtgcaaccggttgttgcggctgctgtacaggttcaacaattggcgtaaacaacggttcgtgtggaccatcatccagcaacgctttcattggcgaaaattcaaaatcatccagcgagaacggattcgccccagccggttgttcgccggaataacgttgttgttgagtttgcgcaaactgacgagccagttcagcctctgccgcagcatctgcatcttctgcgtttacgggcacatcatgttgatactgttcgccatagcgttgctgctgtgtctgggcgaactgacgtgccagttcatcctgctgcatcgcatcgatttcatcatcgttgtactgatcgccagaatc

SEQ ID NO: 22543 - DNA, 1143 bp, Homo sapiens
  SIMILAR (1)..(489): 951254mologous to Homo sapiens putative p150,accession number U93568,Smith-Waterman Score=816.
atggtaaagggatcaattcaacaagaagagctaactatcgtaaatatatatgcacccaatacaggagcaccaagattcataaagcaagtcctgagtgacctacaaagagacttagactctcacacattaataatgggagactttaacaccccactgtcaacattagacagatcaatgagacagagagtcaacaaggatacccaggaattgaactcagctctgcaccaagtggacctaatagacatctacagaactctccaccccaaatcaacagaatatacatttttttcagcaccacaccacacctattccaaaattgaccacatacttggaagtaaagctctcctcagcaaatgtaaaagaacagaaattgtaacaaactatctctcagaccacagtgcaatcaaactagaactcaggattaagaatctcacccaaaaccgctcaactacatggagactgaacaacctgctcctgaatgactactggaaccaagggtcaggtcccacactgggcacccaagctgccatttttaagactgccatgccactgaaccacagagaagacaggagccaagaggctataatcacgtgctccgaagacttccgggtttccaacgtgacttccggttgtcagaatttacccctgacgcggcggcggccgacgggaagctgtgtgtgcttaggtcgtggtggccccggtggtggtgggctccgggcgggctcgcgtcatcctgcccccgctgcgatgcatccgcggcgcccggacggatttgatggcttgggctaccggggtggtgcccgggacgagcagggctttggcggcgccttccctgcaaggtccttcagcaccgggtcggacctgggccactgggtgacgactcccccagatatccccggcagccgcaacctgcactggggcgagaagagcccgccctacggcgtgcccaccacctccaccccgtacgaaggccccacggaggaacccttttccagtggcggcggcggcagtgtgcaggggcagagcagtggtgagaagcatggggaccgacacagggatgaggggttactggggccgcggcttgcggtctgcagaacccggaagcggcgcagaggattccggctccatacctcgaaacaatag

SEQ ID NO: 22544 - DNA, 657 bp, Homo sapiens
  SIMILAR (297)..(482): 321254mologous to Homo sapiens dJ688G8.3 (Similar to chelonianin (basic protease inhibitor)),accession number AL031671,Smith-Waterman Score=99.
cggccttcccgcgtcgacccacgcgtccggacaagtggggcatctttaggggccacagtgagctctcaatgatcatctgtagtggcagcaaaagagttcgagccccacttcaaacaacttcataataaaaggccagacaaaagagctgtcagccagttactacagacactcaatgcagacacacgtctagcagtattgggaaaagacttgccttctgccagaacttaacccaaatacacacagagagcaccatgaagccctggattcttctactcgtcatgttcatctctggagttgtgatgcttctgcctgtgctgggaagcttctggaacaaagatccctttctagatatgataagagaaactgagcagtgctgggtacagcctccatataagtactgtgagaaaaggtgtactaaaataatgacttgtgtacgtccaaatcatacatgctgctggacctactgtggaaacatctgcttagacaacgaagagccccttaaatcaatgctaaacccctagattctattggccgatcactactgtgggctgaaggatgaccatctggtctaagaagagtgctgcctacttccttcttgggacacccacctggctctagctgggtaacctttctgctatttcccttggacctctttaa

SEQ ID NO: 22545 - DNA, 412 bp, Homo sapiens
  SIMILAR (3)..(395): 491254mologous to Rattus norvegicus MEGF6,accession number AB011532,Smith-Waterman Score=395.
accacgtcacgggggaatgccgctgcccaccaggatacaccggagccttctgtgaggatctttgtcctcctggtaaacatggtccacagtgtgagcagagatgcccttgtcaaaatggaggagtgtgtcatcacgtcactggagaatgctcttgcccttctggctggatgggcacagtgtgtggtcagccttgccccgagggtcgctttggaaagaactgttcccaagaatgccagtgccataatggagggacgtgtgatgctgccacaggccaatgtcattgcagtccaggatacacaggggaacggtgccaggatgagtgtcctgttgggacctatggcgttctccgaaataagacctgccagtgtgtcaacggaggtgtattgcggccggtctggaggatccaaactac

SEQ ID NO: 22546 - DNA, 390 bp, Homo sapiens
  SIMILAR (2)..(382): 541254mologous to Rattus norvegicus MEGF6,accession number AB011532,Smith-Waterman Score=441.
ctgcgaggccagctgtgagcagggcacctatggtaacgactgtcatcagagatgccagtgccagaatggagccacctgcgaccacgtcacgggggaatgccgctgcccaccaggatacgccggagccttctgtgaggatctttgtcctcctggtaaacatggtccacagtgtgagcagagatgcccttgtcaaaatggaggagtgtgtcatcacgtcactggagaatgctcttgcccttctggctggatgggcacagtgtgtggtcagccttgccccgagggtcgctttggaaagaactgttcccaagaatgccagtgccataatggagggacgtgtgatgctgccacaggccaatgtcattgcagtccaggatacacagggtatgtatt

SEQ ID NO: 22547 - DNA, 507 bp, Homo sapiens
  SIMILAR (481)..(377): 451254mologous to Phyllomedusa bicolor prepro-skin-calcitonin gene related peptide,accession number Y18495,Smith-Waterman Score= 77.
atgaaggctgaaacatcagtcaggaaagcagctttcatggcaagcaaacttataatgagagtgatattttctctttgcttttcttataaacctccagaatgcctaagattcatcgacttttgtgtgaacatagcctttagcagaaagctggtccaacactctaattttacagatgatgatgctgtggaggaagagctcgcagtgaattatgtctactcaatctatgcatcaaaggagcagattagatacaagcatggtagaagttttgccaatggccatgtgaaagagctgatggaaggggatgtagaaaagcagaaaggtagcccatgccctaaaggagcttacagcctaactgcagagaaagtgtctgctgtttaccatcatttgttaacaagaattcatctagcctctgtgttgcgcataactgggggagacactgttacctatggacagcagcagatgtcaagcaattcatatcttcgcatatgtttccagttgaacatctga

SEQ ID NO: 22548 - DNA, 255 bp, Homo sapiens; identical to SEQ ID NO: 8021
  SIMILAR (85)..(246): 291254mologous to Aquifex aeolicus putative protein,accession number AE000723,Smith-Waterman Score=71.

SEQ ID NO: 22549 - DNA, 1347 bp, Homo sapiens
  SIMILAR (648)..(761): 521254mologous to Homo sapiens MEGF6,accession number AB011539,Smith-Waterman Score=117.
gaggaagagctcgcagtgaattatgtctactcaatctatgcatcaaaggagcagattagatacaagcatggtagaagttttgccaatggccatgtgaaagagctgatggaagatgcctgtgcaactggggcccctgctaggcctactgaagagcctgcccatgccctgcccttcagcagtgtccagacatctgccacaggcacagttggccatcccgtgtgcaccacagcagcagcagctaagcagatgcctgtcctttccttcatccctgctccaagaccccaacactccaggagatacagaaaagacgaaggaagagcgggaagcagaggagcaggagagaagcaatgtacacacaattcccccaggtggctacagaacactgtcagcaatcagggatccagcatgcctggatttcagtctcacgtgccctctctgctgggagcctttgtgcagtgcacaaactgcacgcgtgtatgtagtagccctgctaataaggaagccagctgctatgatattcggatgctcaagcagccatatggagagaccaacacaaccacaattgaactgggctgtgggaaacttggagcaatttcccaggagagcaggaaagacaaaggcttaaagaagaagggccatgcgacacctgtgaggatctttgtcctcctggtaaacatggtccacagtgtgagcagagatgcccttgtcaaaatggaggagtgtgtcatcacgtcactggagaatgctcttgcccttctggctggatgtcacccattccaggatactcagtgcatacacatgcaggagactttagcacaaaggaaagttaccatgatggttgaagattccaaaattggaaagactcaagccattttaaatctgaaactcttcagttctgaggagacagaagaagcttcatttctccagagaaagcgaatcattgtaagcagcgctgcttgcagcagaatcgtgaatggacaaaggagatggccaggggtcccttctccagtccagctcccattctttttgccccacatgccttgtcttctcctgctggatactgctgtaaaggaagggactgttctgatgattattttctttggggtagacttaagtctgctaactctgtttttgttagatggagaaagtcaaatggtaactcaaagttcaagttctaatgggggcgtccaggcaagtgtggcttgtaagaaggacagagggaagaggtttggggactgggtaactcactttattgcctggcaggccagctctgatggtgagagatcagttcccatggatgtgtcctgcctgtcgttggcactggttaagagaactttggaaccgtaa

SEQ ID NO: 22550 - DNA, 1402 bp, Homo sapiens
  SIMILAR (135)..(251): 381254mologous to Rattus norvegicus MEGF6,accession number AB011532,Smith-Waterman Score=83.
atgggttggggccagggccctgatgtccagctaatgaatggccatgagaggtcaccaagccattctccccgagaggcgaagaaatctggttctcccttacccactgatatccactgtttctctcctcaatctcagcctgcgatggtgatcactggggtccccactgcaccagccggtgccagtgcaaaaatggggctctgtgcaacccccatcaccggggcttgcccactgtggctgcggggcttccggggctggcgctgcgaggaccgctgtgagcagggcacctatggtaacgactgtcatcagagatgccagtgccagaatggagccacctgcgaccacgtcacgggggaatgccgctgcccaccaggatacaccggagccttctgtgaggatctttgtcctcctggtaaacatggtccacagtgtgagcagagatgcccttgtcaaaatggaggagtgtgtcatcacgtcactggagaatgctcttgcccttctggctggatgttgtctttccctggctggaggcccatctaattttccaagtctctttgaatgcagggcacagtgtgtggtcagccttgccccgagggtcgctttggaaagaactgttcccaagaatgccagtgccataatggagggacgtgtgatgctgccacaggccaatgtcattgcagtccaggatacacaggggaacgagcagcagttccggatgttagaaaggtgccaggatgagtgtcctgttgggacctatggcgttctctgtgctgagacctgccagtgtgtcaacggagggaagtgttaccacgtgagcggcgcatgcctctgtgaagcaggctttgctggcgagcgctgcgaagcacgcctgtgtcctgaggggctctacggcatcaaatgtgacaaacggtgtccctgccacctggaaaacactcatagaggagatgacagagaaaaagcagaatttggccaccttctcattgctttggaagttcagtatacagaaatatcaaactgcattgaaaagtcgcaggaagccagctgctatgatattcggatgctcaagcagccatatggagagaccaacacagaggaagagctcgcagtgaattatgtctactcaatctatgcatcaaaggagcagattagatacaagcatggtagaagttttgccaatggccatgtgaaagagctgatggaaggtccgagccgtcgtattgcggggtcgggtggggaaaaatataagagggatgaggaaaaaaacacccttttaaggggacaaaaccgtggcggtcggggcaagaacccaaaaaagacaaaggcgtgggtaaaaattcaggggcaaaacaaaattgaaatttcgggtgtcggggcagaccgcaagcggtttttccgggaaaaataa

SEQ ID NO: 22551 - DNA, 2212 bp, Homo sapiens
  SIMILAR (1808)..(2209): 991254mologous to Homo sapiens ARSE,accession number X83573,Smith-Waterman Score=775.
atggagcagaaaggagaattcaagaatgacacgctcatttatgaatttttccacattgtcgccaagccacatccattgccaataaaatcttccacatacactacctttcaatctgctcgtgtgaccagatttttcctggatgctgaaaaagaatgcaggtgtcaagaagggcaggtggaagctgcattgatagccatgggtggcacctgccaaggaactcaaaggttgtcaacagcaggggagagtgaatcagctacgcacatgcgtgagccagccgttcagtgccgccgagacagccagtgcgtgtctgttttggcaggaagaagacgtttcttccaaggagcagcctccccgctacatccagccagtgtcgcccttacacagctgcatgtcaggtgggcatcaaccgctaccatcggccaggtgtctggttttccagggaaaatcagggtttcccctactacaaaccttggagactcagattacatctttactgcatcccactggggattgggacactatggccctgctgtccatgtgcattcccagggtggcatcgatgaaagaggcagcaatgatagtggcaggctgtatgtcaccaacccctgcggaaatgttccctcatggactccgaatattgaccgccttgcagaggacggcgtgaagctgacccaacacatctctgccgcatctttgtgcaccccaagcagagccgccttcctcacgggcagataccctgtgcgatcagggatggtttccagcattggttaccgtgttcttcagtggaccggagcatctggaggtcttccaacaaatgagacaacttttgcaaaaatactgaaagagaaaggctatgccactggactcattggaaaatggcatctgggtctcaactgtgagtcagccagtgatcattgccaccaccctctccatcatggctttgaccatttctacggaatgcctttctccttgatgggtgattgcgcccgctgggaactctcagagaagcgtgtcaacctggaacaaaaactcaacttcctcttccaagtcctggccttggttgccctcacactggtagcagggaagctcacacacctgatacccgtctcgtggatgccggtcatctggtcagccctttcggccgtcctcctcctcgcaagctcctattttgtgggtgctctgattgtccatgccgattgctttctgatgagaaaccacaccatcacggagcagcccatgtgcttccaaagaacgacaccccttattctgcaggaggttgcgtcctttctcaaaaggaataagcatgggcctttcctcctctttgtttcctttctacacgttcacatccctcttatcactatggagaacttcctcgggaagagtctccacgggctgtatggggacaacgtagaggagatggactggatggtaggacggatccttgacactttggacgtggagggtttgagcaacagcaccctcatttattttacgtcggatcacggcggttccctagagaatcaacttggaaacacccagtatggtggctggaatggaatttataaaggtgggaagggcatgggaggatgggaaggtgggatccgcgtgcccgggatcttccgctggcccggggtgctcccggccggccgagtgattggcgagcccacgagtctgatggacgtgttccccaccgtggtccggctggcgggcggcgaggtgccccaggacagagtgattgacggccaagaccttctgcccttgctcctggggacagcccaacactcagaccacgagttcctgatgcatttattgtgagagggttctgcacgcagccaggtggcatcaacgggacagaggaacaatgtggaaagtccactttgtgacgcctgtgttccagccagagggagccggtgcctgctatggaagaaaggtctgcccgtgctttggggaaaaagtagtccaccacgatccacctttgctctttgacctctcaagagacccttctgagacccacatcctcacaccagcctcagagcccgtgttctatcaggtgatggaacgagtccagcaggcggtgtgggaacaccagcggacactcagcccagttcctctgcagctggacaggctgggcaacatctggagaccgtggctgcagccctgctgtggcccgttccccctctgctggtgccttagggaagatgacccacaataa

SEQ ID NO: 22552 - DNA, 2191 bp, Homo sapiens
  SIMILAR (206)..(340): 971254mologous to Homo sapiens ARSE,accession number X83573,Smith-Waterman Score=226.
gcaccgccgcgccggaattgccgggacgacgacttcgtacgaaatcgtagggaaaaacaaactcgaagataatcattcccagctcaaagccttgtgcaagagctctctgccttcacgcttgcttcctttggcagagaaccttcctcttcttgatcggggattcaggaaggagcccaggagctgaggaagtacagagagagacaacatgttacatctgcaccattcttgtgtgtgcttcaggagctggctgccagcgatgctcgctgtactgctaagtttggcaccatcagcttccagcgacatttccgcctcccgaccgaacatccttcttctgatggcggcacgaccatggcgttggggacattggctgctatggcaacaacaccatgaggactccgaatattgaccgccttgcagaggacggcgtgaagctgacccaacacatctctgccgcatctttgtgcaccccaagcagagccgccttcctcacgggcagataccctgtgcgatcagggatggtttccagcattggttaccgtgttcttcagtggaccggagcatctgcaggttttaccaccaatgtagacaacttttgcaaaaatactgaaagagaaaggctatgccactggactcattggaaaatggcatctgggtctcaactgtgagtcagccagtgatcattgccaccaccctctccatcatggctttgagcatttctacggaatgcctttctccttgatgggtgattgcgcccgctgggaactctcagagaagcgtgtcaacctggaacaaaaactcaacttcctcttccaagtcctggccttggttgccctcacactggtagcagggaagctcacacacctgatacccgtctcgtggatgccggtcatctggtcagccctttcggccgtcctcctcctcgcaagctcctattttgtgggtgctctgattgtccatgccgattgctttctgatgagaaaccacaccatcacggagcagcccatgtgcttccaaagaacgacaccccttattctgcaggaggttgcgtcctttctcaaaaggaataagcatgggcctttcctcctctttgtttcctttctacacgttcacatccctcttatcactatggagaacttcctcgggaagagtctccacgggctgtatggggacaacgtagaggagatggactggatggtaggacggatccttgacactttggacgtggagggtttgagcaacagcaccctcatttattttacgtcggatcacggcggttccctagagaatcaacttggaaacacccagtatggtggctggaatggaatttataaaggtgggaagggcatgggaggatgggaaggtgggatccgcgtgcccgggatcttccgctggcccggggtgctcccggccggccgagtgattggcgagcccacgagtctgatggacgtgttccccaccgtggtccggctggcgggcggcgaggtgccccaggacagagtgattgacggccaagaccttctgcccttgctcctggggacagcccaacactcagaccacgagttcctgatgcattattgtgagaggtttctggcacgcagccaggtggcatcaacgggacagaggaacaatgtgggaaagtcccactttgtgaccgccttgtgtttccagccaagagggagccggtgcctgcttatggaagaaaaggtctgcccgtgctttggggaaaaaagtagtccaccacgatcccacccttgcttctttgacctctcaagagacccttctgagacccacatcctcacaccagcctcagagcccgtgttctatccaggtgatggaacgaagtccagcaggcggtgtgggaacaccagcggacactcagcccagttcctatgcagctggacaggctgggcaatatctggagaccgtggatgcagccctgctgtggcccgttccccctctgctggtgccttagggaagatgacccacaaataaatgtctgcagtgaaaagctggagccccgattcctaaattttgtcactcaaattgaaacaaaccagctggccatggtggttgtcatcccagcactttaggaggccaccacaggaggatcactcccgtgatcaaaaccaacctgggcaacatgatgaaactctagctctacaaaacaaaaataaaaaaaaaattagcctgc

SEQ ID NO: 22553 - DNA, 392 bp, Homo sapiens
  SIMILAR (178)..(375): 321254mologous to Homo sapiens Human TCL-1 polypeptide,accession number R94974,Smith-Waterman Score=69.
caagatccaaagaaaaaattttatttacaatagagaattttatttgaaacatgcatttcttgtttttttaaaaacaaatcagcaaatgcagatcaagtttacactccttaaggcaagagtccctatgcacgctgtacatgttcatattaaatccaaaagctgagttaggttgtccaaacaaactcaccagacaggttacataagatagtgtaccacaacaaatttaaattttgaacaaaacacatctctcctcctttggtctcacacagaaattaaagtctccaaatacagacaatactatccattctccagctcttctccagattcacgagtcccagccaggtcggcccatccacactccccgttgaagtctggtcctttcttcagtagtt

SEQ ID NO: 22554 - DNA, 513 bp, Homo sapiens
  SIMILAR (1)..(513): 1001254mologous to Homo sapiens TACC2 protein,accession number AF095791,Smith-Waterman Score=894.
ccgccttccttaaaaaagaaacagaccaccaagaaacccacagagacccccccagtgaaggagacgcaacaggagccagatgaagagagccttgtccccagtggggagaatctagcatctgagacgaaaacggaatctgccaagacggaaggtcctagcccagccttattggaggagacgccccttgagcccgctgtggggcccaaagctgcctgccctctggactcagagagtgcagaaggggttgtccccccggcttctggaggtggcagagtgcagaactcaccccctgtcgggaggaaaacgctgcctcttaccacggccccggaggcaggggaggtaaccccatcggatagcggggggcaagaggactctccagccaaagggctctccgtaaggctggagtttgactattctgaggacaagagtagttgggacaaccagcaggaaaacccccctcctaccaaaaagataggcaaaaagccagttgccaaaatgcccctgaggaggcca

SEQ ID NO: 22555 - DNA, 614 bp, Homo sapiens
  SIMILAR (45)..(455): 941254mologous to Homo sapiens TACC2,accession number AF220152,Smith-Waterman Score=636.
gatgtggttctgagacagtccctgtccctgatggcccacggagcgactcggtgaaatccttggagcgtcgtgcatcagacgctaagattcaggagggcaaagtgaacacacgaaggaagtccacggattccgtccccatctctaagtctacactgtcccggtcgctcagcctgcaagccagtgactttgatggtgcttcttcctcaggcaatcccgaggccgtggcccttgccccagatgcatatagcacgggttccagcagtgcttctagtacccttaagcgaactaaaaaaccgaggccgccttccttaaaaaagaaacagacctccaagaaacccacagagacccccccagtgaaggagacgcaacaggagccagatgaagagagccttgtccccagtggggagaatctagcatctgagacgaaaacggaatctgccaagacggaagcccctcgaaagccacgccaaggggtcaggaaagccgtgattcgcataacttgcaatgggactgggcaaataattgtgaatggaattcgtgcttgtgacttctggttctcacagctgcggatgggggggatcaccatcccaattctgagtcatgttcagccctga

SEQ ID NO: 22556 - DNA, 2118 bp, Homo sapiens
  SIMILAR (1012)..(1242): 971254mologous to Homo sapiens TACC2 protein,accession number AF095791,Smith-Waterman Score=372.
atgggagggtcgcagtccctgcagccagccccagccagcgacctgaacctggaggcttccgaggcaatccttggaaagctttacctggggctgctctgggaggagcatctggtagccccaagttactgctgtgggcagaaacgattccctggaattcagttttggtcgctcagcagtgggtgcatggctggggggcttctcctgccgtcagcatctttcctctgcacccccggcacagtggtatttcctgcaagggaacagccaggcatcagcgactgcctcctcctaggaagaacccatgagcgtggcagctccgtgcccggggcgacagcccagtttccgggcagctgcgcttgtggctgggcagatggcgtggagaatacaacttattcgaaaacgattgctctatatggattcttctttaagataaagggactcaaacatgatactacctcttatagtttttacatgcagagaataaagcacacagacctggaatctccctctgcggtctacgagcacaaccacgtcagcctgcgagcggcacgcctggtgaagtatgagatcagagcagaggccctggttgacggcaagtggcaggagttcaggacaaaccagatcaagcagaagtttgggttgaccacctttcttgagaactgttgctttctggaccgggacataggacgaagcttgaggccgctcttcctctgcttgcgtctgcacggcatcaccaaaggagaaaacagcaccacagccatcaaatatgagcatcaactgatctggttccaaattcatgagagctgctgtgatcacactttcacagatgaggacattgcagctgcggggcagttaagcaactcacaggaggttccacagccagtctggaaaatagtggccgagtatgagaagaccatcgctcagatgataggtaggtgtcctgacctgcgggggctcaggccggccccgatgtttctgaactatgaggaggccttggaagataggaggctcagaacagctcccgagggctcctttgcctctgctgacgccctcctcagcaggctagctcaccccgtctctctctgtggtgcacttgactatctggagcccgacttagcagaaaagaaccccccactattcgctcagaaactccaggaggagttagagtttgccatcatgcggatagaagccctgaagctggccaggcagattgctttggcttcccgcagccaccaggatggccaagcagggaactgtcgacaagggggctacgatgccacccccagctgccagcaggaaggaccccaggcacagcctgcaggtctgaagtgggtgacagtggccagaggttctcacaggtcgcaggacttcagtggagtgaagagagaggctgctcacccaacagacgtctccatctccaaaacagccttgtactcccgcatcgggaccgctgaggtggagaaacctgcaggccttctgttccagcagcccgacctggactctgccctccagatcgccagagcagagcacaaagctcggctggaacgccgggtcactggctcaaccaaccggtggcgtttgcccaaacagcctttctctggggacctgctctcactttcccagatgtgcaaggctctgagcatagactttgaggaagctttgaggaacccagacagttccttcctccaggacaacaccttcctccagcacaacaggggcagaggagccggtcttctggggagaagcttttacacatctggccctctcctttgtgatattgggaagctgcatgtccagaggcagcagatactctcaggtgttctgggctcaggtccagcaccacctcctcttggaagtcaccctgattgctcctccccacatactgccttagttttgatttccatgccttccttcttctacctggttccttacctccctccacctcccatgaaacaacagactgccgggaagcagcgctccccatacaaatccatcctgagtgccagctctgtgctgacctgtgctgctggttctggaaatgccaccagggacaggtggaggccttttcgtcctggagctcatggcctcaccggtcagcagagggtgaagcccaagctgtga

SEQ ID NO: 22557 - DNA, 1967 bp, Homo sapiens
  SIMILAR (1065)..(1964): 581254mologous to Homo sapiens TACC2 protein,accession number AF095791,Smith-Waterman Score=788.
tttcgtccaggggatggacgagtactcaggctttcctcgaatctctgcttgagtggggcagcctcggggcctccggacgctggagaagctcacagcatctgtggccggtggtgcagctaacttttttggtgacattgaaagagatttaggtccaagagatacgagcaggggaattaggggtgggaatttgggggacagaggctgttcttcagcggaaatggcctatgcctcctggcagaggtggtccccagtggaatgggcccggtggatgtggacagcggtgaccagcagtggggactccagtctgctggtgcttcagggagactctggaaaaaggagttccgattctgaagaggcatttgagaccccggagtcaacgacccctgtcaaagctccgccagctccacccccaccaccccccgaagtcatcccagaacccgaggtcagcacacagccacccccggaagaaccaggatggggttctgagacagtccctgtacctgatggcccacggagcgactcggtggaaggaagtcccttccgtacccaggcacactccttctctggcgtcttcgatgaagaccagccgatagccagcactgggactgacatcttggactttgacaacattgagcttgtggatacctttcagaccttggagcctcgtgcctcagacgctaagaatcaggagggcaaagtgaacacacggaggaagtccacggattccgtccccatctctaagtctacactgtcccggtcgctcagcctgcaagccagtgactttgatggtgcttcttcctcaggcaatcccgaggccgtggcccttgccccagatgcatatagcacggagagtgcaaaaagggttgtccccccggcttctggaggtggcagagtgcagaactcaccccctgtcgggaggaaaacgctgcctcttaccacggccccggaggcaggggaggtaaccccatcggatagcggggggcaagaggactctccagccaaagggctctccgtaaggctggagtttgactattctgaggacaagagtagttgggacaaccagcaggaaaacccccctcctaccaaaaagataggcaaaaagccagttgccaaaatgcccctgaggaggccaaagatgaaaaagacacccgagaaacttgacaacactcctgcctcacctcccagatcccctgctgaacccaatgacatccccattgctaaaggtacttacacctttgatattgacaagtgggatgaccccaattttaaccctttttcttccacctcaaaaatgcaggagtctcccaaactgccccaacaatcatacaactttgacccagacacctgtgatgagtccgttgacccctttaagacatcctctaagacccccagctcaccttctaaatccccagcctcctttgagatcccagccagtgctatggaagccaatgcagtgggacggggatgggctaaacaagcccgccaagaagaagaagacgcccctaaagacgatggttgaagatgtgatgtctgtgtgttctctgtttgacacatttagggtgaaaaagtcgccaaaacggtctcctctctctgatccaccttcccaggaccccaccccagctgctacaccagaaacaccaccagtgatctctgcggtggtccacgccacagatgaggaaaagctggcggtcaccaaccagaagtggacgtgcatgacagtggacctagaggctgacaaacaggactacccgcagccctcggacctgtccacctttgtaaacgagaccaaattcagttcacccactgaggagttggattacagaaacttctatgaaattgaatatatggagaaaattggctcctccttacctcaggacgacgatgccccgaagaagcaggccttgtaccttatgtttgacacttctcaggagagccctgtcaagtcatctaccgtccgcatgtcatag

SEQ ID NO: 22558 - DNA, 3454 bp, Homo sapiens
  SIMILAR (560)..(2926): 601254mologous to Homo sapiens TACC2 protein,accession number AF095791,Smith-Waterman Score=2196.
  misc_feature (1)...(3454): n = a,t,c or g
cccaccagggaagcaccccagcaggacaacaggtggggatgtggcaaggaaagctgctcatctctggctgacaccagagaagtgacagtcagcaaagcaggacagagagggacatgtgggccgggatgtggttctgagacagtccctgtccctgatggcccacggagcgactcggtggaaggaagtcccttccgtcccccgtcacactccttctctgccgtcttcgatgaagacaagccgatagccagcagtgggacttacaacttggactttgacaacattgagcttgtggatacctttcagaccttggagcctcgtgcctcagacgctaagaatcaggagggcaaagtgaacacacggaggaagtccacggattccgtccccatctctaagtctacactgtcccggtcgctcagcctgcaagccagtgactttgatggtgcttcttcctcaggcaatcccgaggccgtggcccttgccccagatgcatatagcacgggttccagcagtgcttctagtacccttaagcgaactaaaaaaccgaggccgccttccttaaaaaagaaacagaccaccaagaaacccacagagacccccccagtgaaggagacgcaacaggagccagatgaagagagccttgtccccagtggggagaatctagcatctgagacgaaaacggaatctgccaagacgggagggcctaagcccagccttattggaggagacgccccttgagcccgctgtggggcccaaagctgcctgccctctggactcagagagtgcagaaggggttgtccccccggcttctggaggaaaacgctgcctctttaccacggccccggaggcaggggaggtaaccccatcggatagcggggggcaagaggactctccagccaaagggctctccgtaaggctggagtttgactattctgaggacaagagtagttgggacaaccagcaggaaaacccccctcctaccaaaaagataggcaaaaagccagttgccaaaatgcccctgaggaggccaaagatgaaaaagacacccgagaaacttgacaacactcctgcctcacctcccagatcccctgctgaacccaatgacatccccattgctaaaggtacttacacctttgatattgacaagtgggatgaccccaattttaaccctttttcttccacctcaaaaatgcaggagtctcccaaactgccccaacaatcatacaactttgacccagacacctgtgatgagtccgttgacccctttaagacatcctctaagacccccagctcaccttctaaatccccagcctcctttgagatcccagccagtgctatggaagccaatggagtggacggggatgggctaaacaagcccgccaagaagaagaagacgcccctaaagactgacacatttagggtgaaaaagtcgccaaaacggtctcctctctctgatccaccttcccaggaccccaccccagctgctacaccagaaacaccaccagtgatctctgcggtggtccacgccacagatgaggaaaagctggcggtcaccaaccagaagtggacgtgcatgacagtggacctagaggctgacaaacaggactacccgcagccctcggacctgtccacctttgtaaacgagaccaaattcagttcacccactgaggagttggattacagaaactcctatgaaattgaatatatggagaaaattggctcctccttacctcaggacgacgatgccccgaagaagcaggccttgtaccttatgtttgacacttctcaggagagccctgtcaagtcatctcccgtccgcatgtcagagtccccgacgccgtgttcagggtcatagttttgaagagactggaagccctttgtgnaacactgctgcggaaaaaccaggcatcctgttcccacgagggactgggccccttaaccaaggagttcacacttggcagggtgccagaggaaatcctcccaggaagggagctgggagggccatggggtttggggcacccctttcaggaaggcgatttgaaatttacagcttccccgaggggttcctttgcctctgctgacgccctcctcagcaggctagctcaccccgtcttttctctgtgggtgcacttgactatctgggagcccgantttaggcagaaaaggaaccccccactattcgctcagaaactccagagagaggcttgttcacccaacagacgtctccatcttccaaaacagccttgtactcccgcatcaggaccactgaggtggagaaacctgcaggccttctgttccagcagcccgacctgggactctgccctccagatcgccagagcagagatcattaaccaaggagagagaggtctcagaatggaaagataaatatgaagaaagcagggcgggaagtgatggaaatgaggaaaatctatggccgagtatgagaagaccatcgctcagatgatagaggacgaacagagagagaagtcagtctccccaccagacggtgcagcagctggttctggagaaggagcaagcccctggccgacctgaactccgtggagaaagtctctggccgacctcttcagaagatatgagaagatgaaggaggtcctagaaagcttccgcaagaatgaagaggtgttgaagagatgtgcgcaggagtacctgtcccgggtgaagaaggaggagcagaggtaccaggcccctgaaggtgcacgctggaggagaaactggacagggccaatgctgaagattgctcaggttcgaggcaaggcccagcaggagcaagccgcccaccaggccagccttgcggaaaggagcagctgccgagttggacgccctggaaaggacgctggagcagaagaataaagaaatagaagaactcaccaagatttgtgacgaactgattgccaaaatggggaaaagctaactctgaaccgaatgttttggacttaactgttgcgtgcaatatgaccgtcggcacactgctgttcctccagttccatggaccaggttctgttttcactttttcgtatgcactacttgtatttccctttcctaaataaaattgatttgattgtatgccaggtacctaagggagacctatccagaatttcctggcctattgggtttgcatttccccctagtataattcatagcaagttgaccctcagagttcctgtatcagggagaattgtcttgatttcttttaaataaaagaaccacaattgctgaccttgggccttgccctttgtacacaaaagttccccaggggtgagcagcttttgggatttaatatggaacatgtacagcgtgcatagggggactcttggccttaaggagtgtaaacttgattctgcatttgctgatttgtttttaaaaaaaacaagaaatgcatgtttccaataaaattctttattggtaaataaaattttttctttggatcttggcaaaa

SEQ ID NO: 22559 - DNA, 2451 bp, Homo sapiens
  SIMILAR (966)..(1310): 861254mologous to Homo sapiens dJ1057D18.1 (novel protein similar to yeast and bacterial PEPP (aminopeptidase P, aminoacylproline aminopeptidase)),accession number AL035450,Smith- Waterman Score=517.
  misc_feature (1)...(2451): n = a,t,c or g
tttcgtgcggctggcccggtttcctggcgacgcggttctgcaggcggttgcgttccccgtcgttaccctctttctcttcccgacgcgtgagttaggccgtaatgccttggctgctctcagcccccaagctggttcccgctgtagcaaacgtccgcggcctctcaggatgtatgttgtgttcacagcgaaggtactcccttcagcctgtcccagaaaggaggattccaaaccgatacttaggccagcccagcccctttacacacccacacctcctcagaccagactcgaattcctgctgggaagtcggctgaaactaaggaaatgcagctcaccactgaaacccacaagaaatcagagtttttcaaagctgtaagctgagacgaacatggtttggtatgactggatgaggccctcacatgcacagcttcactctgactatatgcagcccctgactgaggccaaagccaagagcaagaacaaggttcggggtgttcagcagctgatacagcgcctccggctgatcaagtctcctgcagaaattgaacgaatgcagattgctgggaagctgacatcacaggctttcatagaaaccatgttcaccagtaaagcccctgtggaagaagcctttctttatgctaagtttgaatttgaatgccgggctcgtggcgcagacattttagcctatccacctgtggtggctggtggtaatcggtcaaacactttgcactatgtgaaaaataatcaactcatcaaggatggggaaatggtgcttctggatggaggttgtgagtcttcctgctatgtgagtgacatcacacgtacgtggccagtcaatggcaggttcaccgcacctcaggcagaactctatgaagccgttctagagatccaaagagattgtttggccctctgcttccctgggacaagcttggagaacatctacagcatgatgctgaccctgataggacagaagcttaaagacttggggatcatgaagaacactcaaggaaaataatgccttcaaggctgctagaaaatactgtcctcatcatgttggccactacctcgggatggatgtccatgacactccagacatgccccgttccctccctctgcagcctgggatggtaatcacaattgagcccggcatttatattccagaggatgacaaagatgccccagagaagtttcggggtcttggtgtacgaattgaggatgatgtagtggtgactcaggactcacctctcatcctttctgcagactgtccccnaaagagatgaatgacattgaaacagatatgcagccaggcttcttgaccttcactgcggccccacatgcacctcaggttcaaaatgggtgtcttctggcagccctgcacgtgtgctttctgagtgtctctgtgtgtgcattaatatatgcattccatttgggagcatagcagctgtgtgaatgtatgtaattgtgtgtggggggttttttgttttaagtagttagaagtctgggaaaatgaatttttgaatagtatgttactgcagctttggtaacattaattctatagaattaatgatcagagcaagtttaatttttaaacataaaggtcttggttacacatgtccatgcattccagttaacacatttaaacatatagaaaattcacttcttctttcaagtccttcccctttcctatacttttgctgagatcaaccccaatatcataagaagtttgtgtgatgcctgtatttttagcctaattacccaaggtctctgcctatgcaaaaattcatctttcggtgattgtgggcggccaatacataccttctgtaactcctccctacctattctagatcctgcatatctactggagccatatgaagcctcaggggcactggtgtcctgcaatctttacaagccagccacagtccaggttccagcaacactagctacctaccaaacaaaacacttctgagcttttcttgccatttggttgcctgggacctggaaagtgtttagattcttgataaagatggaaatggaagagaaagaaaattatatatgtatatactaaagatccagacatcagggctgggcacggcggttccgcctgtaatcccagcactttgggaggtccaggcgggtggatctcttgagaccgggaggtcaggaccagcctggccagcgtggtgggacactgtctctactaaagatacaaaagtgagctgggtgtgatgatgcatgcctgtggtcctggctgcttgggaggctgaggcatgagaattgcttgagcctgggaggtggaggttgcagtgagctgagctcatgcgactgcactccagcctgggtgactgagcaagactctgcctcaaaaaaacaaataaataaataaaatcctgacatcctgccatcttttctcttcaatttaaagttgatttcttaatgatgacttcaaaaattaat

SEQ ID NO: 22560 - DNA, 1492 bp, Homo sapiens
  SIMILAR (407)..(1180): 811254mologous to Homo sapiens Human PRO241 protein sequence,accession number Y17820,Smith-Waterman Score=1025.
aatctgtgggagcagtttattccagtatcacccagggtgcagccacaccaggactgtgttgaagggtgtttttttttcttttaaatgtaatacctcctcatcttttcttcttacacagtgtctgagaacatttacattatacataaggtagacatgtttttatttcttctactttaaggaggactactctgttgtgacagtcctagactggtcttctacactaagacacccatgaaaggagtatgtgctcctaattattcctggctttgtgctctgccaaacccttcctttagcccttcacacatcgcactgaagaatatgatgctgaaggatatggaagacacagatgatgaggatgaagaagatgatgatgatgatgatgatgatgatgaggacaactctctttttccaacaagagagccaagaagccattttttttccatttgatctgtttccaatgtgtccatttggatgtcagtgctattcacgagttgtacattgctcagatttaggtttgacctcagtcccaaccaacattccatttgatactcgaatgcttgatcttcaaaacaataaaattaaggaaatcaaagaaaatgattttaaaggactcacttcactttatggtctgatcctgaacaacaacaagctaacgaagattcacccaaaagcctttctaaccacaaagaagttgcgaaggctgtatctgtcccacaatcaactaagtgaaataccacttaatcttcccaaatcattagcagaactcagaattcatgaaaataaagttaagaaaatacaaaaggacacattcaaaggaatgaatgctttacacgttttggaaatgagtgcaaaccctctttgataataatggggatagagccaggggcattttgaagggggtgacggtgttccatatcagaattgcagaagcaaaactgacctcagtttcctaaagggcttaccaccaactttattggagcttcacttagattataataaaatttcaacagtggaacttgaggattttaaacgatacaaagaactacaaaggctgggcctaggaaacaacaaaatcacagatatcgaaaatgggagtcttgctaacataccacgtgtgaggagagatacatttgggaaacattaaactaaaaaaaatcccttcaggattaccagagttgaaatacctccagataatcttccttcattctaattcaattgcaagagtgggagtaaatgacttctgtccaacagtgccaaagatgaagaaatctttatacagtgcaataagtttattcaacaacccggtgaaatactgggaaatgcaacctgcaacatttcgttgtgttttgagcagaatgagtgttcagcttgggaactttggaatgtaataattagtaattggtaatgtccatttaatataagattcaaaaatccctacatttggaatacttgaactctattaataatgggagtattatatataccagcaaat

SEQ ID NO: 22561 - DNA, 4611 bp, Homo sapiens
  SIMILAR (2980)..(4608): 1001254mologous to Homo sapiens dJ477H23.1 (novel protein),accession number AL033538,Smith-Waterman Score=2797.
atgaagcagctactgcctgcctctggactgctccctctctccagctcccctctcagccctcgccaggagagtccaggagtagaaagggcccatgaaggatgtctgagccagaatcttcaggtccagagagccacgagggaaggagaaatcgatcgtgtggccaagtctggagggcaagagagggcctgtgccagcagtgagacagagagtgaagcgggagacatcatggaccagcaatttgaagagatgaacaacaaactcaactcggtcactgaccccactggctttctgcggatggttcgccgcaataacctgtttaacagccaggctgagtattgtgcccagccctggggactgagtggggagcagcaaggcccacagccccggagcttgcacccagctcccttggcaaggcctgacccaatccagtcccaccctcagaaaagcaaagaaattgaaggggtctctgcagactcttccaaccccgaccctttggatgagggaaatagccggcgttcttctcgcttcaatgtggaggcagtgctgtgttcttcacgtgggagacctgattcctcaatgccagactgctgcagaaatgctgccttggaagccaggagctgccagagcatgacgagcctgttcagtaacactgtgtcaccgacccaggacgggacctcctctcttcccaggaggcagagctcgtttgccaagcccccgctccgtgccctgtatgacctgctcatcgcgcccatggaagggggtgtggtggaaagcacagagcctttgggaaccagcagagctggatttgcatctggcactgcccttttctggctgggtgacaatggcaaagctgcttcccctcctggagtatctgtttcctcattagaaaatgaggatgataacacccaatgcaacaggttagagcagggatacagagaggcagctgtgcctgattggactcaggacttagctctgtgcttgctgcccactctacagtccctgaaggcaaggactgcccctcatctctgtgtccccagcagctgttacaaggcctggtacacgttggcggtcagtaaagtttctggaatgggcctgatgcactccagcggccccgtgggccggcaccggcagctcatcctggttctggagggggagctctacctcattcctttcgccctcctgaagggaagctcctccaatgagtacctctacgagcgcttcggcctccttgctgtcccttccatccgctccctcagcgtgcagtccaagtctcacttacggaagaacccgcccacatactccagctccacatccatggcggctgtcatcggcaaccccaagctaccatcggccgtgatggacaggtggctgtgggggcccatgccatcggccgaggaagaggcctacatggtgtccgagctgctgggctgccagcccctagtgggcagtgtggccaccaaggagagggtcatgagtgccctgacccaggctgaatgcgtccactttgccacccacatctcctggaagctgtcggccttggtcctcacgcccagcatggacggcaaccctgccagcagcaagagctccttcggccacccctacacgatccctgagtccttgcgggtgcaggacgatgccagtgatggggagagcatctcggactgcccgcccctgcaggagctgctgcttactgccgccgacgtcctggacctgcagctgcctgtgaagctggtggtgcttggctcctcccaggagtccaacagcaaagtcacagccgacggggtcatcgcgctgacaagggccttcctggctgccggcgctcagtgtgtcctcgtgtctctgtggcctgtgccagtggctgcttctaagatgttcatccatgccttctactcatccctgctgaacggcctgaaagccagcgccgccctgggggaggccatgaaggtggtgcagagcagcaaggccttctcgcacccctccaactgggcagggttcatgctcatcgggagtgacgttaagctgaacagcccctcatcactcatcggccaggccctcacagagatcctgcagcacccggagcgtgcgcgggacgccctgcgagtgctgctgcacctggtggagaaatccctgcagcgcatccagaatgggcagcgcaatgccatgtacacatcccagcagagtgtggagaacaaagtgggcggcatccctggctggcaggccctcctcaccgctgtgggcttccggctggaccccccaaccagtggcctgccagcggctgtcttcttcccaacctccgacccgggcgaccggctccagcagtgcagcagcacactccagtccctgctgggtctgcccaatcctgccctccaagccctttgcaaactcatcactgcctccgagacgggcgagcagctcatcagccggctccaccaggtgctggttcagctccaggctggcgagaaggagcaggacttggcatcagctcccattcaggtctccatcagcgtccagctgtggcggctcccgggatgccacgagttcctggcagctctagacatggggaagccccaggcccaaatgcttgctgaagggccttgcaggcattccatgaagttgcacaaggagccctatagcgctcatgttcaagatctggaatcttcccgaaggaagcagatgcttatattctttgttcctctaggttttgatctctgtgaagttggtcaggaggaagtaatcctgaaaaccgggaagcaagctaatcgacggactgtgcacttcgcgctccagtccctgctgtctctgtttgggcctgaccggagcggacactcaggtcatgtgggcctgggagatttccaggccctggggacacacccagcccgactgatgttcttaagggccaagctggctacagtgggaagagcaaatgctggcttggaaggtggttatggtttgcaggtggaaccaacggagtctgctgaagattctactgagctacccaagcgcctcagccttgacagctcctcctccctcgagtctcttgcttctgctcagtctgtttccaacgccctgcccttgggttaccagcaaccccccttctctcccaccggtgcggacagcatcgcctcagatgccatctctgtgtacagtctgagctccattgcctcctcaatgagctttgtctccaaacccgagggtggatcagagggtggaggccccggaggacggcaggaccatgaccggtccaagaacgcttacctgcagagatccaccctgcctaggagccagctgcctccccagacccgccctgcaggcaacaaagatgaagaagaatatgaagggttttctatcatcagtaacgagcccttggcgacctaccaagaaaaccgaaacacatgcttctcaccagaccacaaacaaccccaacctgggacagccggaggcatgagagtctcggtgagctccaaagggagcatcagcactccaaattctccagtgaaaatgactctgattcccagccccaactcacccttccaaaaggtgggaaaactagcaagctcagatacaggagaatcagaccagtctagcacagaaacggacagtaccgtgaaatcccaagaagaaagcaacccaaaactggatccacaagagttagcccagaaaattctggaggagacacagagtcatctcattgcggtggagcgtcttcagaggagcggcggccaggtgagcaagagtaataaccctgaagacggcgttcaggcgcccagcagcactgctgtcttcagagcgtcagaaaccagtgcgttcagcaggcctgttctctcccatcagaagagtcagccatcaccagtcactgttaaaccaaagcccccagccaggagctcctccctgcccaaggtgagttccggatatagcagccccaccacctcagagatgtccatcaaagacagcccgagccagcacagtggccggccatcgcccggctgcgactcacagacttcccagctggaccagcctctctttaaactgaagtaccccagctctccttacagcgctcacatttccaaatcaccaaggaacatgtccccaagctccggccaccagtctcctgctggcagtgcaccctccccagctctctcctactcctcagctggatctgctcgctcaagtccagcagacgctcccgacatagacaaactgaaaatggcagccattgatgaaaaggtgcaggctgtccataacctgaagatgttctggcagagcacaccccagcattccacagggccaatgaagatcttccggggggctcctggcacgatgacttccaaaagggatgtcctcagtctgttgaatttgtcaccacggcacaataagaaggaggagggagtggataagcttgaactgaaggagctgtccctgcagcagcatgacggagctccaccgaaagcccctcccaacggacactggcgcaccgagaccacctcgctgggctcactgccgctgcccgccggccctcccgccacagcccccgcgcgccctttgaggcttccttctggaaatggctacaagttcctgtctccaggaagatttttcccttcttccaaatgctaa

SEQ ID NO: 22562 - DNA, 465 bp, Homo sapiens
  SIMILAR (295)..(372): 461254mologous to Homo sapiens Human secreted protein, SEQ ID NO: 6328,accession number G02247,Smith-Waterman Score=68.
agtccaggagtagaaagggcccatgaaggatgtctgagccagaatcttcaggtccagagagccacgagggaaggagaaatcgatcgtgtggccaagtctggagggcaagagagggcctgtgccagcagtgagacagagagtgaagcgggagacatcatggaccagcaatttgaagagatgaacaacaaactcaactcggtcactgaccccactggctttctgcggatggttcgccgcaataacctgtttaacagccaggctgagtattgtgcccagccctggggactgagtggggagcagcaaggcccacagccccggagcttgcacccagctcccttggcaaggcctgacccaatccagtcccaccctcagaaaagcaaagaaattgaaggggtctctgcagactcttccaaccccgaccctttggatgagggaaatagccggcgttcttctcgcttcaatgtg

SEQ ID NO: 22563 - DNA, 1545 bp, Homo sapiens
  SIMILAR (1)..(789): 1001254mologous to Homo sapiens cB42E1.1 (PUTATIVE novel protein similar to various different known and predicted proteins),accession number AL035453,Smith-Waterman Score=1355.
atgggcatcacaaagatgaacatgaatgtgatggaagaagccattggctactttgagcagcaattggccatgctgcagcagctaagtggaaatgagtctgtgctcgacaggggccgggcctatggcaacctgggggattgctacgaagccctgggtgactatgaggaagctatcaaatactatgaacaatatttatctgtcgcgcagagtctgaatcgcatgcaagaccaagccaaggcttaccggggcctgggaaatggacacagggcaatggggagcttgcagcaagcccttgtgtgctttgaaaagaggctcgtggttgctcatgaacttggagaggccttcaataaagcccaggcctatggagagctgggaagtctgcacagccaattagggaattacgaacaagccatttcctgccttgaacgccagctgaacattgctagagatatgaaagaccgagccctggagagtgacgcagcctgtggcctggggggcgtttaccagcagatgggggagtatgacacagccctgcagtaccaccagcttgatctacagatagcagaggaaaccaacaaccccacgtgccagggccgagcctatgggaacctgggcctgacttatgaatccctgggcaccttcgagagggctgtggtctatcaagaacagcacttgagcattgctgcacagatgaatgacttggcggccaagacggtgtcatatagtagccttggaaggacccatcatgccttgcagaactattcccaagcagtcatgtacttacaggaaggtttaaggttagctgagcaactgggccgaagagaagatgaggcaaaaattcgccatggccttggcctctccctttgggctagtggaaacttggaggaggcccaacaccagctttatagggcatcagccttgtttgaaacaatccgacatgaggcacagctgagcacggactacaaactctccctctttgacctgcagacatcatcctaccaggccttgcagcgggtgctcgtcagcctaggccatcatgatgaagccctggctgtggcagaaaggggacggacaagggcatttgctgatcttctggtggaacgacaaacaggacaacaagactccgacccctactccccagtcactattgatcagatcttagagatggtaaatggccagaggggactagtgctttactattccctggctgcaggctatctgtatagctggctgctggctcctggggcaggaattgtgaagtttcatgaacactacctgggtgagaacacagtggaaaactcaagtgacttccaggccagcagcagtgtaacccttccaacagcaaccggctcagccctggagcagcacattgccagtgtccgggaggccctgggggtggagtctcactactcaagtattagaaatgggcactgccggagtctgccctgctacctttccctttttcatgtttctactgctggccaccaagattataaaggtacttgggtgtatgacacctgccatttgaaatctctgcatatgtga

SEQ ID NO: 22564 - DNA, 4228 bp, Homo sapiens
  SIMILAR (2822)..(4225): 931254mologous to Homo sapiens dJ477H23.1 (novel protein),accession number AL033538,Smith-Waterman Score=2248.
gaggcagtgctgtgttcttcacgtgggagacctgattcctcaatgccagactgctgcagaaatgctgccttggaagccaggagctgccagagcatgacgagcctgttcagtaacactgtgtcaccgacccaggacgggacctcctctcttcccaggaggcagagctcgtttgccaagcccccgctccgtgccctgtatgacctgctcatcgcgcccatggaagggggtgtggtggaaagcacagagcctttgggaaccagcagatctggatttgcatctggcactgcccttttctggctgggtgacaatggcaaagctgcttcccctcctggagtatctgtttcctcattagaaaatgaggatgataacacccaatgcaacaggttagagcagggatacagagaggcagctgtgcctgattggactcaggacttagctctgtgcttgctgcccactctacagtccctgaaggcaaggactgcccctcatctctgtgtccccagcagctgttacaaggcctggtacacgttggcggtcagtaaagtttctggaatggtggaggggaaggcctggatcatcctcctgcttctggctgcaagcacccacgcactgctccagaggccacaagagggcgatataacaccgctagccggctccagagctgccgctgtcagctgccaagccagacccttctccacattttcaggcctgatgcactccagcggccccgtgggccggcaccggcagctcatcctggttctggagggggagctctacctcattcctttcgccctcctgaagggaagctcctccaatgagtacctctacgagcgcttcggcctccttgctgtcccttccatccgctccctcagcgtgcagtccaagtctcacttacggaagaacccgcccacatactccagctccacatccatggcggctgtcatcggcaaccccaagctaccatcggccgtgatggacaggtggctgtgggggcccatgccatcggccgaggaagaggcctacatggtgtccgagctgctgggctgccagcccctagtgggcagtgtggccaccaaggagagggtcatgagtgccctgacccaggctgaatgcgtccactttgccacccacatctcctggaagctgtcggccttggtcctcacgcccagcatggacggcaaccctgccagcagcaagagctccttcggccacccctacacgatccctgagtccttgcgggtgcaggacgatgccagtgatggggagagcatctcggactgcccgcccctgcaggagctgctgcttactgccgccgacgtcctggacctgcagctgcctgtgaagctggtggtgcttggctcctcccaggagtccaacagcaaagtcacagccgacggggtcatcgcgctgacaagggccttcctggctgccggcgctcagtgtgtcctcgtgtctctgtggcctgtgccagtggctgcttctaagatgttcatccatgccttctactcatccctgctgaacggcctgaaagccagcgccgccctgggggaggccatgaaggtggtgcagagcagcaaggccttctcgcacccctccaactgggcagggttcatgctcatcgggagtgacgttaagctgaacagcccctcatcactcatcggccaggccctcacagagatcctgcagcacccggagcgtgcgcgggacgccctgcgagtgctgctgcacctggtggagaaatccctgcagcgcatccagaatgggcagcgcaatgccatgtacacgtcccagcagagtgtggagaacaaagtgggcggcatccctggctggcaggccctcctcaccgctgtgggcttccggctggaccccccaaccagtggcctgccagcggctgtcttcttcccaacctccgacccgggcgaccggctccagcagtgcagcagcacactccagtccctgctgggtctgcccaatcctgccctccaagccctttgcaaactcatcactgcctccgagacgggcgagcagctcatcagccggctccaccaggtgctggttcagctccaggctggcgagaaggagcaggacttggcatcagctcccattcaggtctccatcagcgtccagctgtggcggctcccgggatgccacgagttcctggcagctctagacatggggaagccccaggcccaaatgcttgctgaagggccttgcaggcattccatgaagttgcacaaggagccctatagcgctcatgttcaagatctggaatcttcccgaaggaagcagatgcttatattctttgttcctctaggttttgatctctgtgaagttggtcaggaggaagtaatcctgaaaaccgggaagcaagctaatcgacggactgtgcacttcgcgctccagtccctgctgtctctgtttgggcctgaccggagcggacactcaggtcatgtgggcctgggagatttccaggccctggggacacacccagcccgactgatgttcttaagggccaagctggctacagtgggaagagcaaatgctggcttggaaggtggttatggtttgcaggtggaaccaacggggtctgctgaagattctactgagctacccaagcgcctcagccttgacagctcctcctccctcgagtctcttgcttctgctcagtctgtttccaacgccctgcccttgggttaccagcaaccccccttctctcccaccggtgcggacagcatcgcctcagatgccatctctgtgtacagtctgagctccattgcctcctcaatgagctttgtctccaaacccgagggtggatcagagggtggaggccccggaggacggcaggaccatgaccggtccaagaacgcttacctgcagagatccaccctgcctaggagccagctgcctccccagacccgccctgcaagcaaacaaagatgaagaagaatatgaagggttttctatcatcagtaacgagcccttggcgacctaccaagaaaaccgaaacacatgcttctcaccagaccacaaacaaccccaacctgggacagccggaggcatgagagtctcggtgagctccaaagggagcatcagcactccaaattctccagtgaaaatgactctgattcccagccccaactcacccttccaaaaggtgggaaaactagcaagctcagatacaggagaatcagaccagtctagcacagaaacggacagtaccgtgaaatcccaagaagaaagcaacccaaaactggatccacaagagttagcccagaaaattctggaggagacacagagtcatctcattgcggtggagcgtcttcagaggagcggcggccaggtgagcaagagtaataaccctgaagacggcgttcaggcgcccagcagcactgctgtcttcagagcgtcagaaaccagtgcgttcagcaggcctgttctctcccatcagaagagtcagccatcaccagtcactgttaaaccaaagcccccagccaggagctcctccctgcccaaggtgagttccggatatagcagccccaccacctcagagatgtccatcaaagacagcccgagccagcacagtggccggccatcgcccggctgcgactcacagacttcccagctggaccagcctctctttaaactgaagtaccccagctctccttacagcgctcacatttccaaatcaccaaggaacatgtccccaagctccggccaccagtctcctgctggcagtgcaccctccccagctctctcctactcctcagctggatctgctcgctcaagtccagcagacgctcccgacatagacaaactgaaaatggcagccattgatgaaaaggtgcaggctgtccataacctgaagatgttctggcagagcacaccccagcattccacagggccaatgaagatcttccggggggctcctggcacgatgacttccaaaagggatgtcctcagtctgttgaatttgtcaccacggcacaataagaaggaggagggagtggataagcttgaactgaaggagctgtccctgcagcagcatgacggagctccaccgaaagcccctcccaacggacactggcgcaccgagaccacctcgctgggctcactgccgctgcccgccggccctcccgccacagcccccgcgcgccctttgaggcttccttctggaaatggctacaagttcctgtctccaggaagatttttcccttcttccaaatgctaa

SEQ ID NO: 22565 - DNA, 5063 bp, Homo sapiens
  SIMILAR (2211)..(4070): 901254mologous to Homo sapiens dJ477H23.1 (novel protein),accession number AL033538,Smith-Waterman Score=2825.
  misc_feature (1)...(5063): n = a,t,c or g
cgctcttgatttcccgggccgacgatttcgtccaacagccagctttatatgggcatcagtcttgtttgaaacaatccgacatgaggcagaggtgagcacggactacaaactctccctctttgacctgcagacatcatcctaccaggccttgcagcgggtgctcgtcagcctaggccatcatgatgaagccctggctgtggcagaaaggggacggacaagggcatttgctgatcttctggtggaacgacaaacaggacaacaagactccgacccctactccccagtcactattgatcagatcttagagatggtaaatggccagaggggactagtgctttactattccctggctgcaggctatctgtatagctggctgctggctcctggggcaggaattgtgaagtttcatgaacactacctgggtgagaacacagtggaaaactcaagtgacttccaggccagcagcagtgtaacccttccaacagcaaccggctcagccctggagcagcacattgccagtgtccgggaggccctgggggtggagtctcactactcaagggcctgtgccagcagtgagacagagagtgaagcgggagacatcatggaccagcaatttgaagagatgaacaacaaactcaactcggtcactgaccccactggctttctgcggatggttcgccgcaataacctgtttaacaggagctgccagagcatgacgagcctgttcagtaacactgtgtcaccgacccaggacgggacctcctctcttcccaggaggcagagctcgtttgccaagcccccgctccgtgccctgtatgacctgctcatcgcgcccatggaagggggcctgatgcactccagcgggccccgtgggccgggcaccggcagctcatcctggttctggagggggagctctacctcattcctttcgcccctcttgaagggaagctcctccaatgagtacctctacgagcgcttcggcctccttgctgtcccttccatccgctccctcagcgtgcagtccaagtctcacttacggaagaacccgcccacatactccagctccacatccatggcggctgtcatcggcaaccccaagctaccatcggccgtgatggacaggtggctgtgggggcccatgccatcggccgaggaagaggcctacatggtgtccgagctgctgggctgccagcccctagtgggcagtgtggccaccaaggagagggtcatgagtgccctgacccaggctgaatgcgtccactttgccacccacatctcctggaagctgtcggccttggtcctcacgcccagcatggacggcaaccctgccagcagcaagagctccttcggccacccctacacgatccctgagtccttgcgggtgcaggacgatgccagtgatggggagagcatctcggactgcccgcccctgcaggagctgctgcttactgccgccgacgtcctggaccttgcagctgccctgtgaaggctggtggtggttgggctcttccagggagtccaccagcaaattcacagccgacggggtcttcgcgttgacaagggctttcttggctgcgggcgctcagtgtgtcctcgggtctctgtggcctgtgccagtggctgcttttaagatgttcatccatgccttctactcatccctgctgaacggcctgaaagccagcgccgccctgggggaggccatgaaggtggtgcagagcagcaaggccttctcgcacccctccaactgggcagggttcatgctcatcgggagtgacgttaagctgaacagcccctcatcactcatcggccaggccctcacagagatcctgcagcacccggagcgtgcgcgggacgccctgcgagtgctgctgcacctggtggagaaatccctgcagcgcatccagaatgggcagcgcaatgccatgtacacatcccagcagagtgtggagaacaaagtgggcggcatccctggctggcaggccctcctcaccgctgtgggcttccggctggaccccccaaccagtggcctgccagcggctgtcttcttcccaacctccgacccgggcgaccggctccagcagtgcagcagcacactccagtccctgctgggtctgcccaatcctgccctccaagccctttgcaaactcatcactgcctccgagacgggcgagcagctcatcagccgggctgttaaaaatatggttggaatgctccaccaggtgctggttcagctccaggctggcgagaaggagcaggacttggcatcagctcccattcaggtctccatcagcgtccagctgtggcggctcccgggatgccacgagttcctggcagctctaggttttgatctctgtgaagttggtcaggaggaagtaatcctgaaaaccgggaagcaagctaatcgacggactgtgcacttcgcgctccagtccctgctgtctctgtttgattctactgagctacccaagcgcctcagccttgacagctcctcctccctcgagtctcttgcttcttgcttcagtctgtttccaacgccctgcccttgggttaccagcaaccccccttctctcccaccggtgcggacaggaatngcctcagatgccatctctgtgtacagtctgagctccattgcctcctcaatgagctttgtctccaaacccgagggtggatcagagggtggaggccccggaggacggcaggaccatgaccggtccaagaacgcttacctgcagagatccaccctgcctaggagccagctgcctccccagacccgccctgcaggcaacaaagatgaagaagaatatgaagggttttctatcatcagtaacgagcccttggcgacctaccaagaaaaccgaaacacatgcttctcaccagaccacaaacaaccccaacctgggacagccggaggcatgagagtctcggtgagctccaaagggagcatcagcactccaaattctccagtgaaaatgactctgattcccagccccaactcacccttccaaaaggtgggaaaactagcaagctcagatacaggagaatcagaccagtctagcacagaaacggacagtaccgtgaaatcccaagaagaaagcaacccaaaactggatccacaagagttagcccagaaaattctggaggagacacagagtcatctcattgcggtggagcgtcttcagaggagcggcggccaggtgagcaagagtaataaccctgaagacggcgttcaggcgcccagcagcactgctgtcttcagagcgtcagaaaccagtgcgttcagcaggcctgttctctcccatcagaagagtcagccatcaccagtcactgttaaaccaaagcccccagccaggagctcctccctgcccaaggtgagttccggatatagcagccccaccacctcagagatgtccatcaaagacagcccgagccagcacagtggccggccatcgcccggctgcgactcacagacttcccagctggaccagcctctctttaaactgaagtaccccagctctccttacagcgctcacatttccaaatcaccaaggaacatgtccccaagctccggccaccagtctcctgctggcagtgcaccctccccagctctctcctactcctcagctggatctgctcgctcaagtccagcagacgctcccgacatagacaaactgaaaatggcagccattgatgaaaaggtgcaggctgtccataacctgaagatgttctggcagagcacaccccagcattccacagggccaatgaagatcttccggggggctcctggcacgatgacttccaaaagggatgtcctcagtctgttgaatttgtcaccacggcacaataagaaggaggagggagtggataagcttgaactgaaggagctgtccctgcagcagcatgacggagctccaccgaaagcccctcccaacggacactgggcgcaccgagaccacctcgctgggctcactgccgctgcccgccggccctcccgccacagcccccgcgcgccctttgaggcttccttctgggaaatggctacaagttcctgtctccagggaagattttttcccttctttccaaatgcttaaagcatcttttattacccattgattttgagcaggcttgcagatgggggcctggcgtttgcttcagcccttccctgagtgcattcccctcacagccaccagcaccctcatgatgctgtgctctgcaggcgaggggcaccaccacgtccaaaggctgccacacacactggtggcttttctgggccacattcaccaaaagccaggacttctgtggggctggtacaggaggctcatggaatttcctacacacttcaccaaatgtttgtttacctttgaactccctgcttctcatctttgatatgattcttcaccaggattttgtacaaaaatgatccatggttcctggggtggggagaggaaagggagccacatattttgctaagaggtatatatgcagtaccttttataccacagaaatacaaatagagctttttcctaaggctttcggttgcctggttgggggtgggatatatgaaatttcagttgaattctacaggaaagtgttatattagcccaaaaacagaaaaatggtttttaaaatgccaatgatttgtaattaaattgtagcaattttggtctcatgatagtgtaatatctcagcaacaatgcaataattcacattgaaacagcgcttccattctgaactcctgctctgcaaatgtcttttgggtcccgctgtcaaccaaacttgaattttcttaaaaaaaaaattatgtaactcttatccaggcattttagaactatgcaattgtgatttaaaatgcaactttgtgcttttaaaacattattgaccttttttgtatatggataaacaacttttggttttattatcaatagtactttgcatttatagctattatttttaaaagctcaaaaagttttttaaaatgtcaaattttgaatagtcatcaataagtaattatcaagtttggaaggaaaggttgaaatgactccgtttccttataagcaaaaaaaaaa

SEQ ID NO: 22566 - DNA, 621 bp, Homo sapiens
  SIMILAR (40)..(282): 951254mologous to Rattus norvegicus voltage-gated sodium channel beta-3 subunit,accession number AJ243395,Smith-Waterman Score=397.
atgcatcttctagaagaaaacacagaggtgaagaggattggggccaacctgctggagatttacgagtatcggaatggccaccaggaggtggagagcccctttcaggggcgcctgcagtggaatggcagcaaggacctgcaggacgtgtccatcactgtgctcaacgtcactctgaacgactctggcctctacacctgcaatgtgtcccgggagtttgagtttgaggcgcatcggccctttgtgaagacgacgcggctgatccccctaagagtcactgaggaggaagccctgagttgccatgtaagaagttcaggtggtctgctgagaaactacatggagagactgatcctatcgaagaggtcacaaggagagagaccctcagactacctggagaaaaacaaacgttcagccaccccagtttcctggctgagcagttttccagccatccgactaagacatcagatgtgtgcacagtgcaagctgtcagtggatctaccattctggggtctggaggatggtggccttgtcttccaggacagctcttttgccgtggaactgcttctctgtagacctgttgccaagattccgcaaatgaacccaagcaccaagcaattgctgtag

SEQ ID NO: 22567 - DNA, 3531 bp, Homo sapiens
  SIMILAR (300)..(407): 941254mologous to Homo sapiens putative kruppel-related zinc finger protein NY-REN-23 antigen,accession number AF155101,Smith- Waterman Score=180.
atggctacagccgtggaaccagaggaccaggatctttgggaagaagagggaattctgatggtgaaactggaagatgatttcacctgtcggccagagtctgtcttacagagggatgacccggtgctggaaacctcccaccagaacttccgacgcttccgctaccaggaggcagcaagccctagagaagctctcatcagactccgagaactttgtcaccagtggctgagaccagagaggcggacaaaggagcagatcctagagctgcttgtgctggaacaatttcttaccgtcctacctggagaactacagagctgggtgcggggccaacggccagaaagtggcgaggaggcagtgacgctggtggagggtttgcagaaacaacccaggagaccaaggcggtgggcatcttctcctaaaataagctcccgtgacaaccaagaacttcctcctgactccatggtgactggaagttggaattattcccaggtgactgtccatgttcacggccaggaagtcctgtcagaggagacggtgcatttaggagcggagcctgagtcacctaatgagctgcaggatcctgtgcaaagctcgacccccgagcagtctcctgaggaaaccacacagagcccagatctgggggcaccggcagagcagcgtccacaccaggaagaggagctccagaccctgcaggagagcgaggtcccagtgcccgaggacccagaccttcctgcagagaggagctctggagactcagagatggttgctcttcttactgctctgtcacaggtgtgccctagttacctctgtaccacagagaatttgtttgaagaaccactgggcataagccatactaaacagggactggtaacgttcaaggatgtggccgtatgcttttcccaggaccagtggagtgatctggacccaacacagaaagagttctatggagaatatgtcttggaagaagactgtggaattgttgtctctctgtcatttccaatccccagacctgatgagatctcccaggttagagaggaagagccttgggtcccagatatccaagagcctcaggagactcaagagccagaaatcctgagttttacctacacaggagataggagtaaagatgaggaagagtgtctggagcaggaagatctgagtttggaggatatacacaggcctgttttgggagaaccagaaattcaccagactccagattgggaaatagtctttgaggacaatccaggtagacttaatgaaagaagatttggtactaatatttctcaagtgaatagttttgtgaaccttcgggaaactacacccgtccaccccctgttagggaggcatcatgactgttctgtgtgtggaaagagcttcacttgtaactcccaccttgttagacacctgaggactcacacaggagagaaaccctataaatgtatggaatgtggaaaaagttacacacgaagctcacatcttgccaggcaccaaaaggttcacaagatgaacgcgccttacaaatatcccctaaaccggaagaatttggaagagacctcccctgtgacacaggctgagagaactccatcagtggagaaaccctatagatgtgatgattgcggaaagcacttccgctggacttcagaccttgtcagacatcagaggacacatactggagaaaaacccttcttttgtactatttgtggcaaaagcttcagccagaaatctgtgttaacaacacaccaaagaatccacctgggaggcaaaccctacttgtgtggagagtgtggtgaggacttcagtgaacacaggcggtacctggcgcaccggaagacgcacgctgctgaggaactctacctctgcagcgagtgcgggcgctgcttcacccacagcgcagcgttcgccaagcacttgagaggacacgcctcagtgaggccctgccgatgcaacgaatgtgggaagagcttcagtcgcagggaccacctcttgtacatctctcctagacaagtccaaggaactactaacgagaagatttcaggaagaggcctacagcaattgcttggtgcttgggttcatttgcggaatcttggcaacaggtctacagagaagcagttccacggcaaaagagcttgctatgggaacgaattgggcctgaccagtgatgacgaggactacgtgccccctgacgacgacttcaacacaatgggatactgtgaagagatccctgtggaagagaatgaagtgaatgacagctcatccaagagcagcatagagaccaagccagatgccagtccacagctgcccaagaaatccatcaccaacagcacactaacatccacagggagcagtgaggcccccgtctcgtttgatgggctgcccctggaggaagaggcgctggagggagacgggtccctggaaaaggagctcgccattgacaacatcatgggggagaagattgagatgatcgctcctgtgaactccccttcactggacttcaatgacaatgaggacatccccactgagctcagtgactcttccgacacacacgatgaaggagaggtccaggccttctatgaggacctgagtggccggcagtacgtgaatgaagtcttcaacttcagcgtggacaagctctatgacctcctcttcaccaactcgcccttccagcgggatttcatggagcagcggcgcttctctgatatcatcttccatccatggaaaaaggaggagaatggaaaccagagccgagtgattctttacaccatcacccttaccaaccctctggctcccaaaactgccactgtcagggagacacagaccatgtacaaggcgagccaggagagtgaatgttacgtgatagatgccgaagtcctcacccacgacgtgccctaccatgactacttctacacaatcaatcgctacacgctcacccgtgtggctcggaacaagagccgactcaggtgtgtcagtgtctgcttccctgtgtgtgtggaagtgccctcggagacggaggccgtgcagggcaaccccatgaagctgcgctgcatctcctgcatgaagagagaggaggtggaggccaccacggtggtggaatggttctacaggcccgagggcggtaaagatttccttatttacgagtatcggaatggccaccaggaggtggagagcccctttcaggggcgcctgcagtggaatggcagcaaggacctgcaggacgtgtccatcactgtgctcaacgtcactctgaacgactctggcctctacacctgcaatgtgtcccgggagtttgagtttgaggcgcatcggccctttgtgaagacgacgcggctgatccccctaagagtcaccgaggaggggctaatttcaagctctaatgtgatgcccctgaacatagaattggggagaaatacacacataggtcttgtgaaccaacgccagcctgctccagagcactctagtgcttccaccagtgctcctgatagtcatctgggcttcccagccatccctcaaggaggggccaatgaagatgagacttga

SEQ ID NO: 22568 - DNA, 1195 bp, Homo sapiens
  SIMILAR (518)..(1051): 911254mologous to Homo sapiens voltage-gated sodium channel beta-3 subunit,accession number AJ243396,Smith-Waterman Score=826.
cgaccgccccggacgaccagggtcgaccatatcaggccggagagcctgctgcgcatgtcagggctgacagcacacacggcctagagacctatagaagggcagctgggcacctgccacccagggtcggagccccgcaccatccggtggcgagctcccgggaaggggctacgcctctacacccaccccccaacctctgacatcgccggccgaacgggagctgccgcttccttcccggccccgctgcacctccccagggagccgagggcgggcgtggacgggaccgacgcggaacgcattctgtatcccagacgggcggccccggcggcttcgggagtggggtcacgcccagctggagaagcagttagggcggacgaagcaggagccgcggggctgggaggattccagtcggaacgcaaccgatcctggggaggcgagagccttggaagccgccagccccagaagatgcctgccttcaatagattgtttcccctggcttctctcgtgcttatctactgagtcagtgtctgcttccctgtgtggggggaaagtgcccttagaaaacggggggcgggcacgggctaaccccatgaagctgcgctgcatctcctgcatgaagagagaggaggtggaggccaccacggtggtggaatggttctacaggcccgagggcggtaaagatttccttatttacgagtatcggaatggccaccaggaggtggagagcccctttcaggggcgcctgcagtggaatggcagcaaggacctgcaggacgtgtccatcactgtgctcaacgtcactctgaacgactctggcctctacacctgcaatgtgtcccgggagtttgagtttgaggcgcatcggccctttgtgaagacgacgcggctgatccccctaagagtcaccgaggaggctggagaggacttcacctctgtggtctcagaaatcatgatgtacatccttctggtcttcctcaccttgtggctgctcatcgagatgatatattgctacagacaggtctcaaaagccgaagaggcagcccaagaaaacgcgccaggaaactccctagaaggtggcagccaaggcttgcaaatcaacagcacccaggacgggctggtcactgggcagcaggatgttggcagccacagggctcgtgagcacatgcctgactttgaggaaccgcccagcgccaagtag

SEQ ID NO: 22569 - DNA, 527 bp, Homo sapiens
  SIMILAR (321)..(163): 621254mologous to Homo sapiens Membrane-bound protein PRO1097,accession number Y66734,Smith-Waterman Score=201.
tcatgaggaaggaggaacggggaaaatgtgggcaagaggttgtactgtgattaccacaggaaagccaaggcacggcagggtgagtgggcgtaggattggctggtttgaatgatttcggtgggctctggcactaagggctgcctctagttgtcgagtacctggccaagctggcgttgagcactccctggtattgtaatagagtcggtggaaatgtttgctgcattctggtgaaaatgtgaccggccctgtgaaatgctttatgaatttgtcttgtaagttagagtctcttgggaatatttctgcgctccgggacccgctgggagtccggccggccccggccgcggggaggaaaagcaacggcttgggctccttatccgtgacgcgcgctcccctgcgcccccggggcctcccgtgggctccgtgcggggacaaagccagcgccagcaggaagagtgcgggcaaaggggcgccgggcttaaggggccgcatgttcgctagccgcgggcgcgtgggtcgaacctggaatt

SEQ ID NO: 22570 - DNA, 6532 bp, Homo sapiens
  SIMILAR (226)..(1449): 581254mologous to Homo sapiens Human membrane attractin- 1,accession number Y70690,Smith-Waterman Score=1488.
cctaaattaggttgtagttcaccacttgtagaggcagcttcaggccaaatttaatttaatttaataaactaatgaaataaataagggagagtctgattcagttgaattgtatttggagttagaaatgtttattttaaagttcaccagaggatttaaatatacactgaagtttaagaatcattgctgtacaaaggtgaaaaataacatgctcttttaattttgtagtctgtcaagaactacaccaaatgtcatgtgagaaatgagcagatttgtaacaaacttaccagctgtaaaagctgttcactaaacttgaattgccagtgggatcagagacagcaagaatgccaggctttaccagctcatctttgtggagaaggatggagtcatattggggatgcttgtcttagagtcaattccagtagagaaaactatgacaatgcaaaactttattgctataatcttagtggaaatcttgcttcattaacaacctcaaaagaagtagaatttgttctggatgaaatacagaagtatacacaacagaaagtatcaccttgggtaggcttgcgcaagatcaatatatcctattggggatgggaagacatgtctccttttacaaacacaacactacagtggcttcctggcgaacccaatgattctgggttttgtgcatatctggaaagggctgcagtggcaggcttaaaagctaatccttgtacatctatggcaaatggccttgtctgtgaaaaacctgttgttagtccaaatcaaaatgcgaggccgtgcaaaaagccatgctctctgaggacatcatgttccaactgtacaagcaatggcatggagtgtatgtggtgcagcagtacgaaacgatgtgttgactctaatgcctatatcatctcttttccatatggacaatgtctagagtggcaaactgccacctgctcccctcaaaattgttctggattgagaacctgtggacagtgtttggaacagcctggatgtggctggtgcaatgatcctagtaatacaggaagaggacattgcattgaaggttcttcacggggaccaatgaagcttattggaatgcaccacaatgagatggttcttgacaccaatctttgccccaaagaaaagaactatgagtggtcctttatccagtgtccagcttgccagtgtaatggacatagcacttgcatcaataataatgtgtgcgaacagtgtaaaaatctcaccacaggaaagcagtgtcaagattgtatgccaggttattatggagatccaaccaatggtggacagtgcacagcttgtacatgcagtggccatgcaaatatctgtcatctgcacacaggaaaatgtttctgcacaactaaaggaataaaaggtgaccaatgccaattatgtgactctgaaaatcgctatgttggtaatccacttagaggaacatgttattacaagactttcgattgattatcaatttaccttcacgcttattacaggaagatgatcggcaccatactgccatatactttatagtaaacccaaaacaatctaacaaaaatctgcatatatcaattaatgcatcaaacaactttaatctcaacattacctgtccttgttgatcaacagctggaacaatatctggggaagagacttatattgtttccaagaataatatactggaatacagagatagtttttcctatgaaaaatttaactttagaagcaatcctaacattacattctatgtgtacgtcagcaacttttcctggcctattaaaatacagattgcattctcacaacacaatacaatcatggaccttgtgcagttttttgtcaccttcttcagttgtttcctatccttattgctggaggctgctgtggtatggaagatcaaacaaacttgttgggcttctcgacggagagagcaactgcttcgagaacgacagcagatggccagccgtccctttgcttctgttgatgtagctctggaagtgggagctgaacaaacagagtttctgcgagggccattagagggggcacccaagccaattgccattgaaccatgtgctgggaacagagctgctgttctgactgtgtttctttgtctaccacgaggatcatcaggtgcccctccccctgggcagtcaggccttgcaattgccagtgccctaatagatatttcacaacagaaagcttcagatagtaaagataagacttctggagtccggaatcgaaaacacctttcaacacgtcaaggaacttgtgtctgagaaatggaaaccgctcctgtatattctgtactgttttacttcgggcttctgttaaagctgttctatggccttggattttatggaggcagatctctgtatcatccagagcctgagtacagtttccttccaaatggacaatgacccaggtggccaaagaatgttcatgagttttataaaagtattgatggtcacaggtgataaagtcagtttttaccactatcttaggcttattatagctaacattaaattactctggaaaaagatgtatattgtttcttaatgaagatgaaaaatatgtaattcatataaatcaactgtttatatcccaagactttaaagaaagacattttttaatgcctgaatgatgagaattgtacagtttttgcctcataagcaaacttgaatcacctgtgtatgaacagggaatgaacacattgcaatggctttaaatgctcttttatctcgttgtaaaggtaaggcaagattttgatgtagtaggatgtaggtaatgtatttaaatatttcatatgaccatatcgtgtccaaactcagtctgaggaatgtgacagctttccgcctaactaggaatgcagaccaggaatgagttccaactcattctgtggcaactttcacaggggggttttatttggaatgctcagtgtagaggacattcctgtcatccatgccaactacctaactcgttattcagagctgataggagcatgggaaaagtctgtccagcgattcagttgttcccctccttccaaaaacaggcctccattaccacaacctggaaaagaggccgaatgggttatttttacagcatacaaggtttttgttccagtatgataatttttaattgcctaagaatcattggatcagacctaaatgatccatctgcatttttataagaatggatctttctttgcccttcctctcctagctgctagatcttaactaccttttacaaatgttacaaaatgtattttagaggcgacatctctcaagatgacctgagttccttcctgccaactgttccacctagaatacaagtagagaagagcactggctggcaagcatcaacaggagtcttcttcccaacacgagcgcatccatgtcctgagaaaaagtctgtggtttagaaaatatgtccatggttgcccacagtcagcacactcttagtgactcaaaattctgaattatggcagaaaggaaaaataaaacatacttcacattagaacacagaatcatttacatcctaatactggaccacagttcacctaaagctcagtagcattaacagatatagtttggaatttgcagtttcctcacttcagggtgacaagatatgtataacagtgacaagaaatctccaaagctgctggtatatggatatagctttgttaaatatggaaggtcctttaaatacaattgatgtttagtacctataatatgtacttttccatattcctttggatttctggaaggttatggacactttacctgtttaacagctaatgccatagttacttgcatgcccatggttgtacagtagcagactatgaccctattgtgatattaagtgtttatttcataatgccatttatacatagctgaatttggatgaggattggaatgtccatatataagaggaaatgatccatacaatatgtagttgccatccttaatgtaagatttcctaggttgccatcctaacccatgactatgtcattattttgataattaggcatttatgaattatagtatatattcctcatgttggcatgataattttgctattttccatgcattaaaaataagacaaattccttagagtaattttagtaattttatctataatctgtggggtttttttggagggggaggccactggttgtttctacttccctgtgatattttctctctcattaaaggaatgagctaagtttgtaaatatctcctaaaaacaatcaagtaattttattagcttcttttggaccctctaaatattgacttctctcatgaaaaaataaattgatgaaactaatgattacaaagatataatcattttttaaaaagtgattgcccaatgtatttctctaacaattgtcacaagagaaagcataacaataaaaatacaaaaacatacagatttagatgtaaaatctatataagctatatttttagggaggctaagcagatagtattactgtggaagaattatcaagttttattcacctcaaatcccactgggttcttaaaacttgaaaattcaaattgtagagaattatgagacacaatgtgatgtttagttaaagtcatgctatacctttctgggccacatattgctaactctgtggctaattatgcaattaattctcaacgtatcaaagcttttcactggcagtaaattctttgccctcaggtgaagtggattgaaaagacatcaaggatcaaggataatcactttgaatctgttggtttttccccctacattccagacactttaaatttggatgctttcattttttttaaatcaaaccacacaaatatgcagatactttcccagaatttcgcagttaaatggctgatcctcttgaaaactaaccttaatggaattctaaacatttcagtttagaatgactttgaaaaattccttagatttttaggatgttttattctgccaagtatgaaaaaaaaatggttaaatacaatggagttttaaaaattgagggctggggattctatttgaactagaaaattcctattggaaaagaatttgcacatacttacagattcagctaataaattttaagaggattaggattctcataattctttaaatgaaaatttgttttagtgatacacagagatgcccgatactatagtgtgatgttcagtaggaaaacttcaaatagttcgtatttaaaaaggtaattgatccttgctgtacttcccaacatctcatcttcttttagctgcagcaagatagaggtgactgtatggctacagttcatggtataagagcatttagggtgcacactggcacacaggctggaaaacgggcactggacccagctttcaggtgtgtggtgctgggtaagtttcacctttgaagcctcagccttccatctgtaaagggcggtaatggtgcccacctttcgaggcattgcgaggctagatggtaacacacagaaagctcccacagtgggaccttgatgcagcgtagctggtattaacaaccgtggggacaccaggccactctttttctaccaaatgttttatgaatccacctattaaatttcatccatcttttgggcgcaggtaaaggtcaatcaggtttttcaaaaagactccctgaataactttaagttcctgtatttctaagatatagggatttctacaaaacgactttgacatttagtcaataaaaacttaaacctttcttaaatctatagtgttaggagaggttttcttaaaattactgactgatgacattgagacaagagcatcaatgatcacctttcacgtacaaactaggcaagacagggtcagtgcttacattttgtggttatacatgatacatcttttctcagtgaacataaaactatgatttgaaaggtgtcttatatttaaaaaagattgtaaaatgaaaactgaccaaatgaactaattctacccacctatggtctttttaaatgtcgagtttcaaaacccatttgccgtatactagagtgagcttggaaacttacctgattacaggaattgcttgggttcaggcagattcccactttcacctctagagatttagattcagaaacactggggtaggccctggagagcagtactcttaacaagctcctcagtgcttcttaccattaggcaaattagggaaacactgcattgggtcaaagtgctgcctttaatcgaccattagagggagttctctaaataacaaagttattactctaattcaaaatgctttaaagaattttccaaggaatacaagccatctggttggtgttagttatagcagtgatttcattagagtgtacatttaacattttagttttatcaaaattttttgaaattaagaattagaaccagagctcctatcagtatatatgtacacaggtgtgcatgccagtgttcaaaacagattgtgtaaaagttcaagcccgttttagaaagccaacattttatgttataatatgctgttaatcaggactttattaaataaaaacattggctcttccaacccccac

SEQ ID NO: 22571 - DNA, 419 bp, Homo sapiens
  SIMILAR (2)..(199): 741254mologous to Homo sapiens Filamin-like beta 7 integrin binding protein FLP-1 S3 polypeptide,accession number W19350,Smith- Waterman Score=233.
  misc_feature (1)...(419): n = a,t,c or g
cttgngntcggaaggccccagcaaagtggacatccagacggaggacctggaagatggcacctgcaaagtctcctacttccctaccgtgcctggggtttatatcgtctccaccaaattcgctgacgagcacgtgcctgaaatcaacagcagtgatatgtcggcccacgtcaccagcccctctggccgtgtgactgaggcagagattgtgcccatggggaangaactcacactgcgtccggtttgtgccccaggagatgggcgtgcacacggtcagcgtcaagtacccgtgggcagcacgtcaccggcagccccttccagttcaccgtggggccacttgggtgaaaggaggcgcccacaagggtgcgggcaggaggcctgggcctgggaagagagggagaagcgggaattcccagcttgaa

SEQ ID NO: 22572 - DNA, 444 bp, Homo sapiens
  SIMILAR (4)..(66): 801254mologous to Mus musculus actin binding protein ABP- 280,accession number AF034129,Smith-Waterman Score=87.
gctgccagtctacctgtggactttgcaattgatagtcgagatgccggggaaggcctgcttgctgttgtaaaatgccttcagaaataagtcctagactggactcttgagggacatattggagaatcttaagaaatgcaagcttgttcagggggctgagaagatctgagtacactaggtgcaaacagaactcttggtggaacagaccagccactgcagcagacagaccaggaacacaatgagactgacatttcaaaaaaacaaaactggctagcctgagctgctggttcactcatcccaaggtccgtcccatgacataacactccacacccgccccagccaacttcaatgggtcactttttctggaagataatgatctgtacagacaggacagaatgaaactcctgcggctctttggcctgaaagttgggaatggttgggggagag

SEQ ID NO: 22573 - DNA, 404 bp, Homo sapiens
  SIMILAR (164)..(379): 671254mologous to Homo sapiens filamen B,accession number AF238609,Smith-Waterman Score=248.
actgtcgggagcatttgtgacctgaacctgaaaatcccagaaatcaacagcagtgatatgtcggcccacgtcaccagcccctctggccgtgtgactgaggcagagattgtgcccatggggaagaactcacactgcgtccggtttgtgccccaggagatgggcgtgcacacggtcagcgtcaagtaccgtgggcagcacgtcaccggcagccccttccagttcaccgtggggccacttggtgaaggaggtctccatgaagcatgtaggcaaccagcaatacaacgtcacatacgtcgtcaaggagaggggcgattatgtgctggctgtgaagtggggggaggaacacatccctggcagcccttttcatgtcacagtgccttaaaacagttttctcaaatcctgga

SEQ ID NO: 22574 - DNA, 447 bp, Homo sapiens
  SIMILAR (332)..(439): 351254mologous to Zea mays putative leucyl-tRNA synthetase,accession number AF061510,Smith-Waterman Score=68.
atttatgaaacaaggctaggggaagatgggcagagaaaaaggggacacctagtttggttgtcatttggcaaaggagatgacttaaaatccagaaatgaggtgtagggaattttgcctgccttcctgcagacctgagctggctttggaatgaggttaaagtgtcagggacgttgcctgagcccaaatgtgtagtgtggtctgggcaggcagacctttaggttttgctgcttagtcctgaggaagtggccactcttgtggcaggtgtagtatctggggcgagtgttgggggtaaaagcccaccctacagaaagtggaacagcccggagcctgatgtgaaaggaccacgggtgttgtaagctgggacacggaagccaaactggaatcaaacgccgactgtaaattgtatcttataacttattaaataaaacatttgctccgtaaaaaaaa

SEQ ID NO: 22575 - DNA, 463 bp, Homo sapiens
  SIMILAR (271)..(327): 361254mologous to Murine leukemia virus SU protein,accession number S71538,Smith-Waterman Score=37.
ggtctgaagaaattctgcagtggcgagcagtttcccacttgccaaagatcccttttaaccaacactagcccttgtttttaacacacgctccagcccttcatcagcatgggcagtcttaccaaaatgtttaaagtgatctcagaggggcccatggattaacgccctcatcccaaggtccgtcccatgacataacactccacacccgccccagccaacttcatgggtcactttttctggaaaataatgatctgtacagacaggacagaagtggccactcttgtggcaggtgtagtatctggggcgagtgttgggggtaaaagcccaccctacagaaagtggaacagcccggagcctgatgtgaaaggaccacgggtgttgtaagctgggacacggaagccaaactggaatcaaacgccgactgtaaattgtatcttataacttattaaataaaacatttgctccg

SEQ ID NO: 22576 - DNA, 396 bp, Homo sapiens
  SIMILAR (2)..(100): 1001254mologous to Homo sapiens actin-binding protein homolog ABP-278,accession number AF043045,Smith-Waterman Score=171.
gaaagtccgtgcttggggccctgggctccatggtgggattgtcgggcggtcagcggacttcgtggtagaatccattggctctgaagtggggtctctgggtaagtggacacagctgaccagcatcttctggaggactgaggattacagggctttcagggctgtgtcacgctggatgttggggccttgcctatcctcaatacctttagcttcctggcctcctggccaccctaagccatctctgcgtgctgctggacatttgcagttgcctctgataccagcattgattcattcaggagaccttgagggcagaaaccttatgtgggtattgtgcctaaaacaatgcttggaacgtagtaaacacttagcatatagtgttgactgacctttatagtttag

SEQ ID NO: 22577 - DNA, 772 bp, Homo sapiens
  SIMILAR (78)..(221): 771254mologous to Homo sapiens Human filamin-like beta 7 integrin binding protein FLP-1,accession number W19347,Smith- Waterman Score=191.
  misc_feature (1)...(772): n = a,t,c or g
cacatgccttctggggagacagcaccactgaggattgtggacacagggaccggcacgggtactgttagnatatgcccccactgagttcggggctccatgagatgcacatcaaatacatggccagccacatccttgagagcccactcaggttctacgtaactaccccaacagtgnnaagtgtttctgcatacggtccaggcctcgtgtatggagtggccaacanactgccaccttcaccatcgtcacagaggatgcaggagaaggtggtctggacttggctattgagggcccctcaaaagcagaagagccccggccgcggctgagtcgcgctccgggtgtggacggagccggagcctccccggggctcggtgaggacacagggccccaagccccgggccttcaagtcttgaccgagcgcatccccggcccttctgcgcccacacctgagtttttgtctgtaggagtttccgcagtttgctaagaatcgacatctagaggagtactcaccacttaattgatgatcaatacacgttccttgaaagaaccgatagcatgcgatcgatacagagcatctgcactgggattgtccgccccgcctgtcagggaggcctcgggggctaatggagctgagggtatagtcggccttggaccctcgcttttttcctttcctgtactatgaagataactgccttatctccccctcaggactgttttggggattaaataggacgtttaaattaccaacgctctttgaaataaacatttcaaaatt

SEQ ID NO: 22578 - DNA, 590 bp, Homo sapiens
  SIMILAR (1)..(291): 1001254mologous to Homo sapiens actin-binding protein homolog ABP-278,accession number AF043045,Smith-Waterman Score=503.
atgccggtaaccgagaaggatctagctgaggacgcgccttggaagaagatccagcagaacacgttcacacgctggtgcaacgagcacctcaagtgcgtgaacaaacgcatcggcaacctgcagaccgacctgagcgacgggctgcggctcatcgcgctgctcgaggtgctcagccagaagcgcatgtaccgcaagtaccatcagcggcccacctttcgccagatgcagctcgagaatgtgtccgtggcgctcgagttcctggaccgtgagagcatcaagctcgtgtccatcggtgagttctctggccgggcccaggcgcccactgtggtgccgacccgcccccgcgcgtgcacccctgcggagggcgaggatttcccgcagcgcgcccccacctcggagataagggggagtcgtccccagggagcttttggtatggaggtgaaatacaggcaaggaagctggcaattaaaatacagtgtaatagaagaagacactggagactatggaaccatagaagcattgagtgcatttcctctcaccttcaaccactcaaccttccaagctggggatatctggctacagagccaaag

SEQ ID NO: 22579 - DNA, 611 bp, Homo sapiens
  SIMILAR (195)..(383): 901254mologous to Homo sapiens actin-binding protein homolog ABP-278,accession number AF043045,Smith-Waterman Score=314.
aaataaatgaagcataagcattgaaaatgaggggtcagaggggctttacttacattatactaatgtgaaattccctatgtgagaggtgtagtaattgagttggggtggctacgtggaatagtttataaagggagtttgcatgaattttggcaataagcagaccagcataaataaatggtgcacatttcactttcttttccactctttccagaggcgcaggaattggtgggcttggcataactgttgagggaccatcagagtcgaagataaattgcagagacaacaaggatggcagctgcagtgctgagtacattcctttcgcgccgggggattacgatgttaatatcacatatggaggagcccacatccctggtgagctattcctcagagaggaccccagagaataattgattttgcaggaaaatgggtttgattttggttatctctctgagtggggaaaacaatctgatatttgtaatagctgcaaaaggagagtttttcttagggctacatctccaagattatctcaactcccagtagaaccggtaacatggcaaaaagcatcggcttataattttgactgggaaacagtgtgcgtgggttgaggacct

SEQ ID NO: 22580 - DNA, 2479 bp, Homo sapiens
  SIMILAR (1061)..(2476): 1001254mologous to Cloning vector pBACe3.6 levansucrase,accession number U80929,Smith-Waterman Score=2482.
gtgtgccactgcacctggccattattatggaaaattttaggcatatacaaaagtagagacaggggtgtcttacatgctcatgaacccatgatccagtgacatccgttaatggcattttggaatcatatttcatctgtttttgtcctcaaatgttttgaagcaaatttcagcattacatcatttcactcttaaatatctcagtatggttctctaatagttgaagactccatttacatttatataaggagcataatttacacttgtgtaacccaaaggaatgaccaagcctgtgcttctctccccagatagcaaagccattgtggatgggaacctgaagctcatcttgggtctggtgtggacgctgatcctccactactccatctccatgcccgtgtgggaggatgaaggggatgatgatgccaagaagcagacgccaaagcagaggctgctggggtggattcagaacaagatcccctacttgcccatcaccaactttaaccagaactggcaagacggcaaagccctgggagccctggtagacagctgtgctccaggtctgtgcccagactgggaatcctgggacccgcagaagcctgtggataatgcacgagaagccatgcagcaggcagatgactggctgggtgtcccacaggtcatcactcctgaagaaatcattcacccggatgtggacgagcactcagttatgacttacctgtcccagttccccaaagccaagctcaagccgggggctcctctcaaacccaaactcaacccgaagaaagccagggcctatggcagaggaatcgagcccactggaaacatggtgaagcagccagccaagttcactgtggacaccatcagcgccgggcaaggagacgtgatggtgtttgttgaggacccagaagggaacaaagaggaggcacaagtgacccctgacagtgacaagaacaagacatactctgtggagtatctgcccaaggtcaccgggctacacaaatcaattcgggaggatcgaaacggcagatcgcaaaaaacagtacatacagaaggagacatgaacatgaacatcaaaaaaattgtaaaacaagccacagttctgacttttacgactgcacttctggcaggaggagcgactcaagccttcgcgaaagaaaataaccaaaaagcatacaaagaaacgtacggcgtctctcatattacacgccatgatatgctgcagatccctaaacagcagcaaaacgaaaaataccaagtgcctcaattcgatcaatcaacgattaaaaatattgagtctgcaaaaggacttgatgtgtgggacagctggccgctgcaaaacgctgacggaacagtagctgaatacaacggctatcacgttgtgtttgctcttgcgggaagcccgaaagacgctgatgacacatcaatctacatgttttatcaaaaggtcggcgacaactcaatcgacagctggaaaaacgcgggccgtgtctttaaagacagcgataagttcgacgccaacgatccgatcctgaaagatcagacgcaagaatggtccggttctgcaacctttacatctgacggaaaaatccgtttattctacactgactattccggtaaacattacggcaaacaaagcctgacaacagcgcaggtaaatgtgtcaaaatctgatgacacactcaaaatcaacggagtggaagatcacaaaacgatttttgacggagacggaaaaacatatcagaacgttcagcagtttatcgatgaaggcaattatacatccggcgacaaccatacgctgagagaccctcactacgttgaagacaaaggccataaataccttgtattcgaagccaacacgggaacagaaaacggataccaaggcgaagaatctttatttaacaaagcgtactacggcggcggcacgaacttcttccgtaaagaaagccagaagcttcagcagagcgctaaaaaacgcgatgctgagttagcgaacggcgccctcggtatcatagagttaaataatgattacacattgaaaaaagtaatgaagccgctgatcacttcaaacacggtaactgatgaaatcgagcgcgcgaatgttttcaaaatgaacggcaaatggtacttgttcactgattcacgcggttcaaaaatgacgatcgatggtattaactcaaacgatatttacatgcttggttatgtatcaaactctttaaccggcccttacaagccgctgaacaaaacagggcttgtgctgcaaatgggtcttgatccaaacgatgtgacattcacttactctcacttcgcagtgccgcaagccaaaggcaacaatgtggttatcacaagctacatgacaaacagaggcttcttcgaggataaaaaggcaacatttgcgccaagcttcttaatgaacatcaaaggcaataaaacatccgttgtcaaaaacagcatcctggagcaaggacagctgacagtcaactaa

SEQ ID NO: 22581 - DNA, 9695 bp, Homo sapiens
  SIMILAR (167)..(3409): 721254mologous to Homo sapiens filamin, muscle isoform,accession number AJ012737,Smith-Waterman Score=4267.
  misc_feature (1)...(9695): n = a,t,c or g
ggcggccaggggcgggcggccgcagagcagcaccggccgtggctccggtagcagcaagttcgaaccccgctcccgctccgcttcggttctcgctccttcggcccttgggcctccaaacaccagtccccggcagctcgttgcgcattgcgctctccccgccaccaggatgccggtaaccgagaaggatctagctgaggacgcgccttggaagaagatccagcagaacacgttcacacgctggtgcaacgagcacctcaagtgcgtgaacaaacgcatcggcaacctgcagaccgacctgagcgacgggctgcggctcatcgcgctgctcgaggtgctcagccagaagcgcatgtaccgcaagtaccatcagcggcccacctttcgccagatgcagctcgagaatgtgtccgtggcgctcgagttcctggaccgtgagagcatcaagctcgtgtccatcgatagcaaagccattgtggatgggaacctgaagctcatcttgggtctggtgtggacgctgatcctccactactccatctccatgcccgtgtgggaggatgaaggggatgatgatgccaagaagcagacgccaaagcagaggctgctggggtggattcagaacaagatcccctacttgcccatcaccaactttaaccagaactggcaagacggcaaagccctgggagccctggtagacagctgtgctccaggtctgtgcccagactgggaatcctgggacccgcagaagcctgtggataatgcacgagaagccatgcagcaggcagatgactggctgggtgtcccacaggtcatcactcctgaagaaatcattcacccggatgtggacgagcactcagttatgacttacctgtcccagttccccaaagccaagctcaagccgggggctcctctcaaacccaaactcaacccgaagaaagccagggcctatggcagaggaatcgagcccactggaaacatggtgaagcagccagccaagttcactgtggacaccatcagcgccgggcaaggagacgtgatggtgtttgttgaggacccagaagggaacaaagaggaggcacaagtgacccctgacagtgacaagaacaagacatactctgtggagtatctgcccaaggtcaccgggctacacaaagtcacagtcctctttgcaggacagcacatctccaagagcccatttgaagtgagtgttgacaaggcccagggagatgccagtaaagtcactgcaaaaggtccagggttggaagctgtagggaacatcgccaataagcccacctactttgacatctatacggcaggagctggtgtgggtgacattggtgtggaggtggaagatccccaggggaagaacaccgtggagttgctcgtggaagacaaaggaaaccaggtgtatcgatgtgtgtacaaacccatgcagcctggccctcacgtggtcaagatcttctttgctggggacactattcctaagagtcccttcgttgtgcaggttggggaagcctgcaatccaaatgcctgccgggccagtggccgaggcctacaacccaaaggcgtccgtatccgggagaccacagatttcaaggttgacaccaaagctgcaggaagtggggagctcggtgtaaccatgaagggtcctaagggtctggaggagctggtgaagcagaaagactttctggatggggtctacgcattcgagtattaccccagcaccccggggagatacagcattgccatcacatgggggggacaccacattccaaagagcccctttgaagttcaagttggccctgaagcgggtatgcagaaagtccgtgcttggggccctgggctccatggtgggattgtcgggcggtcagcggacttcgtggtagaatccattggctctgaagtggggtctctggggtttgccattgaaggcccctctcaggcaaagattgagtacaacgaccagaatgatggatcgtgtgatgtcaaatactggcccaaggagcctggcgaatatgctgttcacatcatgtgtgacgacgaagacatcaaggacagcccgtacatggccttcatccacccagccacgggaggctacaaccctgatctggttcgagcatacgggccaggtttggagaaatctggatgcattgtcaacaacctggccgagttcactgtggatcctaaggatgctggaaaagctcccttaaagatatttgctcaggatggggaaggccaacgcattgacatccagatgaagaaccggatggacggcacatatgcatgctcatacaccccggtgaaggccatcaagcacaccattgctgtggtctggggaggcgtgaacatcccgcacagcccctacagggtcaacatcgggcaaggtagccatcctcagaaggtcaaagtgtttgggccaggtgtggagagaagtggtctgaaggcaaatgaacctacacacttcacggtggactgtactgaggctggggaaggtgatgtcagtgttggcattaagtgtgatgcccgggtgttaagtgaagatgaggaagacgtggattttgacattattcacaatgccaatgatacgttcacagtcaaatatgtgcctcctgctgctgggcgatacactatcaaagttctctttgcatctcaggaaatccccgccagccctttcagagtcaaagttgacccttcccacgatgccagcaaagtgaaggcagaaggcccagggctcagcaaagcaggtgtggaaaatgggaaaccgacccacttcactgtctacaccaagggggctgggaaagccccgctcaacgtgcagttcaacagccctcttcctggcgatgcagtgaaggatttggatatcatcgataattatgactactctcacacggttaaatatacacccacccaacagggcaacatgcaggttctggtgacttacggtggcgatcccatccctaaaagccctttcactgtgggtgttgctgcaccgctggatctgagcaagataaaactcaatgggctggaaaacagggtggaagttgggaaggatcaggagttcaccgttgataccaggggggcaggaggccaggggaagctggacgtgacaatcctcagcccctctcggaaggtcgtgccatgcctagtgacacctgtgacaggccgggagaacagcacggccaagttcatccctcgggaggaggggctgtatgctgtagacgtgacctacgatggacaccctgtgcccgggagcccctacacagtggaggcctcgctgccaccagatcccagcaaggtgaaggcccacggtcccggcctcgaaggtggtctcgtgggcaagcctgccgagttcaccatcgataccaaaggagctggtactggaggtctgggcttaacggtggaaggtccgtgcggaggccaaaatcgagtgctccgacaatggtgatgggacctgctccgtctcttaccttcccacaaaacccggggagtacttcgtcaacatcctctttgaagaagtccacatacctgggtctcccttcaaagctgacattgaaatgccctttgacccctctaaagtcgtggcatcggggccaggtctcgagcacgggaaggtgggtgaagctggcctccttagcgtcgactgctcggaagcgggaccgggggccctgggcctggaagctgtctcggactcggtaacaaaagccgaagtcagtattcagaacaacaaagatggcacctacgcggtgacctacgtgcccctgacggccggcatgtacacgttgaccatgaaggatggtggcgaactcgtgccacacttccccgcccgggtcaaggtggagcccgccgtggacaccaacaggatcaaaggctttggaccaggaatagaagggaaagaatgtgttccgggaagctaccaccgactttacagttgactctcggccgctgacccaggttgggggtgaccacatcaaggcccacattgccaacccctcaggggcctccaccgagtgctttgtcacagacaatgcggatgggacctaccaggtggaatacacacccctttgagaaaggtctccatgtagtggaggtgacatatgatgacgtgcctatcccaaacagtcccttcaaggtggctgtcactgaaggctgccagccatctagggtgcaagcccaaggacctggattgaaagaggcctttaccaacaagcccaatgtcttcaccgtggttaccagaggcgcaggaattggtgggcttggcataactgttgagggaccatcagagtcgaagataaattgcagagacaacaaggatggcagctgcagtgctgagtacattcctttcgcgccgggggattacgatgttaatatcacatatggaggagcccacatccccggcagccccttcagggttcctgtgaaggatgttgtggaccccagcaaggtcaagattgccggccccgggctgggctcaggcgtccgagcccgtgtcctgcagtccttcacggtggacagcagcaaggctggcctggctccgctggaagtgagggttctgggcccacgaggcttggtggagccagtgaacgtggtggacaatggagatggcacacacacagtaacctacaccccatctcaggagggaccttacatggtctcagttaaatatgctgatgaagagattcctcgcagtcccttcaaggtcaaggtccttcccacatatgatgccagcaaagtgactgccagtggccccggccttagttcctatggtgtgcctgccagtctacctgtggactttgcaattgatgcccgagatgccggggaaggcctgcttgctgttcaaataacggaccaagaaggaaaacccaaaagagccattgtccatgacaataaagatggcacgtatgctgtcacctacatccccgacaagactgggcgctatatgattggagtcacctacgggggtgacgacatcccactttctccttatcgcatccgagccacacagacgggtgatgccagcaagtgcctggccacgggtcctggaatcgcctccactgtgaaaactggcgaagaagtaggctttgtggttgatgccaagactgccgggaagggtaaagtgacctgcacggttctgaccccagatggcactgaggccgaggccgatgtcattgagaatgaagatggaacctatgacatcttctacacagctgccaagccgggcacatatgtgatctatgtgcgcttcggtggtgttgatattcctaacagccccttcactgtcatggccacagatggggaagtcacagccgtggaggaggcaccggtaaatgcatgtccccctggattcaggccctgggtgaccgaagaggcctatgtcccagtgagtgacatgaacggcctgggatttaagccttttgacctggtcattccgtttgctgtcaggaaaggagaaatcactggagaggtccacatgccttctgggaagacagccacacctgagattgtggacaacaaggacggcacggtcactgttagatatgcccccactgaggtcgggctccatgagatgcacatcaaatacatgggcagccacatccctgagagcccactccagttctacgtgaactaccccaacagtggaagtgtttctgcatacggtccaggcctcgtgtatggagtggccaacaaaactgccaccttcaccatcgtcacagaggatgcaggagaaggtggtctggacttggctattgagggcccctcaaaagcagaaatcagctgcattgacaataaagatgggacatgcacagtgacctacctgccgactctgccaggcgactacagcattctggtcaagtacaatgacaagcacatccctggcagccccttcacagccaagatcacagatgacagcaggcggtgctcccaggtgaagttgggctcagccgctgacttcctgctcgacatcagtgagactgacctcagcagccttgacggccagcatttaaggccccatctggccgaggacggagccctgtctcctgaagagggttgcccaacaaccacattggcatctccttcatcccccgggaagtgggcgaacatctggtcagcatcaagaaaaatggcaaccatgtggccaacagccccgtgtctatcatggtggtccagtcggagattggtgacgcccgccgagccaaagtctatggccgcggcttgttcagaaaggccggactttcngaagatgtctgacttcatcgtggnacacaaggggatgcaggttatggtggcatatccttggcgggggaaggccccagcaaagtggacatccagacggaggacctggaagatggcacctgcaaagtctcctacttccctaccgtgcctggggtttatatcgtctccaccaaattcgctgacgagcacgtgcctgggagcccatttaccgtgaagatcagtggggagggaagagtcaaagagagcatcacccgcaccagtcgggccccgtccgtggccactgtcgggagcatttgtgacctgaacctgaaaatcccagaaatcaacagcagtgatatgtcggcccacgtcaccagcccctctggccgtgtgactgaggcagagattgtgcccatggggaagaactcacactgcgtccggtttgtgccccaggagatgggcgtgcacacggtcagcgtcaagttaccgtgggcagcacgtcaccggcagcccctttccagttcaccgtggggccacttggtgaaggaggcgcccacaagggtgcgggcaggaggccctggcctgggagagaggagaagcgggagtcccagctgaagttcagcatttggacccgggaagcaggcgctggaaggcctctccatcgcttgttgaagggccccagttaaggccgagattacattcgatgaccataaaaatgggtcgcgcggtgtatcttatattgcccaagagcctggtaactacgaggtgtccatcaagttcaatgaatgagcacatcccggaaagcccctacctggtgccggtcatcgcaccctccgacgacgcccgccgcctcactgttatgagccttcaggaatcgggattaaaagttaactcagccagcatcctttgctataaggttgaatggcgcaaaaggcaagattgatgcaaaggtgcacagcccctctggagccgtggaggagtgccacgtgtctgagctggagccagataagtatgctgttcgcttcatccctcatgagaatggtgtccacaccatcgatgtcaaagttcaatgggaagccaggtggtttgaaaccccttcaaagtgcgcgttggggagcctgggacaagcggggaaccctgccctggtgtccgcctatggcacgggactcgaagggggcaccacaggtatccagtcggaattctttattaacaccacccgagcaggtccagggacattatccgtcaccatcgaaggcccatccaaggttaaaatggatttcccaggaaaacacctgaagggttacaaagtccatnttacaccccccatggcctccctgggtaaactaccctgantccagcgttcaaatacgggttgggcccaaaccacatccgtggggcagtccccttccaaggcccaaggtgacaggcccagcngttctagtttagcccctggcctccagcccaaacgagaaccctcatcccatccctggtggagtccagtgacccaggtcgtcttacagagaacctgctatagccgcccatttcccaaaggaatctttgggacgcccagccaaggtgacctcctaagggggcaagggctctcaaaaggcctttgtgggccaagaagagttccgttcctggtggactgcaagcaaaactggctccaacatgctgctgattcggggtccatgggcccaccccacccctgcttggaggtctccatgtaagcatgtaggcaaccaagcaatacaacgtcacatacgtcgtcaaggagaggggcgattatgtgctggctgtgaagtgggggggaggaacacattcctggcaggcccttttcatgtcacagtgccttaaaacagttttctcaaatcctggagagagttcttgtgggttgctttttgttgcttgttttgtaatttcattttatacaaagccctccagcctgttttgtggggctgaaaccccattcctataaatattgctggtgtaaaatgccttcagaaataaggtcctagactggactcttgagggacatattggagaatcttaagaaatgcaagctttttcagggggctgagaagatcctgagtacactaggtgcaaaccagaactcttggtggaacagaccagccactgcagcagacagaccaggaacacaatgagactgacatttcaaaaaaaacaaaactggctagcctgagctgctggttcactcttcagcatttatgaaacaaggcttaggggaagatgggcagagaaaaaggggacacctagtttggtttgtcatttggcaaaggaagatgacttaaaaatccgcttaatctcttccagtgtccagtgttaatgtatttggctattagatcactagcactgctttaccagctcctcatcgccaacacccccatggttctgtgggccttcttacacttctcagagggcagagtgggcagccggggcaccctacaggaaattcagaggggcagagtgggcagccagggccccacattgtctcttcaagtacctgtccccttcgctctgggtgattattttctttgcaggaatcaccacacggaggaccatcccggcaagtcatgggttttgctttaagttttccaaagtccgtttcagtccctttcctttggtcttgaagaaattcttgcagtgggcgagcagttttcccacttgccaaagatccctttttaaccaacattaggccttgtttttaacacaccgctccacgcccttcatcagcctgggcaagtcttaccaaaatgtttaaagtgatctcagaggggcccatggattaacgttnacgccctcatcccaagggtccggtcccattgacataacactccaacacccggccccagccaactttcatgggggtcactttttcctggaaaataatggatctgtaccagaccaggaccagaatgaaacttctgcgggtcctttggccctgaaagttgggggaatggttggggggagagaagggccagccagcttatttggtggtctttttcacccattggccagaaaccagtgagagcctccgtggtgccagaaatcccagaaatgaggttgtagggaaattttgccctccctcccctgcagaccctgagctggcctttggaatgaagggttaaagtgtcaggggaacgttgcctgagccccaaatgtgtagttgtggtctgggcaggcagacctttaggtttttgcttgctttagtcctggaggaagtgggccactcttgtggcagggtgtaagtatctggggcgatgtgttggggggtaaaagtcccacccctacagaaaagtggaacaagcccggagcctgtatgtgaaaggaccacgggtgttgtaacgctgggacacggaaagccacaactggaatcaacacgccgactgtaaattgtagtcttataacttattaaataaaacgatttgctccgtaaaaaaaaaaaaaaaaaaaaaaaaagggcggccgct

SEQ ID NO: 22582 - DNA, 520 bp, Homo sapiens
  SIMILAR (1)..(327): 951254mologous to Escherichia coli K12 methylmalonyl-CoA mutase (MCM),accession number AE000375,Smith-Waterman Score=537.
atgggccaggatggacacgatcgcggcgcgaaagtgatcgccagcgcctattccgatctcggtttcgacgtagatttaagcccgatgttctctacacctgaagagatcgcccgcctggccgtagaaaacgacgttcacgtagtgggcgcatcctcactggctgccggtcataaaacgctgatcccggaactggtcgaagcgctgaaaaaatggggacgcgaagatatctgcgtggtcgcgggtggcgtcattccgccgcaggattacgccttcctgcaagagcgcggcgtggcggcgatttatggtccagccagcatcatgattaatgaagccacgctggcagaaagtattcgccgcttacgtcagggtgagcgtgccacactcgcccaggccatgacgctggtggaaagccgtcacccgcgtcatcaggcactaagtacgcagctgcttgatgccattatgccgtactgcggtaacaccctgcgactgggcgttaccggcacccccggcgcggggaaaa

SEQ ID NO: 22583 - DNA, 3147 bp, Homo sapiens
  SIMILAR (357)..(52): 901254mologous to Mus musculus CCT (chaperonin containing TCP -1) epsilon subunit,accession number Z31555,Smith-Waterman Score= 467.
ttaaatcagacatccccccccctccacgcagaggcgtgacagctcctcaccatttgtccccttgtgcaaacagtcgatgccaagagcagggttcatctccttcacctgtctggctcggacttcggtcatagtctggatgggattcatgccactgttttcagagagggccatggggatgacctccagtgcgtcggcaaacgctctcatggcatactgttctaaggtggggcacttatccgcctcttggctaactgccaggggcacaggatatctcagcagccctcctccatacaccacacgattatcgcggatgaggttccggatgacacacaaagcatcgtgaaaggatcgtttcgctccaaccactcctgtggttccatctccaatttcatcatcctgagacttggacagttccaccatcagcttggcaatctgatgatcaacatccatcatgcttaagatggtggccccatcattagttacagtcacatctccatccttatccaccatcatcttatcaagcccatttggtccaagtgatgttctcattgtatttgctacagcctttgctgccattatatgagacattgagcggaggcttctttccaaggatccatgtggctgggtcatcttggacacaaaatcctccagccccagtgaagtttcagatgactgcagctctggaccaacatcttgatggtcacttcctgagagacccgctgccatcgcatttgttgtttgcggactgatagtctggttgtttttgccatcaatacaaagaaatattcctgtcgttacccaacccgtagaaattttaccctccacccacaggaagcgggatacgcggctactttttgtggtctgttcaatgatgtgggcggcgaataatctgccagcgtactcatggcgacgactccggcggttgagctggaattgcaaattcttaatgccatcttccttggtattctctgtggtatcggcatgctttattttcaggacttgatgccagtcgtcggctggagtatgctgattggcggtctgattctgttgcctttttatgccagacaaggaacaaactttgtcgttaacggcagtttgattctggcgtttttttatttggtggtcattggtacgtccctgacatttagtctgtaccctctcctgttctgagcatgtgagagggaaagcagctgccatctgaggagggttgcaggggcaggttggttttccggggttgtgacggagagattgtataaggaggctgctgttctggactgagttccagagggtcagggaaggaagagagggagagccaggcagtagcaggtagcctgggaggctaaggctggaagacctggtctcatccaatactatggcgttcccgcacggtggctccggggtctcccctgcggccggcacgacatccgccttctgagtttgtccttgagtggaaatcacaaacatcattttcagcaaaaatgaacaagtggggttctttaaattgtaaatgtcttcagaatccttgaccatgactttggagcccagcgtggtttttgctgtctgaatcaggggttcggtgtcctttatgtcaacaaggacgctatcgctgatcttgtccaggtgttcaatagcaacacgagcagcctgctcatagccatcggctattctgattgggtgaatgcctcggtctagcaattgctccgcttcttctaacaaggcaccagccaggactgatggagggagctgcctgtagggcccaggccaggctctgttgtaggcactaaaggtacagcagggaatgaagccaagctcgtgctcttgagacacagataagagaaaggtgggtacagctccattacagacactggtcagagaggtgacatcttccaggcacactggctgagcaagtggcccaacaagcctctctgtcagtgtgggcagagctcgtgtctgcagactctgtgtgctcactgctatccccgccacagaggtcatcctgtctggaaggtccacatagtagggcaggtcttcctcacttagatcacttcttggtgggcatttctctggttccttctctacttcagcccagatggcttctcgatccacggtggtgaactgtcctcgaggcaggcgttcctcaggggcaccctcctgcggctcagattcaccacacgcctctttgcacgtgggcttcttcctgttaaaccaacggtgtaaatcctctggctggggttccttgaagaagtccctttttcctggtggcttatttttaggccaggtgccaatgcccgcgttgttgaccagcacatccaggcctccgtactccttgagcagaaagttgcgaagtgcatggatgctctgagggtcattgatgtccagctggtggaagcgaggaatcaggccctcagcctgcagcttctgcactgccgcaaggccccgtgcctcgtcccgtgcagtgagcaccacatcccctgagaattgctgacacaggtcacgagtgatcgcaaagccaatgcccttattagctccagtcaccagtgcaatgcgattgttcagccactcaattaaattccttctggcctcgtcaatgtagggcttgtctgcaggtgagcaatcttctctcttccgatgcacgaacccatgagtctgcccagaaaatgttttaatttgatattcaactttgcagtgttctttcaacttctgagtcagcaaagatacccattgcatgcgcattaaccaggtgagaacctggtcggcgcgccaccacagggccccgcggtagtttaccacgccagagaaaccacgcagaacctcgtccaggacaaaaaacgtggcccagcgcggatgtggctgggctttaacccaagctgctctctcttcccagaaggctcttctctgacttgctgccaaaacacaaagtcgcttggaggtgaaggcaaatattagttcagctggcaagctcctctccacgtcctcatcaaagcccccagctccatgagcttctgggctgttcctgtggatttctgcactctctgtgttgaaacatctgcttccagcacagacaggattgtcccattgatagttattctgtgggtgggggtgcatggcttttctacttgatgaagagattttgagaggtgacagcat

SEQ ID NO: 22584 - DNA, 1593 bp, Homo sapiens
  SIMILAR (1)..(618): 981254mologous to Escherichia coli similar to melibiose carrier protein,accession number L10328,Smith-Waterman Score=1063.
atggtttacaaaatgcgttatcggtctcagcacccctatagcatcaaggaaaagcagatgaagagtgaagtgttgtccgttaaagagaaaattggttatggcatgggagacgccgccagccacattattttcgataacgtaatgttatatatgatgttcttttataccgatatttttggcattcctgccggttttgtcggaaccatgtttttggtcgctcgtgcactggatgcgatttccgatccttgcatggggttgttggccgatcgaacgcgctctcgctggggtaaatttcgtccgtgggtactgtttggcgcactgccattcgggatcgtctgtgtactggcctatagcacgccagatctcagtatgaacggcaaaatgatctatgcagcaattacttacaccctacttaccttactttataccgtcgtcaatatcccttactgcgcattgggtggtgtaatcaccaatgacccgactcagcgtatctcgctgcaatcctggcgttttgtgctggcgaccgcgggaggcatgctttctactgttctgatgatgccactggttaatttaattggcggtgataataaaccactcggtttccagggcgatttaagcccgatgttctctacacctgaagagatcgcccgacctggaccgtacgaaaacgacgttcacgtagtgggcgcatcctcactggctgccggtcataaaacgctgatcccggaactggtacgaagcgctgaacaacacatggggacgcgaagatatctgcgtggtcgacgggtggcagtcattccgccgacaggattacgccttcctgcaagagcgcggcagtggcggcgatttatggtccagcacactcgcccaggccatgacgctggtggaaagccgtcacccgcgtcatcaggcactaagtacgcagctgcttgatgccattatgccgtactgcggtaacaccctgcgactgggcgttaccggcacccccggcgcggggaaaagtacctttcttgaggcctttggcatgttgttgattcgagagggattaaaggtcgcggttattgcggtcgatcccagcagcccggtcactggcggtagcattctcggggataaaacccgcatgaatgacctggcgcgtgccgaagcggcgtttattcgcccggtaccatcctccggtcatctgggcggtgccagtcagcgagcgcgggaattaatgctgttatgcgaagcagcgggttatgacgtagtgattgtcgaaacggttggcgtcgggcaagtcggaaacagaagtcgcccgcatggtggactgttttatctcgttgcaaattgccgggggggcggatgatctgcagggcattaaaaaagggctgatggaagtggctgatctgatcgttatcaacaaagacgatggcgataaccataccaatgtcgccattgcccggcatatgtcgagagtgccctgcatattctgcgacgaccgcctatgcatcgtgttcctagaaaccctaaggtcaacctgcttcctggaaccgctatggccaatctgctgtcctaggaccgcaatggccacgctgggtcctaggaaccgctatg

SEQ ID NO: 22585 - DNA, 1153 bp, Homo sapiens
  SIMILAR (593)..(742): 621254mologous to Escherichia coli chromosome arginine transport ATPase,accession number U65074,Smith-Waterman Score=134.
ttacgccagcgtactcatggcgacgactccggcggttgagctggattgcaaattcttaatgccatcttccttggtattctctgtgtatcggcatcttattttcagacttgatggtccggctatagcgtgccgcggcgcggggcggcgcgggtgtgtggtgtgtcgcctcttctgtgtggctgtcgggttgtgtcctgtggttcgtggcggtgttgttgtcctgtgcattggtgttcggtaaggtgtctgtttagctctcgtctgtggtggctgtgtggcgggttgtgttggtctctcgttattggggggtgttggtgtggagttcagtgcccgtgttcgggatcgcctttgatgtccggtggagctgaagagatcgcccgcctggccgtagaaaacgacgttcacgtagtgggcgcatcctcactggctgccggtcataaaacgctgatcccggaatggtcgaagcggtcagggtgagcgtgccacactcgcccaggcctgacgctggtggaaagccgtcacccgcgtcatcaggcactaagtacgcactgcttgatgccattatgccgtactgcggtaacaccctgcgactgggcgtaccggcacccccggcgcggggaaaagtacctttcttgaggcctttggctgttgttgattcgagagggattaaagtcgcggttattgcggtcgatcccgcagcccggtcactggcggtagcattctcggggataaaacccgcatgaagacctggcgcgtgccgaaacggcgggttgccaaactggtcgttaacgtgagctttaactgctacgtctgtgcgaccattacctgaccttccggtatctccagactggtaatcgtcgcgaattaacatctgcagcgccgtcaaatttacgtcccgggctataggcacaccgtcggtagtgcaatttgtgtagctcagcgtggtgtcggctacctttgtgcagcggtgttcgtctttctgcagcagcacgtacgttaagcagattgaagcagcaaagccgaaagaaaaaccaaccgccttctcgatggtaatggcctgtacctttatgtccctgtacgggtggttgtacacttttacaccggctcccgcggtgtcggcgcgtagtggcaccacccggcttgcccccttcat

SEQ ID NO: 22586 - DNA, 1188 bp, Homo sapiens
  SIMILAR (625)..(924): 981254mologous to Escherichia coli K12 putative oxidoreductase, Fe-S subunit,accession number AE000372,Smith- Waterman Score=519.
atgaggaccggaattttagctccagatcgactgcaagaacaaaccagcaatcccaagaggccccacagaccctctgaaggaagcggacttctcctgcaggaccggaagagacaccccaaatactgtgagtgccccagctgcggaagtgggaaagggagaccctcctctcccaagcacacacctccactggagaagctgaaggtctgtttgcgggagaagtttccgactttacttggaactgagtcaagttacatttgtggacaaaaccttcagcgtttctatgaagacgtattcatggggagaacatgtttcttgagagaagaaggcgactatgaggactttagttgccaagtatatggggtaggtttggcagtgacatcagcgattggagccatgctcctggaggctgagaaaggaggactgcttgaggtcataagttcaagatcagaatctctacaaaaagatttaaaaagaaaaaatagaggaggaggaggaggaagaggaggaggaggggaagaggaagaagaagaggaaggagaagaagaagaaggaggagaaggagaagaagaaagcagggaggatagggagtgctggttgggagctctgaacatttttggttgtgtgtgtgaaaacgccctatgtgttggcgcttgccccgtgggggcgctgacgatgggcgagcaggtggtgcagaccaattctgcccgttgtattggctgtcagagttgcgtcagtgcgtgcccgtttggaatgatcaccattcagtcgttgccgggggatacccgacaacaaattgtgaaatgcgatctctgtgaacagcgggaagaggggccagcctgcgttgaatcttgcccaacacaggcgctgcagttgcttactgaaagagaactcaggcgagtccgccagcagcgtattgttgtcagcgaaatctccgcgctgaaaggcgcggagaatctattagattgcccaaccacccgcgtaaaatgcgaccagtgcggcagtaatgatcaccgtaccaatattcagcttttgccattcgcgtgcaaagacgcggcctacgaccagtgtcacaaagcccagcataataccggtaacgatattacaagtcagaacgatgaacacggcacacaccaggccagccatagcgtcaataaaatcattgaaatccagcttcgagacgttacttaa

SEQ ID NO: 22587 - DNA, 3012 bp, Homo sapiens
  SIMILAR (481)..(1101): 1001254mologous to Escherichia coli K12 putative dehydrogenase,accession number AE000371,Smith-Waterman Score=1088.
atgggtgagccggggccggatggtcgccgtcgtcctcgtccggtagcgggttcagagtttgaattgcccgccgatgttctgattatggcctttggtttccaggcgcatgccatgccgtggttgcagggcagcggaattaaactcgataaatggggcctgattcaaaccggtgacgtcgggtatttacctacccagacgcatctgaaaaaagtctttgctggtggtgatgcagttcatggcgcggatctggtacagcgactggacagcatcagtgcgccggtgatgtgccatcagtgtgaaaacgccccttgtgttggcgcttgccccgtgggggcgctgacgatgggcgagcaggtggtgcagaccaattctgcccgttgtattggctgtcagagttgcgtcagtgcgtgcccgtttggaatgatcaccattcagtcgttgccgggggatacccgacaacaaattgtgaaatgcaatcgctgtgcactggaagagatcctgcgtcagggtcgcgagatgatccaatggtcgtcaccgaaaccgcaaaatggtgactggcacatcggtcgcggcgtcgccattatcatgcagaaatcgggtatcccggatatcgatcaggctaactgcatgatcaaactggaatcggacggcacctttatcgttcattctggcggtgcggatattggtactggtctggatactgtagtgacgaaactggcagcagaagtgctgcactgcccaccgcaggacgtgcatgttatctccggtgataccgatcatgcgttgtttgataaaggcgcatatgcctcgtccggtacttgcttctcgggtaacgcggcgcgtttggcagcggaaaatctacgggagaaaattctgttccacggcgcgcaaatgttgggtgagccagtggcagatgttcaactggcaacgccgggcgtcgtgcgcggcaagaaaggcgaagttagtttcggggatattgcccataaaggcgaaaccggcaccggctttggttcactggtgggaactggcagttatatcacgcctgatttcgccttcccgtatggcgcaaacttcgctgaagttgccgtcaacacgcgtacggaggcggaattagggcatgtcggtaatgaaaccgtttatgaggaagcgctggcgggctatcactataccgatcctgaccaggcggctgaatttgttgaacgtacgggctgtgattcattggctgtcgccatcggcaaccagcatggggtttatacgtcagagccacaattgaactttgaggtcgtcaaacgcgtacgcgatgccgtttctgttccgctggttttgcacggtgcatcggggatcagtgatgccgacattaaaactgcaatttcgttgggtatcgcgaaaatcaacattcatacggagctctgtcaggccgcaatggttgcagtgaaagaaaaccaggatcagcctttcctgcatttagaacgtgaagtacgtacgctgacattggcaccgattgtgactcgcggctatgaatccagtaaacgagatgtgcggattgaaggcacgggtatcttaggtggtatgaactatcgggtcagcgaagggccgttacaagggatgaatttctttcttgctgccgataaagggcgggaaaagcgcgatggcagtacgctgggcgatcgcctgaattactgggatgtgaaaatgagtattcagtatgactttatgctgaagatcgaagatactaacgtttttcgactgctcctgctgggaagcctgttcagccttagcgccagggcctgtacggaatgcgaggttgactggtctacaatcacggcctcgaatttaccgttccgcttccagcaggctccaggcccacggaactcgctggggcgctataaattcaatatgccgagttcagaggccatttatttgcatgacacgccgaaccacaatctgttcaagcgtgatacacgcgcattgagctcaggctgtgtacgagtgaataaagcttccgatctggcgaatatgctgttgcaggatgcaggctggaatgacaaacgtatttctgatgcgctgaagcagggtgatacacgttacgtcaatattcggcagtcgattccggtgaatctctactacctgacggcctttgttggtgcagatgggcctgcaggcagcgagttgccacatcgagcttcaattcgagtctggtaccggtcgcacgcattacttctcgcgccatcattgcgagaagacctatctgagcaatttgctaaaggcgtgcagctgcataacgaaaaagatctcactaagcctgcggtgctggaagtgattaccccaacgcaggttcgtctgaccatcagcgaagggcgttatcatcaggtgaaacgcatgttcgccgccgtgggtaaccacgtggttgagctgcatcgtgaacgtattggcggtattacgctggatgctgatttagcccccggtgaatatcgtccgttaactgaagaagaaattgccagcgtcgagcccgttgtgaccacccgacagcattcgtcgtttgctattgtttttatccttggcctgctggccatgttgatgccgctgtcgattgatatgtatctgcccgcgctaccggtaatttcagcgcagtttggcgtaccggcgggcagtacgcagatgaccctcagtacttatattctgggctttgcgttggggcagttaatctacgggccgatggcagacagcttcgggcgtaagccggtggtgctcggcggtacgctggtgtttgccgccgccgcggtggcgtgtgcgttggcaaacaccatcgatcagctgattgtgatgcgtttcttccacgggctggctgcggctgcggccagcgtggtcattaacgccctgatgcgcgatatttacccgaaagaagagttctcgcggatgatgtcgtttgtcatgctggtgacaaccattgcacgggatcctctagagttacctgacagcatctattcatattttctgttttttcttatatga

SEQ ID NO: 22588 - DNA, 837 bp, Homo sapiens
  SIMILAR (93)..(524): 961254mologous to Escherichia coli K12 putative oxidoreductase, Fe-S subunit,accession number AE000372,Smith- Waterman Score=736.
gatatgttaaactctgtttgatacgaaggcatcgtgatgaaaccgttaattatcgttaatccggctgactgtattggctgcccgtacttgtgaaagtagcctgtgtggtcgctcacccttcagaacaggagttgaatgccgatgtctttttaccccggctgaaggtacagcgactggacagcatcagtgcgccggtgatgtgccatcagtgtgaaaacgccccttgtgttggcgcttgccccgtgggggcgctgacgatgggcgagcaggtggtgcagaccaattctgcccgttgtattggctgtcagagttgcgtcagtgcgtgcccgtttggaatgatcaccattcagtcgttgccgggggatacccgacaacaaattgtgaaatgcgatctctgtgaacagcggtaagaggggccagcctgcgttgaatcttgcccaacacaggcgctgcagttgcttattgaaagagaactcaggcgagtccgccaacagcgtattgttgtcaccggtgagaatcctctttgaaagaaaactgccccccttaagggcgcggagaaatctattaaattgccccacccaccccggcggaaaatgcgaccagtgcggcagtaatgatcaccgtaccaatattcagcttttgccattcgcgtgcaaagacgcggcctacgaccagtgtcacaaagcccagcataataccggtaacgatattacaagtcagaacgatgaacacggcacacaccaggccagccatagcgtcaataaaatcattgaaatccagcttcgagacgttacttaacatcagcaaacctacgtacatcagagcgggtgcagtggc

SEQ ID NO: 22589 - DNA, 349 bp, Homo sapiens
  SIMILAR (349)..(2): 911254mologous to Escherichia coli f445,accession number L10328,Smith-Waterman Score=542.
aaaccagcaccgctgcgtgaatgttgcgcgaggccagaatagcaatgatgaagaagccgaggatacccagaagtacgctgtgagaagtcagattaccgatgctcaccagcgtttccgggttagcgacaatcacacctgcgtttttcagccccatcatgccaatgaacagaccgataccgctggtaatacccacacgcagactcaccggaatgttggctatcatccagtagcgaacgcggaaaatcaagattgcgcccatcccgacctgccacggcaagcccatcgcctgtacaacgacaaaagcgaagaacgcattcaggcccatagcgggtgccagtgcaactggcag

SEQ ID NO: 22590 - DNA, 2240 bp, Homo sapiens; identical to SEQ ID NO: 10697
  SIMILAR (886)..(1419): 991254mologous to Escherichia coli RhsB core protein with unique extension,accession number U00039,Smith-Waterman Score=933.

SEQ ID NO: 22591 - DNA, 2319 bp, Homo sapiens
  SIMILAR (1453)..(2301): 991254mologous to Escherichia coli similar to,accession number D90863,Smith-Waterman Score=1493.
atggctctgacatctggagttcacactggtgagaaaccctacaaatgtgctcaatgtgaggaagccttcagcaggaagtcagaactcattatacatcagataattcatactggggagaaaccgtatgaatgtacagaatgtgggaaaacattctctcgcaagtcacaactcatcatacatcagagaacccacactggagagaaaccctataaatgtaccaaatgtggaaaatccttctgtcagcagtcacatctcattggacatcagagaattcacacgggagaacaaccttatctgggacttagtgtggctgagcgacctaaggagtacgaagacgaccgggctctcaagatggcggccccatgcggaaacagctccagggagcagccatgttgcttcctgaacaaagcctctgaagatgcggaacgggcaaaaccgcccagtacggaacggcgcagcctcgggagcccgcctccactgctgatacccaggcaaacaggatttggagtggacctccagcaaactccaacagacctgcagctgagggtcctgactgttagaaggaaaactaacaaacagaaagacatccaccgggatcctctagagtcaccccagtggcgtaccgtgacgtgtgccgacctcgtggtttctaagtggccgctgttggcaaccgtagccggccatgtaaacttctcggttaagaagatggagtgtatactctggtttactgccgagccctggggggggccgagcgccggtgtcttggaagggttcccgggcgagaaacgtgcctcaaagagccacgagagaggtcccccaaatctggtgtcaaccgcgggggacccccctcacagaaagcggaggacaaccacacccactcacttcatcacggaagaacggcctctacacaacagaggagggagtgacagacaacgccgagcgtgtgatggacccacccccaaaagagaagtgacgccaccaccgaactatatcaaaaacggccagaaaaaggaaaacaaaaaaggaaagatttctgattttgactacttaaggggctttatttacatacaaggcaacccttttgctagccagattcgtgagggcagcatctgcatccttgaagagctctgtgattgctcttctctgtatgccagatctaacagtgggaaccgcagtcactcaactacaaaatttaaatgcaatgggaataattggatcccgaggtggcaacgagccaagtggcggcactcaaccatcaaaggcaaggatcctttcagcaagcaagagacctgctcaagcccaattacgtatacaccacttccatttgatgatggaatgctgctgtgcgtgccccactttatggctacatgggtcagaaagcacccagttcatgatagacagttcaggttgcatggccaaataagagagctaaactgggatgtggtccggcccgaacaatttacgggcgttgcgacaaattgcagcggcattacttatccgcaaggtggttggctgtgcccagcagaactgacccgtaatgtgctggaactggcgcaacagcagggtttgcagatttattatcaatatcagttacagaatttatcccgtaaggatgactgttggttgttgaattttgcaggagatcagcaagcaacacacagcgtagtggtactggcgaacgggcatcaaatcagccgattcagccaaacgtcgactctcccggtgtattcggttgccgggcaggtcagccatattccgacaacgccggaattggcagagctgaagcaggtgctgtgctatgacggttatctcacgccacaaaatccggcgaatcaacatcattgtattggtgccagttatcatcgcggcagcgaagatacggcgtacagtgaggacgatcagcagcagaatcgccagcggttgattgattgtttcccgcaggcacagtgggcaaaagaggttgatgtcagtgataaagaggcgcgctgcggtgtgcgttgtgccacccgcgatcatctgccaatggtaggcaatgttcccgattatgaggcaacactcgtggaatatgcgtcgttggcggagcagaaagatgaggcggtaagcgcgccggtttttgacgatctctttatgtttgcggctttaggttctcgcggtttgtgttctgccccgctgtgtgccgagattctggcggcgcagatgagcgacgaaccgattccgatggatgccagtacgctggcggcgttaaacccgaatcggttatgggtgcggaaattgttgaagggtaaagcggttaaggcggggtaatctgctctcgcagtg

SEQ ID NO: 22592 - DNA, 2919 bp, Homo sapiens
  SIMILAR (1917)..(1399): 991254mologous to Escherichia coli ferrienterochelin receptor protein,accession number M13748,Smith-Waterman Score=924.
ttaatatccctgctcgaaatagctttcgagaataataaccgcagaggcagagtcaactttgcctttgttgagcgcccgatagccgccctgttcaaacagaccggaacgggcttccacagtgctaagacgctcgtcatggagctttacttcaacaccgaaacggccatgaatacggttggcaaatttacgcgctctggcagtcaatggttgctcggtgccgtccatattcagcggcaaaccgacgatgatttcgtccggggtgaatctgtcgatatcggttttcggttcgccgaagacgataccgtgttcagccagcgctctggcttcttcgataacttttgctacgtgcagcagtgctttagaagggatacagccgacgttcaggcaaacaccgccaagggtgttgtaacgttctacgattacggtttccagaccatcaaacagcgccacgcccaatgcccctgaaacggcaaacacgcgcgccaggccaatcgcccccagggcttccagccgatccgcatcctggacaattttagcttccgttgttaagggggcgatttgcgcgctgaaactgtgagcggcaatggcatgacaaacggcctcgattttctccgccggaaattgctcgaactcttcacggagcaggcgacgcgtctcttctgccgccaggattgaagaacgctgcctttgcggatgatttttcgccaggctcacaatatcgtgaaaataacaggcggttaaaatcaccagcatatcgacatcgtcatctgccgccagcttctgtgccgtagcccagacgcggcgaaaatgacacacgtcatgggccgcgtcctggtgctgatgatggtttttcaaccagttttcgaactgtgcctgccagtgttgtaagtccatacgcgcttgattttcctcggtggtaatgtgttcatccatcatcgtttctgagcaagaaatcacctcgcgactgaaagcaacagtcgcatcacaggttgctgattcagccggattaaacagccgtaaaatcacttcttgtcggtcttcagctttcttaagtgcgcttatcaggcatcccactgggggcattttcaacaaactataactttccggcacgttgaatccggctttgttgagcttcatcacatcccatgggattttgttgtaacactgtaccactgcgaccatcgcggcctgccgctggcccttatcagcacggaagggacaacagcgtggtacgcagaatacgatgaatggggtaacctgctgaatgaagagaacccgcatcagctgcagcagcttatccgcctgccggggcagcagtatgatgaggagtccggcctgtattacaaccgccaccgctattatgacccgctgcaggggcgatatatcactcaggatccgattggggctcatataccacgtacgtcccggctcgttataggtatacgccccggcaccggcgatatagttggcccctgccaaatcgcccgtggtctgggcattacccgcacgccacaaacgtttgtcgaacagattgtccacgccgccggtcagactgacattcttcgtcacatcccaggtcgcgctcaggccaacaatgctgtaaggactaatttctttggtttccggtccaaccgctggctgacctttatagttgtacttcttcggctgctgcttgccgtaccaggtgaaggtcgtttgcatcgacaaatcttcccgtgcctgccagctcagcgttgagttcaacgtatactccgggatgatcgacaaacggtcgcccgtggttttgttttcactcttcagcatataagtgatgttattggtccacatcaccgtttcgctaaccggtacgtttaacgatccttccagaccttcaaccaccgctttcggcacgttatcccactgatagagatcggtgcctctaaaggtaaaggtttcgcaggtaccgttaagcgctggaacttccgtacccaggacgctactcacggtaactccttgtctcaccgcgttccgggttctatcggtcagaaccagactccgggcagaggttatttttttccgagccgcatcaaggcgatatgcggtgatggggccagcgtggaaaatcgctttgccgttgagatcgtaagggatcggacgtttcagttcgatcaaacggcggtgacaaacgtcgcggcaggtcaccagcgtaccggtcaggtagatcacatcgccgacgcgaatatcttgcagatcttcagctttgatcggggttgtcaggatctttttcataacgcggttaccatcggcttctacaccgacgactttgccatcgcgctgtacgaggttatcgacgcggatcccggtaattaactgcgcgcccgcttcttcggcctgctccatcagccaggcatcaaatttactgcgcaaaacggagtaagaacgctgggatggcgaggtttcgtcaccattgcagtagtccatagtcatcgctgacttttccgtcataaacgcgagtttttcatgggtgatcaggcgttctacgggggcggagtcggcgaaaccaggaataatgtgttccagactgtgggcatagagacgcccgccggtgacgttcttggcacctgcggaattgccacgctcgataactaacacttgcgcaccttcgcgggcgagcaccagtgcggcaaccgaaccggcaagccctgcaccgacgatgatggcgtcaaagatatcttcggacataagagctccggcgtcgccaacaatgccgtaatccgcgtactggaagatcggcgcatttttatctttattgatggcgaaaatggtttgcgacgcgttagcgccaaccatgtgctggatctgcccggagatccccaccgccaggtacagttcaggtttcagcatcaggttggagataccgacatagcgttcgtgctccat

SEQ ID NO: 22593 - DNA, 2415 bp, Homo sapiens
  SIMILAR (314)..(376): 421254mologous to Escherichia coli rhsA,accession number U00039,Smith-Waterman Score=41.
atgacccaaagtaacgggcagacgttggttgttgataccgatgaacagccacgcactgacgccagcgcagaaggcttagcccgtttaaatccttcatttgatagtctcggttctgtgacagcgggtaatgcatcatccataaacgatggcgcagctgcggtaatgatgatgagcgaagccaaagcacgagcgttgaatttacccgtgctggcccgcattcgcgcatttgccagcgttggtgtagatccggcattgatgggaattgcgccggtgtatgcgacccgccgttgcctggagcgtgtaggctggcagttggctgaagtcactccgccagaagaagcgaaagagatcccacaggttgcaggctctctggaagaagcactgaacgaactggatctggaccgcgagttcctgaaagccggtggcgtgttcactgacgaagcaattgatgcgtacatcgctctgcgtcgcgaagaagatgaccgcgtgcgcctgggatcggtggcaagcacatcacgccgggatgcgacgcaaatgcgtcttatccggcctacacgggttgatgatgtggtaggccggagcagtgtggcactggaaaaccagggcaaatgggcgcaggcggcagcacttcagcggcaacgactggcgctggaccccggcagcgtatggattacttaccgactttcgcaggatctctggcaggccggacaacgcagccaggccgatacgttaatgcgcaatctggcgcagcagaagtcgaacgacccggagcaggtttacgcttacgggctgtacctctctggtcatgaccaggacagagcggcgctggcgcatatcaatagcctgccgcgtgcgcagtggaacagcaatattcaggagctggttaatcgactgcaaagcgatcaggtgctggaaaccgctaaccgcctgcgagaaagcggcaaagaggcagaagcggaagcgatgctgcgccagcaaccaccttccacgcgtattgacctcacgctggctgactgggcgcaacaacggggatcctctagagtcaccagcagcagcaagctgcatggttgcggcattggcggattaccatgtgccggaaagaccgtgcagctctattcaagaaggtggtccccacaaagacagcgggaagaaatgcggggcccaggaagagcactccagagcgagactcaccgaagagttatcggtcaccggtcaccggagtacagtacagcacacggcaggctgacggcgttcacaccacgcagcgaatctggatatccgcatccgtatgccacagacccggcaggtaacgctgcccgacccggagctgcacccggacagcaccctcagcatgtggccggataccgtatcgcccgtgacgcgcactatctttaccggtatgaccgtcacggcaggctgacagagaaaaccgacctcatcccggaaggggttatccgcacggatgatgagcggactcaccggtaccattacgacagtcagcaccggctggtgcactacacgcggacacaatatgaagagccgctggtcgaaagtcgctatctttacgacccgctgggccgcagggtggcaaaacgggtgtggcggcgtgaacgggacctgacgggctggatgtcgctgtcacggaaaccgcaagtgacctggtacggctgggacggcgaccggctgaccacaatacagaacgacagaacccgcatccagacgatttatcagccggggagcttcacgccactcatcagagttgaaaccgccaccggtgagctggcgaaaacgcagcgccgcagcctggcggatgcgcttcagcagtccggcggcgaagacggtggcagtgtggtgttcccgccggtgctggtgcagatgctcgaccggctggaaagtgaaatcctggctgaccgggtgagtgaggaaagccgccgctggctggcatcgtgcggcctgaccgtggagcagatgcaaaaccagatggacccggtgtacacgccggcgcgaaaaatccacctgtaccactgcgaccatcgcggcctgccgctggcccttatcagcaaggaagggacaacagaatggtgcgcagaatacgatgaatggggcaacctgctgaatgaagagaacccgcatcagctgcagcagcttatccgcctgccggggcagcagtatgatgaggagtccggcctgtattacaaccgccaccgctattatgacccgctgcaggggcggtatatcactcaggatccgattgggctgaaggggggatggaatttttatcagtatccgttgaatccagttacgaatacagatcctctggggttagaagtttttcctagaccattccccttgccaattccatggcccaaaagtcctgcacaacagcagcaatggtacccaacgttttgctgctga

SEQ ID NO: 22594 - DNA, 4770 bp, Homo sapiens; identical to SEQ ID NO: 4188
  SIMILAR (1525)..(2382): 981254mologous to Escherichia coli K12 putative general secretion pathway for protein export (GSP) (TYPE II TRAFFIC WARDEN ATPASE),accession number AE000409,Smith-Waterman Score=1388.

SEQ ID NO: 22595 - DNA, 2926 bp, Homo sapiens
  SIMILAR (1434)..(1808): 961254mologous to Escherichia coli RhsA protein,accession number D90709,Smith-Waterman Score=669.
aggggagcgcgcgcggggaacggctatgtcgcgttcgcattctcgaatgccggtatcgccttccggatcgcggtgcggtgccacttcgcgaaacgagatgcgcatacggggcgcggatcgctgagcagggccgtggccggtgcggagtcgtgggcggatcgcgagagcaatacgattggcgatgcgattccattccaggttccttgcggatcctatgcgaaggcgatggctttgatgggggacagagaccagtgcgaagtggtgccagtcgcatgcgagtgaatggcgggggatgccatacgcgcggtcgcgtccctatgaaagaaaacgatcaggcgctccacagccgccacgtttgacccgatccgcgttagatggctatgacgcacgacgtgtcattacgctccggcggcccagaaaccgatgccattgtagtgcacatcacccagcatccagcccagcagcgtcgtcgccacgatagaaaccagcaccgctgcgtgaatgttgcgcgaggccagaatagcaatgatgaagaagccgaggatacccagaagtacgctgtgagaagtcagattaccgatgctcaccagcgtttccgggttagcgacaatcacacctgcgtttttcagccccatcatgccaatgaacagaccgataccgctggtaatacccacacgcagactcaccggaatgttggctatcatccagtagcgaacgcggaaaatcgtcagtaacagcagacctatcgcgccccagaagattgcggcccatcccgacctgccacggcaagcccatcgcctgtacaacgacaaaagcgaagaacgcattcaggcccatagcgggtgccagtgcaactggcaggttagcaaacagtcccatcataatactgccgaatgcagcgatcagacaggaatttggtattacgctcgatcctgaagaggtattcacgtttcaaggtgtaaaactgtacgaatatcgatattttcctgactgtgtacgtagcagaaacgaggccggcatcttggtggaacaaatcttatccaccctgttttccgtgggggagcatttctccttgaagagagcgcctttctttaaagttcccagtttgcggtcgttttacgcctttgggggtttaacaactggggtcgtgagaaggaatgggaaccacggtgtaaacacgccggcgcgaaaaatccacctgtaccactgcgaccatcgcggcctgccgctggcccttatcagcaaggaagggacaacagaatggtgcgcagaatacgatgaatggggcaacctgctgaatgaagagaacccgcatcagctgcagcagcttatccgcctgccggggcagcagtatgatgaggagtccggcctgtattacaaccgccaccgctattatgacccgctgcaggggcggtatatcactcaggatccgattgggctgaaggcggggatggaatttttatcagtatccgctgaatccggttcagtatatagattcaatgggactggcatcaaaatatggacacttaaataatggcggatatggagcgagacccaacaaaccgcctacgcccgatccaagtaaattgccggacatagcgaaacaattaagactgccatatcctattgaccaggccagtagtgcgcataatgttttcaaaacattcttcagagcattaagcccttacgactacacactgtattgcaggaagtgggtaaaaccaaatctgacttgtacgccacaggatgattcccagtatccagggatggatacaaagacagcaagtgattacctgccacagacaaattgccggtaccgagctcgattgtatcatgtactactggggttgttccatgagttgtttgccagtgggtatttgcgtggccacctgacattagccatcgcagaactggaaagtggtgatgaccactccgctcaggcggtgcatacgaccgttagccagagtctggaaaaagccattggtgctggtgaattgtcgccgcgtgaccaggcgctggtgaccgatatgtgggaaaacctgtttcagcaggcgtcacagcagtcggataaggcgttcacgccgcatccggcaaacactgcgagagcagattaccccgccttaaccgctttacccttcaacaatttccgcacccataaccgattcgggtttaacgccgccagcgtactggcatccatcggaatcgagaaagcactcatcgataaggtcgcggcgacaacagttgcgacggtggtacgcataactttcataatgtctcctgggaggattcataaagcattgtttgttggctacgagaagcaaaataggacaaacaggaagaaaaatgccccgcttacgcagggcatccatttattactcaaccgtaaccgattttggccaggttacgcggctggtcaacgtcggtgcctttgatcagcgcgacatggtaagccagcagctgcagcggaacggtgtagaagatcggtgcaatcacctcttccacatgcggcatctcgatgatgtgcatgttatcgctacttacaaaacccgcatcctgatcggcgaagacatacaactgaccgccacgcgcgcgaacttcttcaatgttgaatttcagtttttccagcaattcgttgttcggtgcaacaacaataaccggcatatcggcatcaattagcgccagcggaccgtgtttcagttcgccagcaagcgtaggcttcagcgtgaatgtaagagatctctttcaacttcaatgcgccttccagcgcgattgggtactgatcgccacggcccaggaacagcgcgtgatgtttgtcagagaaatcttctgccagcgcttcaatgcgtttgtcctgagacagcatctgctcaatacggctcggcagcgcctgcagaccatgcacgatgtcatgctcacgcattaccat

SEQ ID NO: 22596 - DNA, 783 bp, Homo sapiens
  SIMILAR (28)..(510): 881254mologous to Escherichia coli purine nucleoside phosphorylase,accession number M60917,Smith-Waterman Score=702.
ctttatgactgccctcgactctagaggatcaccgatttcggcgtgaagaaaattatccgcgtgggttcctgtggcgcagttctgccgcacgtaaaactgcgcgacgtcgtatcggatgggtgcctgcccgattccaaagttaaccgcatccgttttaaaggccaagcctttggcggtatcgctgacttcgccatggggcgtaccgcagtagatccaggtaaagcactgggtattaatgctcgcgtgggtaacctggtctccgctgacctgttctactctccggacggcgaaatgttcgacgtgatggaaaaatacggcattctcggcgtggaaatggaagcggctggtatctacggcgtcgctgcagaatttggcgcgaaagccctgaccatctgcaccgtatctgaccacatccgcactcacgagcagaccactgccgctgagcgtcagactaccttcaacgacatgatcaaaatcgcactggaatccgttctgctgggcgataaagagtaattgtgtttcgctgcaaggcgattgccttgtgaagccggagcgggagactgctccggctttttagtatctattcatttttctctccagcttgaatattttcgctatacttttcagtgaaatgtgttaataaatctattcaagtatctattcacgaatctattcattaatgagcgagctgactgatcttttactgcaagggccgcgttctgccccggaattgcgccagcgtctggcaatcagtcaggcgacgttctcacgccttgttgccag

SEQ ID NO: 22597 - DNA, 759 bp, Homo sapiens
  SIMILAR (759)..(1): 981254mologous to Escherichia coli selenocysteine synthase,accession number M64177,Smith-Waterman Score=1251.
cttgacgccggagaaactcaccagactgacgcccgccgcaatcaactcctgcggcattggctctttcggcaaaccgtactggctaagatcgaccagcgagccactgcctaaatcagtcactacgggaacatccagctctttgccgagcgccaccagttccgcttcatctatcgctttggtgaacccctgaatgctgtagttactggtatgtactttcatcaacagtgcggtattttcattcaccgcctgacgataatcattcgcgtgcgtgcggttggtggtccctacttcgtgtagggtgcagcctgcctgacgcataacatcgggaatacgaaacgcgccgccaatctccaccagttcgccgcgagaggccggcacctcttttccgctggcagtggccgccaacatcaataacaccgccgccgcattgttattgacgatacaggcatcttccgcccccgtaatacggcacagcagctgcgccagcgcccgatcgcgatgtccgcgtccggcgtcgtccagatcatactcgagggtcactggcgaacgcatagcctgcgcaacggcttccaccgcggcttccgcctgtaaagctcgcccaaggttggtatgcagcacggttcccgtcaggttgatcaccggacgcagcgcgctctgcgcttctttcgtcaaccgggcatcgacttcttgcgcccagttttcacaccacgcaggcagcgtctggctgccacgaatcacttctcgcgcttcgtcgagcat

SEQ ID NO: 22598 - DNA, 2807 bp, Homo sapiens
  SIMILAR (219)..(839): 901254mologous to Escherichia coli purine nucleoside phosphorylase,accession number M60917,Smith-Waterman Score=928.
cggcacgctgcccgggtgtggagcaatgcacacatgccctagcggcccagcgactcatctcgtccgccgtcgcatcgtccgcctccccgcttgtgtcgtcaccagagcgaacgtgccgactccctcccgacctgtcaatgcgacaatcggcgcgtttcactcgggatagatggcatcccaggggcggcgtctgtcagcacagtacccatggtcaccgtttcaatacgcagacccgtcccgtacccaccgttcccggtaggctggtcttcaccggtacctccaaagcgcccaaaatttccgtaatgggtcccggtatgggtatcccgtcatgctccatctccgccaaagaactgatcaccgatttcggcgtgaagaaaattatccgcgtgggttcctgtggcgcagttctgccgcacgtaaaactgcgcgacgtcgttatcggtatgggtgcctgcaccgattccaaagttacccgcatccgttttaaagaccatgcctttgccgctatcgctgacttcgacatggtgcgtaacgcagtagatgcagctaaagcactgggtattgatgctcgcgtgggtaacctgttctccgctgacctgttctactctccggacggcgaaatgttcgacgtgatggaaaaatacggcattctcggcgtggaaatggaagcggctggtatttacggcgtcgctgcagaatttggcgcgaaagccctgaccatctgcaccgtatctgaccacatccgcactcacgagcagaccactgccgctgagagtcagactaccttcaacgacatgatcaaaatcgcactggaatccgttctgctgggcgataaagaagaagatcgggtgattcgctttggtaaagcacgggcaacgcgatatgcactgctgcgtccttatcgcggaattgagcgtattcccgtctggcgggtggacgataccggaaaggcgcataaattcgccgacatccggttgtgctggccgcagggaagttgtctggatgttgcgaaagcgcgagaagtgattcgtggcagccaaccgctgcctgcgtggtgtgaaaactgggcgcaagaagtcgatgcccggttgacgaaagaagcgcagagcgcgctgcgtccggtgatcaacctgacgggaaccgtgctgcataccaaccttgggcgagctttacaggcggaagccgcggtggaagccgttgcgcaggctatgcgttcgccagtgaccctcgagtatgatctggacgacgccggacgcggacatcgcgatcgggcgctggcgcagctgctgtgccgtattacgggggcggaagatgcctgtatcgtcaataacaatgcggcggcggtgttattgatgttggcggccactgccagcggaaaagaggtggtggtatctcgcggcgaactggtggagattggcggcgcgtttcgtattcccgatgttatgcgtcaggcaggctgcaccctacacgaagtagggaccaccaaccgcacgcacgcgaatgattatcgtcaggcggatttccagtttgacgatttcgtcatggcgttcacgcagaatatcaacggcccgacgcagaatacgcgagcgctccatggcggtcataaacgcccagattttttgcccctgctgggcgcttttcacggcgcgatcgacatcctagcgcccggcggcctgcacggatacagtcttccatccagtttctttcacgcactagcattgagtgcggcttttccaggcaaacggtgcaagctgtctgtgcatctaccattctggggtctgaaggatggtggccctcttctcacagctccgctaggcggtgccctagtagggattgtgggaggggtggggggctccaacctcacatttcccttccacacaaacttcctcaatgtacgcttcgttattaggcggatatcccatcggcaccaccacttttaccgtatcgccaaattgctgatgaacggcgcgcaaggcagcaatatgctcattgctgcggtcgccggagttccccaccagaatggtcattttcccttcacggttgccgatcgtttcgccatcgtattgagcgaagggtccatccgcgtcgggaagaacagcagttcgcccggcacctttgggtgcgttttggcaaaaaagctcaaatcgccgcgggtggcaaatacacagccgactcgcttttgcgccaggcgacgtagcggggacaataagcttatatctcaagcccactggaaagctccatacggtctgccgccccagatatgccagaaaaactggctgggcttaatgccaccactcaacagagccagccacagtgtgggattgaactgaccgtggaagaaaaaacgctgctgacggttagcttttgctttcgcgatgaccgcttccgccagcgattttttcccagggaaaaattgcacagaaagcgccggacagctatcacttaagccgtcgtccttgccaacaaccataaactcgcgcgcgtgctcgctcgtcgcggccagcgcgtcattaaaaaaccgcaaaacggttcggttatggtgaggtgatatccaatcccagtatgtgaatcagtacagtcaagtccaattacgtcatgagtaatcctcccctctacaaagagaaaaatatctgatataagggtccaaatatgtctgctgcgcgaccattgcaacaagcgcagggattaggcagtgggcaaatcccttcaataaagtgatgtggtctgtactaccgccagaatataaaaacgcaaggtcgctttgtcgttcatatagagtcggccggcaggcatgacaagacgtgcga

SEQ ID NO: 22599 - DNA, 705 bp, Homo sapiens
  SIMILAR (1)..(321): 991254mologous to Escherichia coli K12 putative tRNA synthetase,accession number AE000389,Smith-Waterman Score=538.
atggaaaccgtggcttacgctgattttgcacgtctggaaatgcgcgtcggaaagattgtggaagtgaaacgccatgaaaacgccgacaagctgtacatcgtacaggttgatgtggggcaaaaaacgctgcaaaccgtgaccagcctggtgccgtactacagcgaagaagagctgatggggaaaacggtggtggtcttatgcaatctgcaaaaagcgaaaatgcgtggtgaaacgtcggaatgcatgctgttgtgtgcggaaaccgatgacggcagtgaaagcgtgctgttaacgccggagcggatgatgcctgcgggcatcggatggcgacgtcgtatcgccatccgatttgatattacgcctcttcgacacttactcgcatgccgccagcccttacgcgccgcttttgatcaccagttcacactgttcaatgatatgctggctgatatctgccacgcgttcgataaaggcgctggaacaggaaaaaaaattcccatgtgtcgtgggagggacgccgtgggagatataccatggggtatacagttagcagccgtgtatgctctttgtgacttgagtcccagcaatccagcagaaatttccaagatcctggaagcttggcggagagaggcctccaaaagcgttccgtctgcgattgtcagctgcctagaggaagtcagtgccctgagcacagaggagcttggctga

SEQ ID NO: 22600 - DNA, 1599 bp, Homo sapiens
  SIMILAR (750)..(1): 1001254mologous to Escherichia coli short internal similarity to phospho-N-acetylmuramoyl-pentapeptide-transferase of E. coli,accession number M87049,Smith-Waterman Score=1294.
gcgcttaataaagcgagcaactttccaggcacgcttaatgcaatatccatagaggaagaatgctagcaaaaagagcaccagcatgacccactccgggacaaaatgagaatattctgccagcacgccaatggaagcgagcagtgctgcggcaagggtaatcagcacaaacgcctgacgggaagtaaacccggcacgcatgatcaaatggtgaatatgctgacggtcaggagagaatgggctcatgcctttacgcaggcgacggtacataatcgccaccatatccattagcggaatggcgattatccacaaagcggtaaccgggctgatgggatgggttttgccctgggtcgtttcgagcaggatccagataacggtaaaaccaatcagcgtactgcccgcatcacccataaagactttgtagcggcgacccaggataccaaggttaagcatgatgtatggcaggatggcggcgatcatcgcaaagcaccagattgcgaggctggtttgcccgtcgaaccacaaaatcataccgattgctgcaaacgagacgcaggacaacccgcccagcaagccatcaatgccatcaaccatgttgaacgcattaatggccgcccagacggcaaatagcgtcaggaagtaaccaaacggtccgagcaccatctcccaggagccaaagatataacccaggctactgagataaagcttgccgaacaccatcataacaatgccaacagcggcctgtatggtggcaacagcaaagccgatgcggcgttgctggatgaaatgattaacaacatccagtttatccccggagactttacccgcgcggtcaatgacagcgtgaagcttattgccgaaaccgcgccgctctatgaagatgtcatctggcgaacgcatctccagccgcaggatcccacgctccttctcctgactcactgagtaaatacggaagaggtggggctcctttgccgctctgcttgctcctctgatagctacacctccaaggacttcacagccactgtctccactgatatcgagttctagtccttcctcaccagcctctcctgttggccaggtttctcccttccgtgaaaccccagtgcctcctgccatgtctccatggccagaggaccccagacgtgcctctcctccagatccttctccatctccatctgcagcttcagccagtgagagggtagtgccgtctcctctgcagttctgtgcggccacgccgaagcacgcacttcctgtgcctggccgactcccaccctgtgcatctggccacgcaatgccctgctggcgggcaaaaataaagtaaccaagatcgcactgacgaagtagcgccagataggcgtcaaattccagtttttcgctcagaatttgtagattttcttcgctgaataactccagccccgcctgacgaacttcctcaatgtacgcttcgttattaggcggatatcccatcggcaccaccacttttaccgtatcgccaaattgctgatgaacggcgcgcaaggcagcaatatgctcattgctgcggtcgccggagttccccaccagaatggtcattttcccttcacgttgccgatcgttcgccat

SEQ ID NO: 22601 - DNA, 1455 bp, Homo sapiens
  SIMILAR (1191)..(340): 991254mologous to Escherichia coli biotin sulfoxide reductase,accession number U00039,Smith-Waterman Score=1485.
  misc_feature (1)...(1455): n = a,t,c or g
ctagaaattggtcatgagctttctttgaacattgctctgaaagcgggaacgctttctcataaagagtaacagaacgaccgtgtagtgcgactgaagctcgcaataccataagccgtttttgctcacggatatcagaccagtcaacaagtacaatgggcatcgtattgcccgaacagataaagctagcatgccaacggtatacagcgagtcgctctttgtggaggtgacgattaccaacatgttcggtaatactttcctgcacagcttcgacaagatccgatgttgccagcggttaatgggcagatggttcacctcggtgaatcgcagaatccgcagctgcatcagcatggtggtattntggtggaaaatagccgccagctcgcggattttcgctgcgccaacaccacaaatctctgctggccattcggcggttttcgctattccgtcactctcgcccagcaaataagaggcgaagacggcataacctgtggtgcaacgcgccagaaacgcttcgtcgtgccaaccattttccaccagcgtatgggcgatccccagcatcagcgcaacatcggtgcccatgtgcggtgccacccactccattttatcgccaaagaaatcgacggtttccgatcgcattggatcaatgcagatcagctttttcccgctgtcacgcagtgcagaaaagtaagaaagcccctgctcatcggatgcattccacgcaattttcagcgtattgagtgggttagcactccacagcaccacgacatcgctatgttccagcaccagcggccaactggtctgctgttgataaacttcactaccacccacgacatacggcatgatcgcctgtgccgcgccggtcgaataatcccccagatgcccggtataaccgcctgccagcgccatatagcgttgtaataatgtcgaggccttatgcagcacgccgtttgaacgccagccgtaggaaccagcaaaaatcgatgccggaccataagcctcacgaatgcgtttatgttgttggtgaataagatccagcgcctcatcccaactcacgcgaacaaattcatcctgcccacgaatgccttgcgggttttccggtgacgcaagaaagccttttcgcaccattggaaatcgtacccgcgtattgctgtgaacctggtcgcgaaccgcgctctgcaaggagttttccattcgcgccacgcgagctaacgtgagtacaactcgagctcggtaccgggctatgacgcgagacgctggatctggtcgtatctgccggatgggcgtgagcacgccggatatctggggcggtaaccgcgacaccggagacaggaacgttatgccagctcgattcgggcgctgaatgccactaccgggagactggcgtggagctaccatagcgttcaccacgacctgtgggacatggatcttccaggcacagccgacgctggcggacat

SEQ ID NO: 22602 - DNA, 5921 bp, Homo sapiens
  SIMILAR (998)..(729): 971254mologous to Escherichia coli permease,accession number M58000,Smith-Waterman Score=491.
  misc_feature (1)...(5921): n = a,t,c or g
tcacggaagagatactgtcgacatcgaataatcccccagatgcccggtataaccgcctgccagcgccatatagcgttgtaataatgtcgaggccttatgcagcacgccgtttgaacgccagccgtaggaaccagcaaaaatcgatgccggaccataagcctcacgaatgcgtttatgttgttggtgaataagatccagcgcctcatcccaactcacgcgaacaaattcatcctgcccataggttttctcgccgctttttagcggcaaaatcgggtaacgtgtcggtgcccgcgcccgcaggcaggcctttatcaaaactccaccggtaagcatcagcgagttaatcggcacaccgcgacggctgacgcgagtcaaaaacttcggcgcattaccctgcacagaaaaggccaaacagcatgcggctgttagagtaaaccccgctgttatacactgacagcgatgctaccagaatgacgaagttcagcgcagaagctaccacgttgctgtcgagattatggaaaatcatcacaaacgggctactgttggatttcacttccacccacggatagagcgccagtaaaaccaccagtgaaccgatgtaaaacagcaggatgcgatacaccacctgatttaccgcttttggaatgcttttttccggatcgcgcgcttcagcggcagtaatcccaatcagctccagaccgccgaaggagaacataattaccgccagcggacaaaatcagcccattccagccggtggcgaagaaaccaccgtagcgccagaggttgtcgatactggctttctcgccgccgtgaccagaaaacagcagccacaggccaaagccgatcataccgatgattgccagcactttaatcaacgcaaaccagaactcggtttcgccatataagcgcacgttcaccaggttaacggcgttgatgataataaagaaggcggcagcccaaatccacgttggaacatccgggaaccagtactggagaaaattagattttaattctccaggtggttcttcaccagtagaaaattctgattgttccacaaatagcagattatctttctctcctgaaaatatcctcatccaaaaccaagacattgtgagagaagctgcagtgcagggagatgggcagaagcaaaggcagcctcaggccacagatctggactccagtgggacacatggcagtgagatgcttccagccacagaagtgactgtgtcaggagggttttctgttgaagaaaccagctgtggagacacagggagatctggtggtgaggccctggctgttgcaaatgattctaccagcacaccacaaaatgctaatggactttggaaattgaaatctacaactcccggtggtgctttgcctgagtgttttggcaccacagacactactttttcttcagcattttgcagaaaacatggagagacacaggatacctcccaaagtagcctgcctggtaccttacattgttacacaggcattcgagaggggggagacgacactgaggtagagagtgaggcatttagctgcagtgaggggagcgaacagcaagatgctcctgatgactcacagaaaaatttaggagacacagatgctgctgtagccgaggtgagaccttccttagaggtaggttatttgacgtcagctctgcaagattttaacataagtactttttctgagctggatagactttccacatcagaggttgtgatgtttcttgagagctgtcagttaggggattatagttcaggggactctgtttctgaatgttctagtaaaggaaccctaagtaaagaaatgaacaaagaattaaaggcaagtgaaataggagaaaaatacagaaagcaaccctgtgaggaagaaacacttggaacctgtgaagagtggattgaatcagaggaagatgattattcgttaaaaaatacaagtcagctcactcagtgttctttggaaactctgtctgaggttctgaccaagattaggcaagaacttcaaacaaattctgaagattgcaatggtaaagatactggcagtttattgctcttaaatgtaaataacaacatgaccactgagaatttaaaagagaaaagtccatttcgggaaacgactggctcctcatcacatgcttcagaaccaaccccacaagcagctgccttggacactgagggcagctctcccatcagcggtatgcctcagaatgaaaaccctcagagcagaccagaggcccgttcagatgcaggcaggcaaaccgatggtggggaagaagacctgccagaacctgtggagccatcagccttgtgctctgactctgtgatggagccatccatagagcaaagttctaactgcgaggccgaaacaacatttcagtgtcagatagcaacagtgacctcagaagttataaacgtacttataaataaggatcagaatctagtcattgaaaagggggacaactggacaatcatcagtggtgtagctgtcttgccacatgtggaccaggtcacactgtgtgacattcctggagacatccctatttctcaggatcaaggagagctggaagctggttgcatcccagtgacttctgctgagaagtccccagaggccagtcacactggccctgcatttcaggaggctccatgtggcaataatctttcatgtccccaagaggatgtttcaagcagtggtcagagcaccaactttgataagagtcgtttgcgaaatagacccagttaagcctagtatatggattagttctcaaatctatgatcaaaacttcgagactcagattgttgcgtctgatcacacatattataactcaaaactagagccatctggcaaaaataagaatcgatcaaagatttcaaacaaagatcagtcaaacaaaccagtaaaaacttcagccgtcgagcagagttgaaactcatcagagtgaagttgctcagtcattttcaggggaaaaagctaatacaaaaactcaaagaagccaaactcagaccattttagcaaatgctgatacatccactcctacagattgttctcctgacacactgagtaaaatacggcaagaggtggggcctcctttgccgcctctgcttgctcctctgatagctacacctccaaggacttcacagccactgtctccactgatatcgagttctagtccttcctcaccagcctctcctgttggccaggtttctcccttccgtgaaaccccagtgcctcctgccatgtctccatggccagaggaccccagacgtgcctctcctccagatccttctccatctccatctgcagcttcagccagtgagagggtagtgccgtctcctctgcagttctgtgcggccacgccgaagcacgcacttcctgtgcctggccgactcccaccctgtgcatctggccacgctgctgtgggagggcctcaggagaattctgtgaaaatccttgacaccatgtatccagagttatctgccagggcccggaccctcaacatcctcaaagggaatattcaactcacacgaggtccgcctgctgactgtaagaatttaccgggacctgccagtgctatgataggattcaaaacgatcacttcagcagcaactgcttttgtcaaaactgggagcagctctggtggtgactgtaaccaagacaagtcaagagatttggggactcagcaggattcaagcgggaaaagaacactgtcaacgtctacactgagaagtgctaaaagactgcgcctggacactgggtccccagaaccagaaaccaggggagtcactgcagaaggaatccacaaaaacctcccagggaacctccctccagctgaagttgcaacaacaaatgaggaaagaagttgttctagtccagccgtcagtgcagtttcacagttgcctttaagcccaaaagaaactgtggagtcccatgataaagccatagctaatgccctgaagaaaattgcagagttttcttttgatctgttacctgtcattcgtagtcatgtgtatgtgggaaatatctccaaaaagcccgtaatgagagatcaagagaaggaagttgtttatgaatttagcacaacaaaaaagcatttagcagagtgcttgcttcactctattctctcagaactaaaaattcagaagatatctatggaccacaattacattcacgccctctgcagggtgtatgtgggtatttgtcggcaactcggagacttggaaagagctcgtttgttttgctacagcctacttaaaagaagattttccggagtctgaaaaattaacttttgtttattgcaaacatgtggcatgatatatttctctctcaatcggtgattaataaagcaatgcagttagttgccaggcaacgtgctaaaggagaggatttgaactgcttgagagcttttcttaattgggaaaagaatgccccgggagatgatggcttcatggtttctaagctgcttttgaccatacaggtatgtccaaaaacttaatttcaacctagtgaaaaatttggtgaagacctaagtgataacacttgggaatacatatttgccattgatctgctctgctgccatcagaaatggatctggacgcatgataacatcataagtaaggagctgtggcctgtgatggataaatggataaaatacagaaaaggacatgcaaacattgcgtatactcctgatattattatagcctcaatactgaggctgattggtcgtttaggccaattgggtttgaaagaaggatttccatctgctgtgaaaaatattagttcggttattggtatgtttatacagcatgctcacgatgaagatataccatggggtatacagttagcagccgtgtatgctctttgtgacttgagtcccagcaatccagcagaaatttccaagatcctggaagcttggcggatagaggcctccaaaagcgttccgtctgcgattgtcagctgcctacaggaagtcagtgccctgagcacagaggagcttggctgacctgggatgccactgaggcttgagaagtgccttgacacattttgaacacaaatagtttgatcagctttcagaatacaaagggaggtttcaaaacctaaagacatataatagataaaacagaccacaggctctccttattgtttggcaaggagacaggagaaacaagcagtcgcatagtcgattttccctaaatctaatacgtttcacttaaggctgttgtgatctgtgacatatgggttatattattgtgtctttgtcaaacaacaaaaacttgaacttagccctttttttgctgcagaaagtgtccttttagtggcttcttaaaattgagtgggcattttataatgaacttaccaatataaaaacatgattttggttcctgaggctgttgttgttgggacttgtgttccaatgaggtgactaggggaaaaataaattgggccaaaaacctaggagttttctgctatctttggctggggaaatggagttggcaaaagtttttctccaagatgtagtgcgtaattgatcagagcaaaacatgcagagcccttagcagaaaccccactttaatgcattttcttcatatccctaaagttccttaaaaatatgtgacaatgcatcaggaagaggagaactgaagagtagaagttcccttgcagatttttttatccagtgacatgtaatgagcaattcacagatgagcgcaggcagagctctgtgtgcccgtgtacatatggaccgtgctatgatgtgtctcacattggatgatattcccnctttgggaattttagtatttgtatatagaaaatgggttttaataactctaccatggttttgatttgtcttatattcgttatttcttaaaactcttggtatgtgtttttataataaaaaaataaaaggtaagccatgggatatt

SEQ ID NO: 22603 - DNA, 1476 bp, Homo sapiens
  SIMILAR (1192)..(1341): 331254mologous to Bos taurus growth differentiation factor- 5,accession number AB004301,Smith-Waterman Score=73.
taggcccacctctcgcatcacaatagcccctaggaataccggctcaaaacattgtacagaaaactccgcagacacacaacgcatgtcagttctagggaaatctaaactcagatttaaggaggaaacagtaaaagtgaaggaaaatgcagacaactttaatggatactaacttttccttgatataattctctaaaatatacagctacttcataaatgaacttgacagaaacaagtgtaatgaatataaacagtaaagttaacatcttggactgaagcactggcattcggtttacctgaccttatttctggttggattttacatttgcataactaaaagggttcaccagaattctaccaaaacacagtctatccccagagcagattccaatctccgccctcaaaggcacagactccacgctatctagaggcgtgatccccctgcccatttctgaggctgggagcctgcagtgtggcctttgggctaaagatggcgacagagatcaacgttggcgctgcctttttggggctaggttctgaatgagctctaacatttaattcttcaaatacttagcagctactgtgtgtcagcccttgtgcctcaaatccccgcctcacttacagtagatgcatccttccacgcaatgcgtgagagtagaactggatcctgtgatgacttcaggaagtccgggtgtccattctgttgggtaacaatttttgttagctcccccttgtcacgagggacacagcccctgctctttaggagtttagagcttaggagggaaggtagatattagacacatactcatttcaacatttttcccacctatgtgaaggagcatcacacgaatgcttgatcccttctccccatgacagagacgttgctgtgaatctgtctcctgtacactcattccctccaattcccttggatgttcttgcccaggctctggtcacagaattgggtgacaaaggatgctgggagccttgagttctagcagaggctcttccatactggaatattgatcacatatcattttgagaaggctcatacggggcagtgagccatgatacaaaaaatagcccttgggtattgaaggttggctgcataaaggacagcagacgtaggtatcagctagttatgcattttgtagactggttccagtgcacacattccaatgagtgctcataggtttatgtgagaaaatgtgttatttttgataccttcttccacatgcctctccctgttcacaccctctgcttcagacactggtctcctcacgattctccaaagacacactccaggcacgatgctactccagagcttcagcagtaggccttgtgttttgaacacttgatccccaattacctgcctgggttggttcctcagagaggcctacgctggttacccccgtgaaaacctgcaatatgcaccccctcaaatctcagcacccttagattacctatggtactatcacattc

SEQ ID NO: 22604 - DNA, 972 bp, Homo sapiens
  SIMILAR (716)..(775): 701254mologous to Macropus eugenii protamine P1,accession number L35450,Smith-Waterman Score=66.
acttttctgttcctagttaaaataaatatgtccttggcaaagatttgaacaaaagagggatatattatgaacgtacattccttatgtttaataatcagtgtaagacactgaagatttcagaaaatgtttcaaagtactgtagaaacaaccctgaaaattgaaacctgtaatttgttatcttaattggcaacttgttgctgtttctgattttaaaacatgccccatgaatttctttgagactttttctccattaagaagtggagtatgattttttcctcccctttgaatgccagactgaccattagtgaaatagaacgaggccaaaaagttatgctgaatgacttctgaagcgaagtcatcaaaagttatatagtttctgcctgactctctctctctcctagcccttactcttgaaacccagttgccatattgtggggaagcccaggtgtcatgaagaggccaagcaaaggtggtttggccaacagtcccgctgaggtcccagcagagatccagcatcaatctccagacctctccaaactcctagagagcaggggctgtgtccctcgtgacaagggggagctaacaaaaattgttacccaacagaatgggacacccggtcttcgtgaagtcatcacaggatccagttctactgtcacgcattgcgtggaaggatgcatctactgtaacctgggtgatagagcaagaccctgtcctgaggaggaggaggaggaggacgagaaggaggaggacgaggatgaggagaagacgaggacgatgatgacgaagcgacgtagaatgagaggaggagaggacgaagatgatgtagacgaagaagacgcagaagtagcagaagtaggccgacgaggaggcagaggaataggaatcaagtgtgattatccattaacttgtttaagattttgcatttactcagcctcttctgcatttaccagcagctgttctggccacagctga

SEQ ID NO: 22605 - DNA, 272 bp, Homo sapiens
  SIMILAR (2)..(271): 881254mologous to Escherichia coli f561,accession number L10328,Smith-Waterman Score=430.
tatcggcaagctgtactggtttatgccgccaagcgccaacctcgcgctgcgggagctggggatcgtgctgttcctctcggtcgttggtctgaaatctgggctaagctggattggttatggtgccctgatcaccgccgttccgctgattactgttggcattctggcgcggatgttagccaaaatgaattacctgaccatgtgcgggatgctggcaggttccatgaccgatcctccggcgctggcgtttgctaataatcttcatccaaccagcg

SEQ ID NO: 22606 - DNA, 1453 bp, Homo sapiens
  SIMILAR (423)..(752): 901254mologous to Escherichia coli K12 putative transcriptional regulator,accession number AE000445,Smith-Waterman Score=488.
cgagatgctactcattactaagtcgagctccgcacccggggatctacataagcattgcggagcgggtataattcgacttaactccgcaaatttcacgcttaacagccttcttcccgccgaaaaaaagctggcggaagagtttgcggtatcgcggatgaccatccgtaaagccattgacctgctggtagcgtgggggctggtggtccgccgccacggtagtggcacttacctggtgcgcaaagatgtactgcatcaaaccgccagtctgaccgggctgggggaggtgttaaaacggcagggaaaaacggtcaccagccaggtgctgatttttgaaatcatgcctgcgcctccggccattgccagccagttacggattcaaatcaacgagcagatctacttctcccggcgcgttcggtttgtgtgaagggataccgctgatgctggaagacagctatatgccggtaaaactgttccgtaatctttcgctgcaacatctggaagggtcgaagtttgaatatattgaacaagagtgcgggattttgattggcggtaattatgaaagcctgacgccagtgctcgccgatagactgctggcgcggcaaatgaaggtagcggaacacacgccactgctgcggatcacctcgttgtcatatagcgagagcggggagtttttgaattattcagtgatgttcagaaatgccacgcaaattcaagggtggaggtcccattttcggcgccctccacccgaaaaagagtttaaccgttcctccagaaagagccccgccagtatttggggggttaataatgcgcaagaaccattcccaacggatagacagtggcgtaagagagcgccgccgcaccgctggttggatgaagattattagcaaacgccagcgccggaggatcggtcatggaacctgccagcatcccgcacatggtcaggtaattcattttggctaacatccgcgccagaatgccaacagtaatcagcggaacggcggtgatcagggcaccataaccaatccagcttagcccttcgccattgaccagggtattcacaaaatccccaccagatttcagaccaacgaccgagaggaacagcacgatccccacgtcccgcagcgcgaggttggcgcttggcggcataaaccagtacagcttgccgatactgccgatacgcccgaggatcaacgccataatcagcggtccgcccgccagccccagtttcaacgcggccgggaatcctggcacaaagacgggaatagaacctaacaatacgcctagcccgatgccaataaacactggcagcatctgaacctgttgcagtttattcggcgcattccccagcacattggcaacggcatcaattgcggacggacgccccaccagattgaggatatcgccgaactgcaggctgatatcccactggcgaccagttcgaccccggcacggt

SEQ ID NO: 22607 - DNA, 493 bp, Homo sapiens
  SIMILAR (138)..(272): 881254mologous to Homo sapiens SKD1 protein,accession number AF112215,Smith-Waterman Score=206.
aggagatgaaatgacaacgtcaaccctccagaaagccattgatctggtgacgaaagccacagaggaggacaaagccaagaactacgaggaggcgctgcggctgtaccagcatccggtggagtacttcctccacgcttatcaagtatgaggcccacagcgacaaggccaaggagagcattcgagccaagtgcgtgcagtacctagaccgggccgagaagctgaaggattatttacgaagcaaagagaaacacggcaagctctgcctcaaagaccgagtgacataagccattcccaccctcctaggttcacatccagggctgtgtcttccttgggggaggagatggtgtcgtttagatcagggtaaggcagtcaggcgggtgttcaccactgccttttcttcctctgagcgtgagaacactgaacccagccactgcccctgggtccctgtcctggaaatggtctaataaatccttttcccttcttgagctaaaaa

SEQ ID NO: 22608 - DNA, 934 bp, Homo sapiens
  SIMILAR (578)..(733): 941254mologous to Homo sapiens vacuolar sorting protein 4,accession number AF155740,Smith-Waterman Score=268.
tttttttttttgggaagaaaaagaggtttaattggcctttctagttcttcatggctagggaggcctcagaatcatggtaggagaccaaaggcacttcttacatgctggtggcaagagaaaatgaagaaacaaaagtggaaacccctgataaacccatcagatctcgtgagacttcaccatcacgagaatagcacgggaaagaccagcccccatgattcagttacctccccctgggtccctcccacaacatgtgggaattctgggagatagatacagttcaagttgaaatgtgggtgggggcacagctaaaccatatcacacttttaatgtcactgtattcctggtgagacgtgacagtgttaatgaggaagacatcaaggcattggggctacagattgccagagtcccatgcaaatcatgagtcgctcggaccacccagcccgagttctgaaggagcccgtcctcctcagatgctagggacccacagagcattctctttgggacttccttagagaccggaggggtcgagcccctctgacactgaggggcagctgccccagtcagatccatttggtttcaggtctgtggcccctctcgcaccaaccccagcatgatgattgatgacctcctgactccatgctcaccaggggacccaggagccatggagatgacttggatggatgtccctggggacaaactcttagagcctgtggtttgcatggtaagtgacttgacaggggagggaagagggctgcacagagcccagaaaattgagggtttgggtccagaataaaaacggtcttctccaggccaggcatggtagctcacgccttgtaaatcccagcactttgggaggccagggtgggcagatcacaaggttaggagttcgagaccagcctagccaatatggagaaaccctgtctctactaaaaat

SEQ ID NO: 22609 - DNA, 2460 bp, Homo sapiens
  SIMILAR (1070)..(1534): 801254mologous to Homo sapiens SKD1-homolog,accession number AF159063,Smith-Waterman Score=617.
tttcgtggggtgtggggcggacccaggagatgaaatgacaacgtttacccttcatataagagagggctgaacaaatgccccggccctgccaagagccggtcaggaggtttattgtttgctgtgcctggaaccgtgggtctgcggtgggtctgcctgcctggtaactggtgccggatctgaggaggagaattctggtcatgcttcgtgcaggcgttggtgaagctgcggtttttaaaaccaggctttaaaaccataaagccattgatctggtgacgaaagccacagaggaggacaaagccaagaactacgaggaggcgctgcggctgtaccagcatgcggtggagtacttcctccacgctatcaagtatgaggcccacagcgacaaggccaaggagagcattcgagccaagtgcgtgcagtacctataccgggccgagaagctgaaggattatttacgaagcaaagagaaacacggcaagaagccagtcaaagagaaccagagtgagggcaagggcagtgacagtgacagtgaaggggataatccggagaaaaagaaactgcaagaacagctgatgggtgccgtcgtgatggagaagccccaacatacggtggaacgacgtggccgggctggagggggccaaggaggccctcaaagaagctgtcattttgccaatcaaattcccacacttgttcacaggcaagcgcaccccctggcggggaatttctgctgttccgaccccctggcacaaggaaattccaaccggcccaaggccggggcaccaaaggccaccaactccaccttcttctctgtgtcctccctcagatgtgaagtccaagagactgggggaaaccgaaaagctggtctagaacctgttttgagctggccaggcagcacaaggccctccatcatcttcatcgatgaggtggattccctctgcgggtcccgaaatgaaaatgagagttcaggccgcccggaggattcaaaacgggagttccttggtccagattgcaggggggttgggaataaacaatgatggggattctgggttttttggagccacaaacatccccatgggtgttggatttcggccatcaggaaggaaggtttgaaaaacgaaattttatatccccttgccggagaaagcctgcccgcgcccagatgtttcccgtttgcatctcgggagcactccccacaaccctccgggttgcaaccttccacaagctggcccggaagacggaaggctactcgggcgcggacatcagcatcatcgtgcgggactctctcatgcagcccgtgaggaaggtgcagtcggccacacacttcaaaaaggtctgtggcccctctcgcaccaaccccagcatgatgattgatgacctcctgactccatgctcaccaggggacccaagagccatggagatgacttggatggatgtccctggggacaaactcttagagcctgtggtttgcatgtcggacatgctgcggtctctggccaccacccggcccacggtgaatgcagacgacctcctggaaagtgaagaaattctcagaggactttgggcaagagagttaaaagctgcttcacttgggcaatggtgaaggttgggaagtttgattggggcaaatccaggcactccccatgtcaacagccagacagggcttccagggcttgtcccagtcaatacagagttccctctgctgttctggccgtctgccaggggagccagaaggaaggggccttgcagccacagagacactccactgccctgggggcaccacagtgggacactgctcttcctacttcctcctctcctgggatgctcatcagctccttctgcctccccccctttttttttccatcttttggtccccctaaatataatgctgcttggattttcatcttatttataaagataaaatcacctgggaagtgttcaagggagtggggcgggggttggcgggggagaagcagccgtgctgccaaggtcacccagacctccagacagcccccagacctccagacagccggctagccccactgcccgttcctttttacgccacaagttttgcgtccgttgagagcagagttggctgatgcccctgcaaccccagcccaagctctgcctcaaagaccgagtgacataagcccattcccaccctcctaggttcacatccagggtctgtgtcttccttcgggggaggagatggtgtcgtttagatcagggtaaggcagtcaggcgggtgttcaccactgccttttcttcctctgagcgtgagaacactgaacccagccactgcccctgggggtccctggtcctggaaatggtctaataaatccttttcccttcttgagctacccaagtgatttcatctttccttgactcttaactgagactctgaagggccacccttgcttccaattaaaagaccctctggttttcaaaaaaaaaaaaaaaaaa

SEQ ID NO: 22610 - DNA, 978 bp, Homo sapiens; identical to SEQ ID NO: 17914
  SIMILAR (360)..(28): 1001254mologous to Escherichia coli glycerol kinase,accession number M55990,Smith-Waterman Score=583.

SEQ ID NO: 22611 - DNA, 1293 bp, Homo sapiens
  SIMILAR (962)..(1066): 601254mologous to Escherichia coli matches PS00041: Bacterial regulatory proteins, araC family signature,accession number U00006,Smith-Waterman Score=96.
atggtcgctggcaacaacgatcagaaagccattactgaaacgaccgaacagttaatcaacgaccgctcgaccatcgcggtgaagtggtgctggttggtgcaggtccgggcgtgccgggctgctgacactgaaaggactgcaacaaattcagcaggcagattggtggtctacgaccgtctggtttctgacgatattatgaatctgagcgtacgcttaagtaccggacacttaaaaccggtggcgagctggactgggaaaacctggcggcagaaaaacagagctggtgttctatatgggtttgaatcaggccgcgactattcagcaaaagtgattgaacacggaatgccaggcgaaatgccggtggcaattgtcgaaaacggtacggcagtcacgcagcgcgtgattgacgagagctacgtatcagtaaagagagtcactggcgcgaggcgatcaacgccaaagcgatggagcaatgaccttaaactggcaggaaaaacgctggcagcgattttttacagcgaagaaccgggaaatatcgaacccgtctacatgctggaaaaagtaaaaatcaaaaccatgccaaatgggaggtccataattttaccatgggctacaacggcaagtaaccgaagatacttacgaatatttgctgctaaatgtgagctaccccccggttcgctacgccacgtctgtctggagttaactgtatacatggcgcggttatatcccgtgacgtatcgaccaccgggactagtgtcctcggataatgccgttagacccctggagaaccctcgctctagagacggtggaatgtttgcaatcgcgtcgctattgtctcggaatgggggaatatggcgcggctggatatgttaccgtgcagaggcgcgcatagaagttaagcggcccatacactcgctacagcgcagcattgcgtcctcgcgcctctggcccccggcgttttgggccagcgcacgtacctctgcggagtttgtaaaatttactttgccagcagaacggcccggtgcccgatcttgcgtatcaggtcgattttccacggctggaattgtgctggaaggtgagtttgtagataccggcgctggagcaacgttattcccggcgatgtgctgtacgttcctgctggtggctggaattttccacattggcaagcccccgctactacctttagacgtgctgttttggcaaacagcactcggcttcagcgtcgtgcaatgggatggcaaacaatatcaaaatctgcgaagcaacacgtcgcccgacgcggaccacgcatag

SEQ ID NO: 22612 - DNA, 3051 bp, Homo sapiens
  SIMILAR (2210)..(2290): 1001254mologous to Shigella flexneri outer membrane antigen Oma90,accession number AF120927,Smith-Waterman Score=138.
atgcaaacgattatccgtgtcgagaagctcgccaaaaccttcaatcagcatcaggcgctgcatgcggttgatctgaacattcatcacggtgaaatggtggctctgcttgggccgtcgggttccggaaaatccacccttttacgtcacttaagcggtttgattaccggcgataaatctgtcggtagccatatcgagctgctgggccgcacagtccagcgcgaaggccgcctggcccgcgatatccgcaaaagccgcgcccataccggctacatattccaacaattcaacctggtgaaccgcctgagcgtactggagaacgggaataaccatggacaccaatgtgatactctatttctttcggtggcgtcattcgctactggcaatgaactggcagcgcagttaattcggcagttgcgccggcagtgtacgccggggcaagtgatggtcgcgtcaactgtcgccaaactggcaacgattattgatgctgaagaagacagcacccggcgtatgggattcgaaaccattctgccgttgcgtgaaggtaatggcccgacgctgttttgtttccatcctgcgtccggttttgcctggcagttcagcgtgctctcgcgttatctcgatccacaatggtcgattatcggcattcagtcaccgcgccccaatggccccatgcagacggcggcaaacctggatgaagtctgcgaagcgcatctggcaacgttacttgaacaacaaccgcatggcccttattacctgctggggtattcccttggcggtacgctggcgcagggtattgcggcgcgactgcgtgcccgtggcgaacaggtggcatttcttggcttgctggatacctggccgccagaaacgcaaaactggcaggaaaaagaagctaatggtctggacccggaagtgctggcggagattaaccgcgaacgcgaggccttcctggcagcacagcagggaagtacttcaacggagttgtttaccaccattgaaggcaactacgctgatgctgtgcgcctgctgacgactgctcatagcgtaccgtttgacggtaaagcgacgctgtttgttgctgaacgcacacttcaggaagatgtgttcgatgctgtgtacctgtgctcacagaggtctactttttcgcgaaaacgtagatctctaccgcccaacgaaaagcatgaaagcgatcacgaatcccattgggtcgtcatgttctgccgatcgcatcttcctatcctcgctccaggcctgccgcataaccaatcaggcttcctacttacagaattgagaaaagaggatgtggaaatgctcagtcaaattcaacgctttggcggcgcgatgttcacgccagtgctgctgtttcccttcgccgggattgtggtgggtcttgccatcttgctgcaaaacccgatgtttgtcggggaatcactgaccgatccgaacagtttattcgcgcaaatcgtacacattattgaagagggcggttggacggtattccgtaatatgccgctgatttttgctgtcggtttacccattggccttgctaagcaagcgcaggggcgtgcttgtctggcggtgatggtgagtttcctgacctggaactatttcatcaacgcgatgggaatgccggccccgtgttccgtgcccttgccctatgtggttagccggcacctgccgacgtccgcctgcagtttccaatccggaggcgtcttctccctcagtcgttccctcgatgtacggataaccttcagaggtttaccttcctggaccgccctggatcgtagatactcatacatcgcccccatcagtaaacaacaggaacacacagatccaaaccacatccaggaagtgccagaacaggctcaggcacatgatgcggatttccatcccgataaatccggcaccaaacaaccaggtcaacgccagccaggagataacctggcttttgttgtttttgtacatggcgatagccgccatgccgtaggtgatggagctgaacaacagcaagaaagtttcaaccagaacgaacggcagttcgaaaatgtccttacctgtcgggccgcctgcggtgccgttcaccagaacggcataggtagcaaacaagatagagaacagaatgcagtcgctcatcaggtagatccaaaatccgaagattttggttccgcctgcatcgtggtgcccgtgttcgtgcgcgtgggcagtcgcgtacgatacctcgaaagatgccgtcctgcgtcgcgaaatgcgtcagatggaaggtgcatggctggggagcgatctggtcgatcaggtaaggagcgtctgaatcgtctgggcttctttgaaactgtcgataccgatacccaacgtgttccgggtagcccggaccaggttgatgtcgtctacaaggtaaaagagcgcaacaccggtagcttcaactttggtattggttacggtactgaaagtggcgtgagcttccaggctggtgtgcagcaggataactggttaggtacaggttatgctgttggtatcaacgggaccaaaaacgattaccagacctatgctgaactgtcggtaaccaacccgtacttcaccgtagatggcgtaagcctcggtggtcgtctcttctataatgacttccaggcagatgacgccgacctgtccgactataccaacaagagttatggtacagacgtgacgttgggcttcccgattaacgaatataactcgctgcgtgcaggtctgggttatgtacataactccctgtccaacatgcagcctcaggttgcgatgtggcgttatctgtactctatgggtgaacatccgagcacctctgatcaggataacagcttcaaaacggacgacttcacgttcaactatggttggacctataacaagcttgaccgtggttacttcccgacagatggttcacgtgtcaacctgaccggtaaagtgaccattcctggatcggataacgaatactacaaagtgacgttagacacggcgacttatgtgccgatcgatgacgatcacaaatggttgtttggggcgtacccgctggggttatggtga

SEQ ID NO: 22613 - DNA, 2430 bp, Homo sapiens
  SIMILAR (1155)..(4): 1001254mologous to Escherichia coli 4-alpha-l- fucosyltransferase,accession number M87049,Smith-Waterman Score= 1996.
ttatccttcaacctgcgtccggagcgatgattttgtacgtttatgaatgagtccggcgctttcaaaaagccagtacaacagttttgcgatcatcagacatgcgccgaagaccacgataaaaaagaccacgcgtgagacaaacgaatccagcccttcacgcgccagcacgatcatattgaagatcgccccaaagcagaaactgtgcaatatcgcagctttatagcgattaggctcgcggttgcccagctcatacagccagtcgaaccatttgatgatcagaccaaccacgatcgccccgagcgggatgaacaacgcgccgcccatcaccaccagtgagcctataagcgtaggcgagatcgccagtccggagtggttattcagcacttcccaggtaaagtagttggctgagttcagcaccatactcgggcgacccggccacagccaggaagggataaagacatagaaatcgcggacaattggagccaggccctggaagtcgatgttgtcgtagttctgcaacagcaacgccagattctcccacggcgagaaggtgtcgcgagtgagatagagaaacgtatagaacgcttcatcgccgctcacattcattccatagcgttttagtgccagccagaacatgccaacaatccccagcacgcccgccgccgccagcatccacaacgaaatccagccgcgaataatgccaataaacaggaagatagcgaatgcgatgatgatattggcgcgagtgccgccgacaatcatataagtcagcaagccaaaggcgaccgtgctgacgaggaaaaacagccacgctttgctgtcctggcgcagaaagtagaccaccagcatcgccgggatgaaaaagtaaaagaagcgttttaacgccacgccggagacttcactggaaaagatctgactgtaggagttaagccggaacagcaaaaagccgttgtgcatgaagaagatgccgacgcttaccagcgcgatacccatcaggatcacccacgtaagattggtctccacgcggttcatggtaaacagcggacggcgcggtacatcagcaacgcgtttgcgtaggcgggttttgtaggtgacatagtaaaccgcgtagaagcagcccgcagaaagcaacgcctgcaacaagatttctggcggcgtaggctgggactggggctgggaaggaggagagccggagccgttatcaccgaacatcggttttggcataaaggtcgcggttttaccgaagcggtgcgctacgttgtgcacaacatatttgtagatctgaatttcgtcagcttttttggtcatggtattgaagcgggtagccacttcgttctgaccagcagtcgctacttcgtggtgatgggcttcaaccaccagacccatctgttccatcaccagacacatttcagaacgaatatcctgagccgagtctaccggtggaaccgggaagtaaccgcctttcactgccggacggtgacctttgttaccaccttcgtattgggtggaggagttccatgcgccttcgatatcgtcgatagcaacgtgggaaccggagatagatgatccgaaacggatgtcatcgaacaggaagaattcaggttctggcccgaacagtacggtgtcggcaatgccagtggaacgcaggtaatcttcggcgcgcttcgcaatggagcgcgggtcacggtcatagccttgcagggtgccaggttcaaggatgtcgcaacggataatcagggtggagtcggcgaagaacgggtcaatcactgcggtggatgcgtctggcatcagcaccatgtcggactcgttaatgcctttccagccgccaatcgaggagccgtcaaacattttgccttgcctgtagcgtgtttcaatcagcgtggcaaccgtcatcgggccaacgccgccgggaacaggcgtaatgtatgaggcgcgtttagccgcgtcttcaaacacgacgtcgcccacaactttgccattttccagacggttgatgccgacatcaatcacaattgcgccttctttgatccagtcaccgggaataaagcctggcttgccaacggcaacgatcaatagatcggcattttctacgtgatgacgcagatttttagtgaagcggtgagtcactgtagtggtgcaacctgccagcagcagttccatgctcatcgggcggccaacgatattcgatgcgccaatcaccacggcgttgaggccgaaggtatcaatgttgtaacgctcaagcagcgtgacgataccgcgcggggtgcagggacgcagacgcggcgcgcgctggcacagacgaccgacgttgtaaggatggaaaccgtccacgtctttgtccggatgaatacgttccagcactttgacgttatcaatacccgccggtatacggcagttgaaccagaatgccatcgatggtgttgtcggcat

SEQ ID NO: 22614 - DNA, 1146 bp, Homo sapiens
  SIMILAR (118)..(504): 981254mologous to Escherichia coli matches PS00041: Bacterial regulatory proteins, araC family signature,accession number U00006,Smith-Waterman Score=664.
gctgtgcggctccgtggttaccgtggcaacagacggcaacaactcgggcggcgcatggaaagtgcgggcggcttcaaactgggtatggagcccctcaacggcggcgggaggatccccgatttgcttggcggccaaatccagaccgcctcacgcagccaggcactatttgaagctattcgcgattatatcgacgaacgctatgcctccgggcttacccgcgaatctgttgcacaggcgttttatatttcgccaaattacctctcgcacctgtttcaaaaaacgggggccattggttttaacgaatacctgaatcacacgcgactggagcacgctaagacgttattgaaaggctatgacctgaaggtaaaagaagtggcgcacgcctgcggctttgtcgacagcaactacttctgccgtctgtttcgtaaaaacaccgaacgctcgccgtcggaatatcgccggcagtaccacagccaactgacagaaaaaccgactactccagaataagatgggtttgctgcggcgcagaaagactttgcgcaccgcgctcattacccgctgcggctcacgcaggaatgcgtgatgcgacacgcgcaggttggcgcaactcttacggatggtgagaaaaggggtaaagattgcgatcctaccaattctcttgccgctaacgatgttgctgtcgtccatgccggatacggcgctggcgcaaaaaattgctccggtgacacagtacatcttgtatgccgatgcggtgtggctaggtgttgtgttgcgtttcgtggtatctggttttgtgttggtggtggtctcatttgtaggtggcgctgagcggagacgagagccgctggggtccttttttttttgctgtccttctggggtggtggtccgtcggatggcgcgtggtgtccgcggacgctctgagtctgtgtggttgtcggtttccaggtggagtggtcgggagttggttgtcgggtctgctcccggacagtcgggcagtgacacgggggcgtgcggtttcttatgctggtcctggtgactagagggcttccgtacccgggcatgcaggcagcttgtgcagtttcgacgggtattcaccgcggcggtgcatgccatgtcggcggctttcatcgaatcttgccaattcat

SEQ ID NO: 22615 - DNA, 3947 bp, Homo sapiens
  SIMILAR (852)..(259): 961254mologous to Escherichia coli GAD alpha protein,accession number M84024,Smith-Waterman Score=1061.
  misc_feature (1)...(3947): n = a,t,c or g
tcatccagcagtggaaggggggaagcgcagcacacggcagtttggtgattgttcactttccacacccgcaggcagggcgttatccagtagtgccaggagggcttcgccgttgccggaaagtgcctggattgtgacagtgtcacctaaagctgtaatgcgcagcgcactgtctaccagcagcaggctttttaaatcatctttgctgtcgatatctgcggattccagcagcagcgttgccggacgatccccacacaagcgcaagcgaaagtcccagcgatatccgggcgacgacggtgccaggaagccaccgctggcagcgtcgatgtgcatgtcgatgtcgataccggtatcggcctggaatttatccagcgcatcgtgcagcggttgtgggaactcatagttaccagtgtaggtcacgccgaaagtcggcaccacgccgatggtgttttcgtcacaggcttcaatcatgcgtttcgggtccataaacaactgaccggggcgcatagggatctcacgcagctccacatcccagtagcgggcgaatttatgccagcagatttgtaccggaccgcacaccaggtttggtttatccgttggtttgcctgcagcttccatacgcttgcgccaacgccatttcatcgccatcccgccgagcatacaggcctcggaagaaccaatggtgttggtgccaacggcctgaccatttttcggcgcaggcgcatgccacagatcggcaaccatatttacgcaacgcaggtcgatggctgcggattgcggatattcttctttgtcgatccagtttttgttaatggataaatccatcaatttgtggacattttcgtcgtcccaggtcagttcaggatcgagcgccgaggtaggttcatcaaacagtaaaacttccggttccatcgccagcgcccgcgcgatagaaacacgctgttgctgaccgccggaaagatgcaccggatatttcccctgcgcacgttcgtctatcccgacttttgccagatacttcaccgcccgctcgcgcgcttcctgcttgctcaggcccaacacctgaatcggcgcttccatgacgttttccagcaccgtcatatggctccagagattgaagtgctggaataccatcgtcaggcgtgtgcgcagtaagcgcagttgatttttatcggcgactttgagttgaccgtctttgtcgcgcaccagattgatcgtctggccattgaccacgatcgacccttcactcggtttttcgaggaagtctttagagcacagggcgatatactcactgcgaagcgtctcatgcctggtcgcatctacagattgccgtgcattgtgctcctgttggtgttcctcgtccataaagatcacccgattcgccactttacgggcaaagcccatttcgtgggtcaccaccatcatggtcattccttcgttcgccagttccaccatcacgtccagtacttcgttgatcatctccggatccagcgccgatgtcggttcgtcaaacagcatcgcaataggatccatacacaacgcgcgagcgattgccacacgctgctgctgaccgccggaaagctgcgccggaaacttattggcgtgagcagaaagcccgacacgctccagcagtttcagggctttttcacgagccggcgctttatcgcgtttaagcactttcacctgcgccagggtcaggttttcgataatcgacagatgagggaacagctcgaaatgcgggcccgcttcagagttgagcgcaccgtcaagcattgcggtcacggcatagcgccctttagatgtcagtttcatgtcttccttcacctcaaactcgcccttgactgatttagtcgggtatttaaccttcagtgccatttttttatcgtggcgtttgtccctgttgtcggatgcggcgtgaacgccatatccgccctggggttctgtacactgtaggcggttctgttcactgtaggcctgataagacgcattacgcgtcgcatcaggcaacggctgtcggatgcggcgtgaacgccttatccgacctacggttctgttcactgtaggcccggcaccctgcggcacattgccgctgatcaccatgtccacgccgccgaagctgttgttacgcagttgcagatgtttcaccacgccacgaacgtagttagcccattgatagttttcatgtgcgacaatgggcgcatcgagggaaaactcgtcgagctgattttcataatcggctgccatcacgcgaactttacggtcatcgcgtggtgcacaactggatttgccccttatgcggaacatatgcttgaagtgatgtcttctattggcgattatacaaaccgcgtccggcatcacgtccggtgacgaaatttgatcaacgtggtcatcgtcttggtcacggagtatggaacttaatgttcgagagggtgaaataatggcaaagaaccgtagccgtcgtcgaacaaactggcctttgacggcagcggttatctggcctgggaaggtctgatctgcatgcaggaaatcggcaaatgcaccgaagaacatcaggcgattgtgcgtaagtggctggaagagcgcaaactggatgaggtacgcaccagcgaacttttcgacgtttggtgggagttgcaacaacatcgacttgatatggccgatggcgcgcgtcgggttcagccccttcggacatacactgacgcagttcatgatgctgtgacagcggaatacgctgaatgcatcactcaaaccgtcgaggcggctgtcagtctcggtatcacggctatcaatcaggaaacgatatgccgctaacaagctggtgttgggtgccgctcgcgtctggttattcccccatgccgatggtgctgtcgataacagcatgatgtgggtggtgtcgatggcggtagcaggatgcttgtttgtcattcccacggcagcagaaattccgattgtacaaacgatgatgctggcaggtatgggaaccgctccggcgctggcattgttgatgacgctcccggcagtgagtttgccgtcactgattatgctgcgcaaagcgttcccggcgaaagctttatggctgacaggggcgatggtggcagtgtctggtgtgattgtcggcgggctggcgctgttgttctgatttgagggaaaacatgtcggatgcggcgtaaacgccttatctgacctacggtttgtatcgttgtaggcccgcaacgacatctctgaagttgttgattcccctggtgctagcgcaatgagatcacccccttccgggcgatgatgatcatccggcgcatggctcatcggttccagacagaagaaatcaaacgcatatcctttatcaaacgcagggtcggaaacaaagatgaaattaaccccggtgccaggtggcgtcgtttccatgatgatggcataaccttcctgcggctgctcgatgcgggcctgaccattccatccggcaaaaccattgttcacccactggcgcggcaacggcgcgggctggttaaaatccagttcctgcggtagctgctcgcaaaactcacccgccagccactgctcccgctccagccagtaaccgctcgcctgtgcctgaatccgcgtttgcggcgacaacggaaaataaggatgccagccggtaccaaatggcagcgtctctgccccttgattggtgacagatagcgtcaccgtcagcgttccgccgtttatgntctttctgtacggcacaaccctgtacaccatatattgagaaaaaacggcgacatgtactcttttccgataacgattggcaataacgtctggatcgaaagtcatgtggttattaatccaggcgtcaccatcggggataattctgttattggcgcgggtagtatcgtcacaaaagacattccaccaaacgtcgtggcggctggcgttccttgtcgggttattctcgaaataaacgaccgggataagca

SEQ ID NO: 22616 - DNA, 1797 bp, Homo sapiens
  SIMILAR (493)..(386): 331254mologous to Escherichia coli PEP carboxylase (AA 1- 883),accession number X05903,Smith-Waterman Score=45.
tcagcacacgcagccggtccggctatggcggcggcgagtgcagggaggcgaggagttggtgagcgcgaggagtggcagcgcagtagtggcagggtgtgagtatgaccggcacgagatggcgtagaggagggagatgcgcgcgatcaggcgccgagtgcgccagtgcagcgctgcggcgagctcgttgtgaccaccaatattataggtttcaccgactttcccggtggtcgccacgcaatacagcgcgcgggcgtgatcttccacatacagccagtcacggatttgctgcccgttgccatataccggcagcgatttacccgccagcgcgttgaggatcatcagcgggatcagtttttccggaaagtggtaagggccgtagttattcgagcagttggtgataagcgtcggcagaccataggtccgcagccaggcgcgcaccagatggtcgctgctggcttttgacgcggaataagggctgctcggcgcatacggcgtggtttcggtgaagaaatcatccgtcgagtgcaggtcaccatatacttcgtcagtggagatatgatgaaaacggaacgctgattttttatcttccgtcagcgcattccagtaagcccgcgccgcttcaagcaatgtataagtcccgacaatgttggtttcaataaacgctgccgggccgtcaatagaacggtcaacatggctttcggctgccagatgcatgacacagtctggctgatgctcacgtgaatacgcgtgccagttctgcccgatcgcagatatcaactttctcaaaggcaaagcgctcgcggcgctggagcaacggtagttcccggcgatgtgctgtacgttcctgctggtggctggaattttccacaatggcaagcccccgctactacctttagcgtgctgtttggcaaacagcaactcggcttcagcgtcgtgcaatgggatggcaaacaatatcaaaatctggcgaagcaacacgtcgcccgacgcggcccacgcataggttcttttctgaaggtaaaagaagtggcgcacgcctgcggctttgtcgacagcaactacttctgccgtctgtttcgtaaaaacaccgaacgctcgccgtcggaatatcgccggcagtaccacagccaactgacagaaaaaccgactactccagaataagatggttgcggagcggaagtaaggcacaaaatctttgttttcacgtacgtagccgcggtagacatcgcaggagatgactgacagttcatccataatgcgacgccagctctctttcggctccggcggtggcagcaggttggcttccagaatcgccccggtataaagcgacaggctgctgacggtgatttctggcagaccatatttaaagcggatcatctcgccctgttcggttacgcgcaggccgcctttcaggcttcctggcggttgtgacagcagcgccgcatgagcaggtgcgccgccgcgaccaatggaaccgccgcgaccgtggaacaacgtcagctcaatacccgctttttcgcaggttttgattaatgcatcctgtgcctgatattgcgcccaggaagctgccatcactcccgcatcttttgctgagtcggaatagccaatcatcaccatctgtttgccctgaatcaggccacgataccagtcaatattgagcagctgggtcatgacatcgttggcgttgttcagatcatcgagggtttcaaacagcggagcaaccggcatcgcaaacccgatacccgcttctttcagcagcaggtggacagccagtacgtcggacggcgttttcgccat

SEQ ID NO: 22617 - DNA, 3038 bp, Homo sapiens
  SIMILAR (1354)..(1884): 941254mologous to Escherichia coli matches PS00041: Bacterial regulatory proteins, araC family signature,accession number U00006,Smith-Waterman Score=858.
gggtgcctcattcgggtcagccggtggtctgtttccccgcgcaggccgcgccaaaaggaatcaaggggaagtccacgccggggtgtaaattgtgggttactgttccaaattcatgcccgcaaaaaaaaacttgcgcatctgcgcaggctggtgtaattcatgggcccaaccgaaagttgacttcacctatcaatacctctgggatcaccactttagcaacctgaagccaaacgccaccagcggtcaatcgcaacagcgtttcgcaaagtgtaaccaaaggtttgcaatctctttttttgtcttacttatttgcgtttggctcacattcccacgatgaaaacacgccaccccttgaaccaacgggcgttttccgtaacactgaaagaatgtaagcgtttacccactaaggtattttcatggcgcccataaaggatgtagcccgactggcaggcgtttcagtcgccaccgtttcccgcgtcattaataattcacccaaagccagcgaagcttcccggctggctgtgcatagtgcaatggagtctcttagctatcacccgaacgccaacgcccgtgcgctgggcgcagcagaccactgaaacggtcggtctggtcgttggtgatgtttccgatccgtttttcggtgcaatggtgaaagcggtcgaacaggtggcttatcacaccggtaattttttattgattggcaacggttaccacaacgaacaaaaagagcgtcaggccattgagcaactgatccgtcatcgctgtgctgcgttggtcgtccatgccaaaatgatcccggatgctgatttagcctcattaatgaaacaaatgcccgccgacaaacagtgcgagagtattccagaccaaaacaaccagacaggcacccagtacccaagaggcaaggaacccaaattacttcggcggttgatgcacatgaaccgaaaagtgggcccaaggggacccaggcggatgctgcttcgctacctggacgtggagtttctgagcgtcgctctggcggttgtgcacctgggtccccaggggacatgcagcaggctcttcctggtggcccgggcccttgtggtggctgtctcagaaatggacaagtcgctgtcagcacaagctcagatttactttgccagcagtaacggcccggtgcccgatcttgcgtatcaggtcgattttccacggctggaaattgggctgtaatttgtaatacgttgataccggcgctgaaacaacgctagttcccggcgatgtgctgtacgttcctgctggaggctggaattttccacaatggcaagcccccgctactacctttagcgtgctgtttggcaaacagcaactcggcttcaggcagtcgtgcaatgggatggcaaacaatatcaaaatctggcgaagcaacacgtcgcccgacgcggcccacgcataggttcttttctgctacaaacgctcaatgaaatgcaaatgcagccgcaggagcagcaaacggcaaggcttatcgtcgccagcctgcttaaccactgccgcgatttgcttggcagccaaatccagaccgcctcacgcagccaggcactatttgaagctattcgcgattatatcgacgaacgctatgcctccgcgcttacccgcgaatctgttgcacaggcgttttatatttcgccaaattacctctcgcacctgtttcaaaaaacgggggccattgggtttaacgaaaacctgagtcacacgcgactgggacacgcttagacgttattgaaaggctatgacctgaaggtaaaagaagtggcgcacgcctgcggctttgtcgacagcaactacttctgccgtctgtttcgtaaaaacaccgaacgctcgccgtcggaatatcgccggcacaggcggttacatgacaacaggatatgccaatttaaaactcccacggataaccctgaaaatccggaccgatatctgacatttcgccgcatcgataaagagacatccagtctccctaaaaaagtggctccatcatgcaaacgattatccgtgtcgagaagctcgccaaaaccttcaatcagcatcaggcgctgcatgcggttgatgctgattgaagggcgacgttcatctttcattcatccggacaaagacgtggacggtttccatccttacaacgtcggtcgtctgtgccagcgcgcgccgcgtctgcgtccctgcaccccgcgcggtatcgtcacgctgcttgagcgttacaacattgataccttcggcctcaacgccgtggtgattggcgcatcgaatatcgttggccgcccgatgagcatggaactgctgctggcaggttgcaccactacagtgactcaccgcttcactaaaaatctgcgtcatcacgtagaaaatgccgatctattgatcgttgccgttggcaagccaggctttattcccggtgactggatcaaagaaggcgcaattgtgatgatgtcaggcatcaaccgcggtgtggcaaccgatgcctcatgttttccgctggtgccatttgcaaaccgggtgagcggcaatcgttttgtctggcaggggcgtgagtatcaactgcaaccgaatgttgagtgggatgcgcactatctacacggcgatggctggctgggcgagtggcaatgtgtctcgcacagcgatgatagtttgtgtctggtgtatgaacatcgcagcggtgtctatcactatcgggtaagtcagggcgtttcatttaacggcggatacgctgacggtgacgctctctgtcaccaatcaaggggcagagacgctgccatttggtaccggctggcatccttattttccgttgtcgccgcaaacgcggattcaggcacaggcgagcggttactggctggagcgggagcagtggctggcgggtgagttttgcgagcagctaccgcaggaactggattttaaccagcccgcgccgttgccgcgccagtgggtgaacaatggttttgccggatggaatggtcaggcccgcatcgagcagccgcaggaaggttatgccatcacactggactagggatctcgat

SEQ ID NO: 22618 - DNA, 509 bp, Homo sapiens
  SIMILAR (2)..(124): 1001254mologous to Homo sapiens secreted modular calcium- binding protein,accession number AJ249900,Smith-Waterman Score=218.
gaaagccaagcccaagaaatgtgcccggcgtttcaccgactactgtgacctgaacaaagacaaggtcatttcactgcctgagctgaagggctgcctgggtgttagcaaagaaggacgcctcgtctaaggagcagaaaacccaagggcaggtggagagtccagggaggcaggatggatcaccagacacctaaccttcagcgttgcccatggccctgccacatcccgtgtaacataagtggtgcccaccatgtttgcacttttaataactcttacttgcgtgttttgtttttggtttcattttaaaacaccaatatctaataccacagtgggaaaaggaaagggaagaaagactttattctctctcttattgtaagtttttggatctgctactgacaacttttagagggttttgggggggtgggggagggtgttgttggggctgagaagaaagagatttatatgctgtatataaatatatatgtaaattgtatagttcttttgtacaggca

SEQ ID NO: 22619 - DNA, 465 bp, Homo sapiens
  SIMILAR (31)..(465): 1001254mologous to Homo sapiens secreted modular calcium- binding protein,accession number AJ249900,Smith-Waterman Score=791.
ggaggcaggaggccacgaattcggcacgagcgagacccgaccctgggcgtggtgcatcgaggtagatgcaaagatgctggccagagcaagtgtcgcctggagcgggctcaagccctggagcaagccaagaagcctcaggaagctgtgtttgtcccagagtgtggcgaggatggctcctttacccaggtgcagtgccatacttacactgggtactgctggtgtgtcaccccggatgggaagcccatcagtggctcttctgtgcagaataaaactcctgtatgttcaggttcagtcaccgacaagcccttgagccagggtaactcaggaaggaaagatgacgggtctaagccgacacccacgatggagacccagccggtgttcgatggagatgaaatcacagccccaactctatggattaaacacttggtgatcaaggactccaaactgaacaacaccaacataaga

SEQ ID NO: 22620 - DNA, 577 bp, Homo sapiens
  SIMILAR (229)..(348): 371254mologous to Homo sapiens Secreted protein encoded by alternate reading frame of clone ek591_1,accession number W85464,Smith-Waterman Score=63.
gaagggtgataaaacatagaagatttaataagagaaccaggggctccattcacctctcatggtccctcaggtcacatatgaaagcatttttacaagataggacctggaattcctcatttctcccatgttcctgcatgatcttaaacttcatgaagctatttttccagccctatggggtagttcttgctccaagtaagaggaatcttagttgtcataatcccttggagcctgggtttttggagaaagagatctccgtgcccttacagccctttttcttcaacggaatgtgggaagggacctggctttaaaacacggcacacaaacacacaaataaacaggacataagatgtcatcacgaaactgcccacggatctttaggcctttcttgcattggacataaatacattttctaagggggggggggaagaaattaaaaaacacctgttaattttaaacacattttttaagaaaaaaataattaaaaaagaaacagtgctcatgtcataagctatgttgacagttgccagtggaaatgttgggttggatcaaaaataaaataaaagttgacccggtcgca

SEQ ID NO: 22621 - DNA, 2926 bp, Homo sapiens
  SIMILAR (1859)..(2488): 971254mologous to Mus musculus SPARC-related protein,accession number AF070470,Smith-Waterman Score=1110.
atggagcatccgcctgttctggcagtccaaagagtggctttgccatcccgttcctcagaacccgagctgttcctcaaccctccaacagatgaggaaactgaggctcatagaggtatgtatcttgatcaaggtccaaggaccaaggactggatcccagtggcacctggtgtaagagagccttctcccctgggccctggcccatcatccctgtggctgctggtggtggggggcacagtggaggagggaagtcggaaacaccggcccacctgcaaaaaggacttcacaaagtcaaaaactgttgaccaagcacctactctgtgtgccagacaccagatgctgaacatccagtttctaataagtgaccgtgacccacagtgcaacctccactgctccaggactcaacccaaacccatctgtgcctctgatggcaggtcctacgagtccatgtgtgagtaccagcgagccaagtgccgagacccgaccctgggcgtggtgcatcgaggtagatgcaaagatgctggccagagcaagtgtcgcctggagcgggctcaagccctggagcaagccaagaagcctcaggaagctgtgtttgtcccagagtgtggcgaggatggctcctttacccagaacacaagctgcattcattcatcagtgtatcaaattggagagaacagcagcctcacatttctggagaaaagagaagaaagtgggcacctgcagagagactggtttcctctctggtttcctaggaaagcaagggtgattggtaggagagtgaaagaagaagcaacaaagaagcgagtctgggaggtgcagtgccatacttacactgggtactgctggtgtgtcaccccggatgggaagcccatcagtggctcttctgtgcagaataaaactcctcacatccagattctcttcactaaggcgaggctggctttgtgggcatgcgacctgtgcagttgctatcctgaaattctgaataattctgtctttgagtctgatgggacagtgaagatgcgattgcagggagaccaaggtaaagccctgggccctgcctccagtgcttatgccatgggatgggaagaagaggcgaagtcacccactctgaatgcaggagataaggatctggagaacctgctgcccccaaatgcaggtgctccaaagaagatgtggaagtggaacaggtgataccaccacccaccagaaaacagggaccaatgggccagatgggctactgctctttccctgggcaaaaatgagaaagtggttggaaagggaactcaaggatgtgagaactgcctgcaaaaaggcagctttcagcttgttttcacttcttttgggagggaacatgcagcctggcatttatctctcctcgccagcgaatgtcaatcaggaatcaaaaagccaaacagaggaggctttgaacggtgtcatcgggggtcgaagtgacttccagctgtctgtgcatgacgggtctaagccgacacccacgatggagacccagccggtgttcgatggagatgaaatcacagccccaactctatggattaaacacttggtgatcaaggactccaaactgaacaacaccaacataagaaattcagttaacttcttccatgatctgatcaagggcctcaaggaggccctagaccctggccctctcatggtgactctgctccctggagatacagccatcagcacagacataaggtggaaatgcatttcttttaagttttaccatgaaagtgacaccctggcctcctcgtgcatgactgtgactgtgttttctcatgtcaccttacctgtcacaggaactcagtctctgcgtgggaaggaagcggtcaccacttcagaccatgagaaagtctattcgtgtgaccaggagaggcagagtgccctggaagaggcccagcagaatccccgtgagggtattgtcatccctgaatgtgcccctgggggactctataagccagtgcaatgccaccagtccactggctactgctggtgtgtgctggtggacacagggcgcccgctgcctgggacctccacacgctacgtgatgcccagttgtgagagcgacgccagggccaagactacagaggcggatgaccccttcaaggacagggagctaccaggctgtccagaagggaagaaaatggagtttatcaccagcctactggatgctctcaccactgacatggttcaggccattaactcagcagcgcccactggaggtgggaggttctcagagccagaccccagccacaccctggaggagcgggtagtgcactggtatttcagccagctggacagcaatagcagcaacgacattaacaagcgggagatgaagcccttcaagcgctacgtgaagaagaaagccaagcccaagaaatgtgcccggcgtttcaccgactactgtgacctgaacaaagacaaggtcatttcactgcctgagctgaagggctgcctgggtgttagcaaagaagggcggcagaaaaaagcccctgtggtcaatggtgtgcaggggctccgggagcagagcctatgcgtcggtcatccatcccgtgtcgtgcggtgccccctggtggtagccttggcagtttcccccaggcaaaatgagcaggcacaaacccattcactggagtctgtcacggccaatgcctttctgatacagaaacctccttcctccataattaccacagcttttactactacttacatcttccaacttcgcaaagtccaggttttgacaagtggcattttcctgaagtatttttgcttagaatatactgggtctgacacattggcacctgagtgtgagaggagaaaatgtatttatgtcaatgcagaaagcctaaagatccgtgggcagtttcgtgatgacatcttatgtctgtttatttgtgtgtttgtgtgcgtgttttaa

SEQ ID NO: 22622 - DNA, 5298 bp, Homo sapiens; identical to SEQ ID NO: 19999
  SIMILAR (907)..(3306): 721254mologous to Homo sapiens Human PRO335 protein,accession number Y08095,Smith-Waterman Score=2905.

SEQ ID NO: 22623 - DNA, 1819 bp, Homo sapiens
  SIMILAR (444)..(1460): 561254mologous to Homo sapiens Human PRO335 protein,accession number Y08095,Smith-Waterman Score=814.
gggtcaccgttcgaggtaatgccccgagatgacgtgttctttatcgtggatgtgaagatttaggacattggggtatacagctgcacagctcagaacagtgcaggaagtatttcagcaaatgcaactctgactgtcctagaaacaccatcatttttgcggccactgttggaccgaactgtaaccaagggagaaacagccgtcctacagtgcattgctggaggaagccctccccctaaactgaactggaccaaagatgatagcccattggtggtaaccgagaggcacttttttgcagcaggcaatcagcttctgattattggggactcagatgtcagtgatgctgggaaatacacatgtgagatgtctaacacccttggcactgagagaggaaacgtgcgcctcagtgtgatccccactccaacctgcgactcccctcagatgacagttctccattgttagacgatgacggatggggccactgtgggctgtacgtgatcatagccgtggtttgctgtgtggtgggcacgtcactcgtgtgggtggtcatcatataccacacaaggcggaggaatgaagattgcagcattaccaacacagatgagaccaacttgccagcagatattcctagttatttgtcatctcagggaacgttagctgacaggcaggatgggtacgtgtcttcagaaagtggaagccaccaccagtttgtcacatcttcaggtgctggatttttcttaccacaacatgacagtagtgggacctgccatattgacaatagcagtgaagctgatgtggaagctgccacagatctgttcctttgtccgtttttgggatccacaggcccctatgtatttgaagggaaatgtgtatgggctcagaatcctttttgaaccatatcattacaggggtgcagtctggacccaaaaacaggtttaaagggaccacctatgagcccagttaccttaaagaaaaaaggatggctacccagtgttctcatcctttcagaaggaatcctggcggaacgggagctttcagtaatatattggggccccttttggggcccatgggaggaagctactttaacactagtttactctcaacatggaaggaccctggaaatggaaaaatctgtgtctaaacaagtcctctttagattttagtgcaaatccagagccagcgtcggttgcctcgagtaattctttcatgggtacctttggaaaagctctcaggagacctcacctagatgcctattcaagctttggacagccgtcagattgtcagccaagagccttttatttgaaagctcattcttccccagacttgggactctgggtcagagggaagatggggaaaggaaagggacagatttttcagggaaggaaaattcacattttggacctttaaaacagactttaaaaaactacaggactccaaattttcagtcttatgacttggacacatagactgwaatgagaccaaaggaaaagcttaacatactacctcaagtgaacttttatttaaaagagagagaatcttatgttttttaaatggggttatgaatttttaaagggataaaaaagctttatttatacagatgaaccaaaattacaaaaagttatgaaaatttttatactgggaatgatgctcatataagaatacctttttaaactattttttaactttgttttatgcaaaaaagtatcttacgtaaattaatgatataaatcatgattattttatgtatttttataatgccagatttctttttatggaaaatgagttactaaagcattttaaataataaaaaaaaaaaaaaaaa

SEQ ID NO: 22624 - DNA, 2948 bp, Homo sapiens
  SIMILAR (1115)..(2176): 961254mologous to Homo sapiens Human PRO335 protein,accession number Y08095,Smith-Waterman Score=1782.
atgagcgcgccgagcctccgtgcgcgcgccgcggggttggggctgctgctgtgcgcggtgctggggcgcgctggccggtcagacagcggcggtcgcggggaactcgggcagccctctggggtagccgccgagcgcccatgccccactacctgccgctgcctcggggacctgctggactgcagtcgtaagcggctagcgcgtcttcccgagccactcccgtcctgggtcgctcggctggacttaagtcacaacagattatctttcatcaaggcaagttccatgagccaccttcaaagccttcgagaagtggctggaaacaggattgttgaaatactccctgaacatctgaaagagtttcagtcccttgaaactttggaccttagcagcaacaatatttcagagctccaaactgcatttccagccctacagctcaaatatctcgaattgaaccgaaacaagattaaaaatgtagatggactgacattccaaggccttggtgctctgaagtctctgaaaatgcaaagaaatggagtaacgaaacttatggatggagctttttgggggctgagcaacatggaaattttgcagctggaccataacaacctaacagagattaccaaaggctggctttacggcttgctgatgctgcaggaacttcatctcagccaaaatgccatcaacaggatcagccctgatgcctgggagttctgccagaagctcagtgagctggacctaactttcaatcacttatcaaggttagatgattcaagcttccttggcctaagcttactaaatacactgcacattgggaacaacagagtcagctacattgctgattgtgccttccgggggctttccagtttaaagactttgatactccaaggaaatcggatccgttctattactaaaaaagccttcactggtttggatgcattggagcatctgcatttaaatacatcaagccttttgtgcgattgccagctaaaatggctcccacagtgggtggcggaaaacaactttcagagctttgtaaatgccagttgtgcccatcctcagctgctaaaaggaagaagcatttttgctgttagcccagatggctttgtgtgtgatgattttcccaaaccccagatcacggttcagccagaaacacagtagagaaataaaaggttccaatttgagtttcatctgctcagctgccagcagcagtgattccccaatgacttttgcttggaaaaaagacaatgaactactgcatgatgctgaaatggaaaattatgcacacctccgggcccaaggtggcgaggtgatggagtataccaccatccttcggctgcgcgaggtggaatttgccagtgaggggaaatatcagtgtgtcatctccaatcactttggttcatcctactctgtcaaagccaagcttacagtaaatatgcttccctcattcaccaagacccccatggatctcaccatccgagctggggccatggcacgcttggagtgtgctgctgtggggcacccagccccccagatagcctggcagaaggatgggggcacagacttcccagctgcacgggagagacgcatgcatgtgatgcccgaggatgacgtgttctttatcgtggatgtgaagatagaggacattggggtatacagctgcacagctcagaacagtgcaggaagtatttcagcaaatgcaactctgactgtcctagaaacaccatcatttttgcggccactgttggaccgaactgtaaccaagggagaaacagccgtcctacagtgcattgctggaggaagccctccccctaaactgaactggaccaaagatgatagcccattggtggtaaccgagaggcacttttttgcagcaggcaatcagcttctgattattgtggactcagatgtcagtgatgctgggaaatacacatgtgagatgtctaacacccttggcactgagagaggaaacgtgcgcctcagtgtgatccccactccaacctgcgactcccctcagatgacagccccatcgttagacgatgacggatgggccactgtgggtgtcgtgatcatagccgtggtttgctgtgtggtgggcacgtcactcatgtgggtggtcatcatataccacacaaggcggaggaatgaagattgcagcattaccaacacagatgagaccaactttgccagcagatattcctagttatttgtcatctcagggaacgttagctgacaggcaggatgggtacgtgtcttcagaaagtggaagccaccaccagtttgtcacatcttcaggtgctggatttttcttaccacaacatgacagtagtgggacctgccatattgacaatagcagtgaagctgatgtggaagctgccacagatctgttcctttgtccgtttttgggatccacaggccctatgtatttgaagggaaatgtgtatggctcagatccttttgaaacatatcatacaggtacctttggaaaagctctcaggagacctcacctagatgcctattcaagctttggacagccatcagattgtcagccaagagccttttatttgaaagctcattcttccccagacttggactctggtggttttatgattgccttgtggtaccacgggactcttagtccagaaccagcttttgtattaaaagctagggatgatgtaggtacctgtcatagtcatagagctggccagcattggctcaagtactacctccttcaagcactctcttttcatgaagaatgtgaagaaataaacccggaaattgaaacacaaatacaggaaattccaggctccaggataaggaacacagaaccattcaaagaacctattttaccttctagtgtcaacctggagtctgctacccctgggccatggacaggtagcagtccgaggcctgttggcagctgggccacacagcaggaggtgagcggtggctga

SEQ ID NO: 22625 - DNA, 417 bp, Homo sapiens
  SIMILAR (2)..(379): 681254mologous to Homo sapiens Membrane-bound protein PRO1106,accession number Y66718,Smith-Waterman Score=479.
ccacttcctgttgcattcgctggaaaatgtggaggacgtgctgtatttctggaagcattccacggtcctggacattggcgagtgcctgacagtgccggacgagttctcaaagcaagagaagctgacgggcatgtggtggaaacagctggtggccggcgcagtggcaggtgccgtgtcacggacaggcacggcccctctggaccgcctcaaggtcttcatgcaggtccatgcctcaaagaccaaccggctgaacatccttggggggcttcgaagcatggtccttgagggaggcatccgctccctgtggcgcggcaatggtattaatgtactcaagattgcccccgagtcacctatcaagttcatggcctatgaacaggtgctgaagacgcggctgaccttgcgccggacgggccagta

SEQ ID NO: 22626 - DNA, 262 bp, Homo sapiens
  SIMILAR (195)..(248): 721254mologous to Homo sapiens Membrane-bound protein PRO1106,accession number Y66718,Smith-Waterman Score=60.
gtcctggacattggcagtgcctgacagtgccggacgagttctcaaagcaagagaagctgacgggatgtggtggaaacagctggtggccggcgcagtggcaggtgccgtgtcacgacaggcacggcccctctggaccgcctcaaggtcttcatgcagatcaagagggccatcctggggcagcaggagacactgatgtgcaggagcgcttcgtggctggctccctggctggtgccacagcccaaccatcatttaccctatggag

SEQ ID NO: 22627 - DNA, 960 bp, Homo sapiens
  SIMILAR (106)..(273): 761254mologous to Homo sapiens Membrane-bound protein PRO1106,accession number Y66718,Smith-Waterman Score=222.
atgcgctatcgggcaggtaggtggcgaaatcttgcacgcgtgtggacggcggaaggtaaaaaccctgacggggctgccctagaggggattgagaaagcgggcgggactctgaagaactggtggcttcagcagtacagccacgactcggcagacccaggcatcctcgtgctcctggcctgcggtaccatatccagcacctgcggccagatagccagttacccgctggccctggtccggacccgcatgcaggcacaaggtgagggacccggagcccgtccccccaatccgtcacggcgcacacctcagccactggagactgatgatccaaccacaggatccctactctttggccacgagatcccagtacccagatcctggatcctagactcctatgccccaaccattgggtcatgggatcccagcacccagatcctggatcctagactgctatgccccaaccactggactctgaagaactggtggcttcagcagtacagccacgactcggcagacccaggcatcctcgtgctcctggcctgcggtaccatatccagcacctgcggccagatagccagttacccgctggccctggtccggacccgcatgcaggcacaaggaagccggtggtcatgccatgagcagccttatggagaggaccatgtggtaaggaactcagccaatagccatgtaactgagcttggaagaggatcttgctgtcctggccaacatctcactgcaattctatcagttgaattccctggatagtccaagctttgtggatccctccaccagaacaactggatcccagtacctgaatcctgaatcttagactcttatacttcaaacactgatcacgggaacagccggctcagcagctcctgagttcctaatgctcagaacatggatgagatgataaatgtttgttgtgttaagctgccaacctttggcgggggggtaatt

SEQ ID NO: 22628 - DNA, 1616 bp, Homo sapiens
  SIMILAR (136)..(471): 461254mologous to Oryctolagus cuniculus peroxisomal Ca- dependent solute carrier,accession number AF004161,Smith-Waterman Score=235.
aggcttgcggccgcgggagctgaccctgcggggtcccggggggggagggggagccgcgaagcccccactgaggccgcgcggtgccgggcctcccctcccccccgggcgggcgccatgcgggggagcccgggcgacgcggagcggcggcagcgctggggtcgcctgttcgaggagctggacagtaacaaggatggccgcgtggacgtgcacgagttgcgccaggggctggccaggctgggcgggggcaacccagaccccggcgcccaacagggtatctcctctgagggtgatgctgacccaaatggcgggctcgacctggaggaattttcccgctatctgcaggagcgggaacagcgtctgctgctcatgtttcacagtcttgaccggaaccaggatggtcacattgatgtctctgagatccaacagagtttccgagctctgggcatttccatcttgttggagcaggctgagaaaaattttgcacaggccgggaccgagacggcacaatgaccattgactggcaagaatggcgcgaccactttctgttgcattcgctggaaaatgtggaggacgtgctgtatttctggaagcattccacggtcctggacattggcgagtgcctgacagtgccggacgagttctcaaagcaagagaagctgacgggcatgtggtggaaacagctggcggccggcgcagtggcaggtgccgtgtcacggacaggcacggtccctctggaccgcctcaaggtcttcatgcaggtccatgcctcaaagaccaaccggctgaacatccttggggggctttgaagcatggtccttgagggaggcatccgctccctgtggcgcggcaatggtattaatgtactcaagattgcccccgagtcagctatcaagttcatggcctatgaacagatcaagagggccatccctggggcagtaggagacactgcctgtgctggagcgcttcgtggctggctccctggctggtgccacagcccaaaccattatttaaccctatggaagtgctgaagacgcggctgaccttgcgccggacgggccaatataaggggcttgctggactgcgccgaggcggtatcctggagagggaggggccccgtgccttctaccgcggctacctccccaacgtgctgggcatcatcccctatgcgggcatcgacctggccgtctacgagactctgaagaactggtggcttcagcagtacagccacgactcggcagacccaggcatcctcgtgctcctggcctgcggtaccatatccagcacctgcggccagatagccagttacccgctggccctggtccggacccgcatgcaggcacaagcctccatcgagggtggccccaagctgtccatgctgggtctgctacgtcacatcctgtcccaggagggcatgcggggcctctaccgggggatcgcccccaacttcatgaaggttattccagctgtgagcatctcctatgtggtctacgagaacatgaagcaggccttgggggtcacgtccaggtgagggacccggagcccgtccccccaatccctcaccccccacacctcagccactggagactgatgatccaaccacaagatccctactcttt

SEQ ID NO: 22629 - DNA, 2130 bp, Homo sapiens
  SIMILAR (1270)..(2016): 991254mologous to Homo sapiens DIPB protein,accession number AJ249128,Smith-Waterman Score=1297.
atggaccagagcggcctgctggcacttagagcagctgtgggagcagtggtaggtagcacccttgccgtggacattggcattcttgtgaaggactggcatccacggccgctgggaggcaagcattgccaactcctgggggccttcagatgcaggcaacataggagggggaaagaagagaggagaggggaaaccaaggaaaagaaaggggaaagagagaatgagagagggaaaagaaggagaatagagggggagagagacaaatatgtgaaagaaaatgagaaacaaacatgtgtgcagaaagagagacatagttgtactgggaattcccctaaccatatggccacagtgcaagctgagagaggggcactggacagccatggaggatggcatccctgggattattgtgcagttcaacaagggaggtatcatcagcttcttttgacaaaagaggaaattgaagttcagagaagtaaaaaaatgtgcctgcttcaggctttcctcatctgctgtcaaaaaagtcattttcttggcccaggctgtacaagaagcatggtgccagcatctgcatctggtgagagcctcaagctgcttccccttatggtggaagatgaaggggagcctgtcacagagcgagagcaggaagagggagggggagagagagagagggagagagagagaaagaaggagaaggagaaagagaaagagaaggagaaagaggagaaggaaaaggagaaggagaaggaggaggagaggataagagttcctctccctagggtagaattgaggttgacaaacatagctgctaaacaagtgggcaacaccatcttggatgttgcagctccagctgatcacccctctgaaagcagctgcgtatatgtacgatttgtgataaaaattccagtggctgcatcatttcgtttcaaaaagtcctatgttacaaacaatgtagaaagctgtgaagatggaatacactatttctggaagtctcacatgcactcagaaaacagctgcagctgcaaactgccctgtcctccacatctgcctgctgctgagcgtcttggagatgccttagagccattgctacctacgatgagaagacaacggcaatgccaaaacactggggactgtgacgggcggcgacaaattggcacaagagagactgaaatgcacagggacaccagcctagtggccgtgaaaactcaagttgacacttccagggagggaatgggggaggtggagcccaattcctgcttctggagagacacccacatggcctctggagtgggcgcggccttcgaggaactgcctcacgacggcacgtgtgacgagtgcgagcccgacgaggctccgggggccgaggaagtgtgccgagaatgcggcttctgctactgccgccgccatgccgaggcgcacaggcagaagttcctcagtcaccatctggccgaatacgtccacggctcccaggcctggaccccgccagctgacggagagggggcggggaaggaagaagcggaggtcaaggtggagcaggagagggagatagaaagcgaggcaggggaagagagtgagtcggaggaagagagcgagtcagaggaagagagcgagacagaggaagagagtgaggatgagagcgatgaggagagtgaagaagacagcgaggaagaaatggaggatgagcaagaaagcgaggccgaagaagacaaccaagaagaaggggaatccgaggcggagggagaaactgaggcagaaagtgaatttgacccagaaatagaaatggaagcagagagagtggccaagaggaagtgtccggaccatgggcttgatttgagtacctattgccaggaagataggcagctcatctgtgtcctgtgtccagtcattggggctcaccagggccaccaactctccaccctagacgaagcctttgaagaattaagaagcaaagactcaggtggactgaaggccgctatgatcgaattggtggaaaggttgaagttcaagagctcagaccctaaacactcccacggcccttctaccacttgggatcagcgatcttgtgtgatgcgggctggtgtgcgcaggggcaaaatatcagcgcttaggcttgcatggtccatgactcacggatag

SEQ ID NO: 22630 - DNA, 1058 bp, Homo sapiens
  SIMILAR (903)..(160): 871254mologous to Homo sapiens Human TANGO 215 protein,accession number Y88280,Smith-Waterman Score=1183.
gggactagaagggagtgagtgtagacatgtagggtcgtctgggacgaccccgaagcctcaacaagaatttttgagagagcgttctgccaagtaatgggcgcggagagcgggggccgcattgaaaagaccacgctctgtaaaaggagcctgggtccgttaatggaaccgagggtatgaggaccagcgtggttgtctccctcaaaaaggggcatggaaacccgtcaaaattttggacagccctgggagtggaaaaggacgtgaagtgaggatccttatgttgtgaataggagctgcccgctcgttgccacagacacgcttgatgatgtggccatcgcggttgtctccatcacaaccctcaacatagtcatactggcacatgtagtcaaactccaggctcaacatgacaaatcttagttggatgacaaacccaggtttagcatgaatggtccattcacagtgagcatttaggggatagctttccaacaaaatctgaccctttggggctcgcagaacctggccacatcgcatgcagtctcctccgtaccagcctgctcggcactctgcacagtagaaccccttcacatagaagtcatccaaggtacccccccatgagccatttcggcagctcttgcagttttcaaagatggtacaacctgggtggatcaggcaggagtcacactcattctcctcattcctgcagcaagggatggtataacccacgacttccctctttccggggcagacgcactcaatctgatcatattcacagcactcccgacacatgatattccactctgctccagggcaggcttcattaatgactgtgtactctcttggcaaggacgagatgagaaggagctgaagaaaagtgagccccaactgcgtccagcaacccagctccatccttgccgcggctggtgcccgagcgtcttctggggagggagaggagggacccagggaggccgggggcaggcgggttttacagggacctccccgagccccagctgagcgggagctcggatttcagctcgccaggctctcccatcctcatcacgaaa

SEQ ID NO: 22631 - DNA, 699 bp, Homo sapiens
  SIMILAR (78)..(413): 411254mologous to Mus musculus T2,accession number X67863,Smith-Waterman Score=132.
atggtgccagcatctgcatctggtgagagcctcaagctgcttccccttatggtggaagatgaaagggagcctgtcacagagcgagagcagaaaaagggagggggagagagagagagggagagagagagaaagaaagagaaggagaaagagaaagagaaagagaaagaggagaaagaaaaggagaaagagaaaggaggagaggttgacagcctcctttccacaatcggttctcagaggggcagggcaggagcttcctttgcagccgccgtccgcgggtctccaggcgtggccacacctcccggggccccgcaagggttaaggcagcagagaggagaggtttgggctgacgtcgctctggctgaaggtggttcccctcagatgaggatgggagagcctggcgagctgaaacccgagctcccgctcagctggggctcggggagtagacgctcgggcaccagccgcggcaaggatggagctgggttgctggacgcagttggggctcacttttcttcagctccttctcatctcgtccttgccaagaggtactttgtctatgagacagactcagggcccacgtgggttgagagtggagtttacagacaggatctggggccaagagaagcacttcagtaccgagtgagcagccccagggaggatggagagaattcctctgctctggaaattttgtctttaatttaa

SEQ ID NO: 22632 - DNA, 399 bp, Homo sapiens
  SIMILAR (160)..(261): 701254mologous to Homo sapiens 19-JAN-1995 DNA encoding methenyltetrahydrofolate synthetase,accession number T77304_cd1,Smith-Waterman Score=114.
cgagcaagctccaatcttagatatttgggaacatgaacaagaaacaactgatatgctaattataaagcattcttctccatgccttttaccatagtcccaaagaacttccatttgaccatactagctccttaataggggaagtaacctgagaatggcctcattggtctttcttaaaaaatagtgttgagtttaaacatcccagtgaatgaaaacgacatgaaggtagatgaagtcctttacgaagactcgtcaacagcttaaatctggattactacagccaaataatcagtgttttatatgagagtaaagcaaagtatgtgtatttttcccttgtcaaaaattagttgaaattgttcattaatgtgaatacagactgcattttaaaattgtaattatgaa

SEQ ID NO: 22633 - DNA, 1724 bp, Homo sapiens
  SIMILAR (923)..(1390): 461254mologous to Homo sapiens 5,10-methenyltetrahydrofolate synthetase,accession number L38928,Smith-Waterman Score=202.
atggccctcaaagaaattttctgtccagtgagggagacagagacgtgtaccatcaactgtggtacaagaatatccccgagtatcctgcatgtcgggttgccatatccatcaaccccaaatgtcaagccagagagagaaggctgcggaggaggcgtcagtggaaactctaagcagccaggggcactggaaactgcagaaagcataggaaagaaggaaggaaggagggaagagggaagccgacctgagtctgcttctagcctgagtctgcttctcagtctagcctatgatgttgacaaatctgctcaaatctgtactcgaattcacagctcggtacccttagaagctgtatacccaggctacatccaccaatccattattaatcaagctgatctttcggcgctagccccatatgacccctgtgtctgtcagatacacaagtatcacggtgcttacaattgcctacagtattcggtacaaaatacgctgtacagtcccactactgaacagtacaagagatgccaggcaccgtgggtactgccggccatctttaccatccccgccagtggcgctgccgcctccgcggtcccggtgagggcccaggctcagggaggtcaggcggcagggcagcgacggcgcctcgccaccgctcccctaaccggggagggcgagccggaccacggggaccgcacgagggctgggtcccaagggccagaggcgaggccgcggatccacctgggagcggccaggggcggagaccgaacccgagggcgcccagggcgccgagggcgggactggactcggcttgggcgtgagatggcggcggcagcggtgagcagcgccaagcggagcctgcggggagagctgaagcagcgtctgcgggcgatgagtgccgaggagcggctacgccagtcccgcgtactgagccagaaaggtgattgcccacagtgagtatcaaaagtccaaaagaatttccatctttctgagcatgcaagatgaaattgagacagaagagatcatcaaggacaatctgccaacgaggcaaaaatctgcttcatccctccggtacggttttcaagagcaatcaccatggatatggtgagaataggatcacccagagggaaatttttttaatttcccaaaaacatcctgggaatattccctcaggcttggtgagggttgatgttcgtgaagaaggccttgtcccaccagggggacttggatcctcatccttccatgcccccaggccctggggttggaccaaaaccatgggcaaccccgactgggggagggggcaaggggcctacctatgatgcctatcctgaaagcgcctgttttgcagccattcagggaagttgaagccccctacaccccctggcggttggcttttcaaagaacagatttgccctcccaggtccccagtgaatgaaaacgacatgaaaggtagatgaagtcctttaccgaagactcgtcaacagcttaaatctggattactacagccgaaataatcagtgttttatatgagagtaaagcaaagtatgtgtatttttcccttgtcaaaaatttagttgaaattgttcattaatgtgaatacagactgcattttaaaattgtaattatgaaataccttatataaaaccatctttaaaaaccaatagaagtgtgaatagtagaatattaattaaaatggaggctatcagcctgtgattttcagcttaacttcctgg

SEQ ID NO: 22634 - DNA, 816 bp, Homo sapiens
  SIMILAR (259)..(789): 671254mologous to Rattus norvegicus TIP120,accession number D87671,Smith-Waterman Score=587.
atgggtcagagaaattattcaaaatgcagagcagagacagcaaaagatggagaatatagaggagagataaaggaggatgttcaaacgcaccgcaaaaaagctaaaaaccttgaaaaaggagtagacgaatggctaactagaataaacagtgtagagaggtccttaaatgacctgatggagctgaaaaccatggcacaagaactacatgatgcatgcacaagcttcagtagccaatttgatcaaatggaagaaagggtatcagtgattgaagatcgaatgaatgaaatgaagtttatggctacaaatgatttgatgacggaactgcagaaagattccatcaagttggatgatgatagtgaaaggaaagtagtgaaaatgattttgaagttattggaagataaaaatggagaggtacagaatttagctgtcaaatgggtctcaccttgtctcccaggtgatttcctaaaaactttggaagacccagatttgaatgtgagaagagtagccttggtcacatttaattcagcagcacataacaagccatcattaataagggatctattggatactgttcttccacatctttacaatgaaacaaaagttagaaaggagcttataagagaggtagaaatgggtccatttaaacatacggttgatgatggtctggatattagaaaggcagcatttgagtgtatgtacacacttctagacagttgtcttgatagacttgatatctttgaatttctaaatcatgttgaagatggtttgaaggaccattatgatattaagcatactcctcttcaagtttctttgtaa

SEQ ID NO: 22635 - DNA, 368 bp, Homo sapiens
  SIMILAR (217)..(366): 941254mologous to Rattus norvegicus TIP120,accession number D87671,Smith-Waterman Score=233.
ataaaggaggatgttcaaacgcaccgcaaaaaagctaaaaaccttgaaaaaggagtagacgaatggctaactagaataaacagtgtagagaggtccttaaatgacctgatggagctgaaaaccatggcacaagaactacatgatgcatgcacaagcttcagtagccaatttgatcaaatggaagaaagggtatcagtgattgaagatcgaatgaatgaaatgaagtttatggctacaaatgatttgatgacggaactgcagaaagattccatcaagttggatgatgatagtgaaaggaaagtagtgaaaatgattttgaagttattggaagataaaaatggagaggtacagaatttagctgtcaaatg

SEQ ID NO: 22636 - DNA, 6140 bp, Homo sapiens
  SIMILAR (498)..(1628): 991254mologous to Rattus norvegicus TIP120,accession number D87671,Smith-Waterman Score=1918.
  misc_feature (1)...(6140): n = a,t,c or g
atgctcatattgatgagggcctttgtgctgcaccatcccatggcaaaacgcaggaagcgcccgcgtctgccgcccccgcccccggagcgaaggaggcgggctttggccttttgccctagggagcgagtgcggagcgagtgggagcgagacggccctgagtggaagtgtctggctccccgtagaggcccttctgtacgccccgccgcccatgagctcgttctcacgcgaacagcgccgtcgttaggctggctctgtagcctcggcttaccccgggacaggcccacgcctcgccagggagggggcagcccgtcgaggcgcctccctagtcagcgtcggcgtcgcgctgcgaccctggaagcgggagccgccgcgagcgagaggaggagctccagtggcggcggcggcggcggcggcggcggcggcggcggcggcggcggcggcagcggcagcgggcagcagctccagcagcgccagcaggcgggatcgaggccgtcaacatggcgagcgcctcgtaccacatttccaatttgctggaaaaaatgacatccagcgacaaggactttaggtttatggctacaaatgatttgatgacggaactgcagaaagattccatcaagttggatgatgatagtgaaaggaaagtagtgaaaatgattttgaagttattggaagataaaaatggagaggtacagaatttagctgtcaaatgtcttggtcctttagtgagtaaagtgaaagaataccaagtagagacaattgtagataccctctgcactaacatgctttctgataaagaacaacttcgagacatttcaagtattggtcttaaaacagtaattggagaacttcctccagcttccagtggctctgcattagctgctaatgtatgtaaaaagattactggacgtcttacaagtgcaatagcaaaacaggaagatgtctctgttcagctagaagccttggatattatggctgatatgttgagcaggcaaggaggacttcttgttaatttccatccttcaattctgacctgtctacttccccagttgaccagccctagacttgcagtgaggaaaagaaccattatcgctcttggccatctggttatgagctgtggaaatatagtttttgtagatcttattgaacatctgttgtcagagttgtccaaaaatgattctatgtcaacaacaagaacctacatacaatgtattgctgctattagtaggcaagctggtcatagaataggtgaataccttgagaagataattcctttggtggtaaaattttgcaatgtagatgatgatgaattaagagagtactgtattcaagcctttgaatcatttgtaagaagatgtcctaaggaagtatatcctcatgtttctaccattataaatatttgtcttaaatatcttacctatgatccaaattataattacgatgatgaagatgaagatgaaaatgcaatggatgctgatggtggtgatgatgatgatcaagggagtgatgatgaatacagtgatgataatgacatgagctggaaagtgacacgtgcagctgcgaagtgcttggatgctgtagttagcacaaggcatgaaatgcttccagaattctacaagaccgtctctccctgcactaatatccagatttaaagagcgtgaggagaatgtaagggcagatgtttttcacgcatacctttctcttttgaagcaaactcgtcctgtacaaagttggctatgtgaccctgatgcaatggagcagggagaaacacctttaacaatgcttcagagtcaggttcccaacattgttaaagctcttcacaaacagatgaaagaaaaaagtgtgaagacccgacagtgttgttttaacatgttaactgagctggtaaatgtattacctggggccctaactcaacacattcctgtacttgtaccaggaatcattttctcactgaatgataaatcaagctcatcgaatttgaagatcgatgctttgtcatgtctatacgtaatcctctgtaaccattctcctcaagtcttccatcctcacgttcaggctttggttcctccagtggtggcttgtgttggagacccattttacaaaattacatctgaagcacttcttgttactcaacagcttgtcaaagtaattcgtcctttagatcagccttcctcgtttgatgcaactccttatatcaaagatctatttacctgtaccattaagagattaaaagcagctgacattgatcaggaagtcaaggaaagggctatttcctgtatgggacaaattatttgcaaccttggagacaatttgggttctgacttgcctaatacacttcagattttcttggagagactaaagaatgaaattaccaggttaactacagtaaaggcattgacactgattgctgggtcacctttgaagatagatttgaggcctgttctgggagaaggggtccctatccttgcttcgtttcttagaaaaaaccagagagctttgaaactgggtactctttctgcccttgatattctaataaaaaactatagtgacagcttgacagctgccatgattgatgcagttctagatgagctcccacctcttatcagcgaatgtgatatgcatgtttcacaaatggccatcagttttcttaccactttggcaaaagaatatccctcctccctttcaaagataagtggatccattctcaatgaacttattggacttgtgagatcacccttattgcaggggggagctcttagtgccatgctagactttttccaagctctggttgtcactggaacaaataatttaggatacatggatttgttgcgcatgctgactggtccagtttactctcagagcacagctcttactcataagcagtcttattattccattgccaaatgtgtagctgcccttactcgagcatgccctaaagagggaccagctgtagtaggtcagtttattcaagatgtcaagaactcaaggtctacagattccattcgtctcttagctctactttctcttggagaagttgggcatcatattgacttaagtggacagttggaactaaaatctgtaatactagaagctttctcatctcctagtgaagaagtcaaatcagctgcatcctatgcattaggcagcattagtgtgggcaaccttcctgaatatctgccgtttgtcctgcaagaaataactagtcaacccaaaaggcagtatcttttacttcattccttgaaggaaattattagctctgcatcagtgggtgggccttaaaccatatgttggaaaacatctgggccttattacttaaagcactgttgagtgtgcaggagggaggggaccaggaaatgttgttgctggaatgtctagggaaaactcactcttaattggatccaggaaacttttccttccacggcttaaggggtacttgatatcaggctcatcatatgcccgaagctcagtggttacggctgtgaaatttacaatttctgaccatccacaacctattgatccactgttaaagaactgcataggtgatttcctaaaaactttggaagacccagatttgaatgtgagaagagtagccttggtcacatttaattcagcagcgcataacaagccatcattaataagggatctattggatactgaccttccacatctttacaatgaaacaaaagttataaaggagcttataagagagggacaaatgggtccatttaaacatactgttgaggatggcctggatattagaaaggcagcatttgagcgtatatacacacttctagacagccgtcttgatagacttgataaatttgaatttctaaatcatgttgaagatggcttgaaggaccattatgatattaagatgctgacatttttaatgttggtgagactgtctaccctttgtccaagtgcagtactgcagaggttgggaccgactgtttgagcccattacgtgccaacatgtacaactaaggtaaaggcaaactcagtaaagcaggagtttgaaaaacaagatgaattaaagcgatctgccatgagagcagtagcagcactgctaaccattccagaagcagagaagagtccactgatgagtgaattcccagtcacagatcagttctaacccctgagctggcgggctatctttgaaaggtatcccagaaagattcatccatctactaacttggaatccaatggacaactagtccagatgtttgttcaccatcggggacccattacatatggaccatacaatgcactgaaattgacaggttaaccataagacagggaaagaggaagtgtcttaaaagctttcaaaatgttccactttttttttccttcatgggagactgtttgttttggctttctttccattgttgtttttgtagggcntttatttcagaaatgtgtatttccataatccagaggttgtaaaaccactagtgttttagtggttacagcaacatttgaaatggaaactaaaagttaggattttatggagtatggagataggggtccccgtacccattacccccgtaaggtttagggattaaaaggttaaaaattttggtgaccatgaatttccttcctttaataaattttcctcatttaaaaatccaaaaatccttgccaaaacaaaaacccatgtttcctttttccttgtataactttttgttttccagcaacataaattgatttttagtctggcagacaagaatatcccatataagatttgttaaccatttcagagagtttggcaatttttaaaagataataaggtatcatttttaagtatgaaaattaacaatatccctgttgcgcacactaattttgcatgagtaagtttacaaatatgtatcgtctgtaaagcagcatgtgcagattattcataatatagaagttaaaataagtattagtgcaattttcagatatttatttttgcacagaaaacacattatctggagagaaagaaaggagaatttttgagacttgggttttcttaatgccagtgtgaatttgcagatgttttcagaaaatcaagtcacagtaacaatttgccacttttttctgttataaatcttcttacttaaattttgaatatttagtttttctcagttacccatttgtgtgtgtgtgattccacttagaaattcttaaaaccagatttttcctttcaatcccgtttggatgtcctacattcccttatcaaaggatataaaatactgtgtatgccttttgaattttatttttaggaaaattctgaagcccagcctatcacaggtttgttagcctaataatagtattttcttttagttgagttaggtttttccccatctcctgtagagcgaatttacaaattgtattgggtaagtgttccactacttttcctgattaagggatctgtgctggggaacaaagcttttgcagtcccttatatggtggttaaaattttattttaacaaatccttcagtgagctcatttcacacggaagccttttccttaaaatttgtggggctcctgtaaccagtaggaactaattctgaaataaaagacatctcctaatgctgtgcaaacatagtttacaatgtattgaaggaggcagttgttaaattgagtgaccaatttaagcaatcagatatttgaaaactgcaccctttagttttgaaactgtgaattagaaacacttttcctgctgtattactacctgcttttaacatccaaatatacagtgattttaaatgataacatactgtgggttattaggattaacagcttgattttgaatgttcaggatggataatgcaggaaggacatcacttctagtaagggattttggactagtgcattgatgttgaagttgggtgccctttcaaaatgtggcaggtgataatccttttaccataatttgcataaaactgtaatagaagtttattttgagatgttagtatattatgtactatgcatttctgtggtatagatgttgtggatatatttaagtatttggttacatggttttacaataaattacaatactgcaggctctaggactgaacaggagactgacatgcatatgttgtgtgaatgtcttagttgggtaaagttaaatccaaatacttcaactggcaaaaaaaaa

SEQ ID NO: 22637 - DNA, 411 bp, Homo sapiens
  SIMILAR (2)..(211): 921254mologous to Homo sapiens PRO1999,accession number AF113699,Smith-Waterman Score=317.
  misc_feature (1)...(411): n = a,t,c or g
aaaggagtctcagcgtagtgggaatgtagctgaactggctctgaaagctactctggtggagagttctacttcaggtttcactcctggtggaggaggctcttcagtctccatgattgccagtagaaagccaacagacggtgcttcctcatcaaattgtgtgactgatatttcccaccttgtcagaaagaaggctgagaatcaggctgaaagccgggcagcagtggaggggacagtggaggctggagctacagttgaaagcactgcatgttaagagggggcacagccctcctcccaagggaaagtgtttttgtatataatgtattttttcacttttggaggattctttttgtataacttcaataaagattgtaagcnnnnnnnnnnnnnnngggggcgcccgttcaagagaaa

SEQ ID NO: 22638 - DNA, 451 bp, Homo sapiens; identical to SEQ ID NO: 3230
  SIMILAR (344)..(409): 771254mologous to Homo sapiens Human secreted protein, SEQ ID NO: 5784,accession number G01703,Smith-Waterman Score=74.

SEQ ID NO: 22639 - DNA, 1122 bp, Homo sapiens; identical to SEQ ID NO: 3231
  SIMILAR (97)..(759): 891254mologous to Homo sapiens histone-binding protein,accession number M97856,Smith-Waterman Score=1001.

SEQ ID NO: 22640 - DNA, 444 bp, Homo sapiens
  SIMILAR (259)..(339): 961254mologous to Homo sapiens PRO1999,accession number AF113699,Smith-Waterman Score=127.
ggtccctcgatgaatatatgagaaggcacttgatgggcaaaaccattaggtcacttccttccacgtgatgattattggctctgtcagccccattatcacagagtattcaagaaatactttgtggtcactgccctcttaatatagggagcaaagcagagtttgggtgacttgtatatgcttcctatgactgaggcctcagttatataagacagaatggcttaaactaggctcactgatgcccaggttctgtttgtcttccaggctgagaatcaggctgaaagccgggcagcagtggaggggacagtggaggctggagctacagttgaaagcactgcatgttaagagggggcacagccctcctcccaagggaaagtgtttttgtatataatgtattttttcacttttggaggattctttttgtataacttcaataaaaattgtaag

SEQ ID NO: 22641 - DNA, 757 bp, Homo sapiens
  SIMILAR (686)..(745): 751254mologous to Homo sapiens Human secreted protein, SEQ ID NO: 5785,accession number G01704,Smith-Waterman Score=80.
tcaggagttgtagtgtcaagattccagttcttcttatgcgacttgctggagaagcaggaagttgctgtttattggagaagtcgggctagggagggaaacaatcccgcgcacccatatggagagggcaggaggtgtctagatagtggtaggccggcgggggacggagggtatgggtggtgagtcctggccctttaaacccgagggggaggatccggaagtggatgggcggggcgaagggtcctcgtatataaaagggccccggccgcgcggggtctctaatctgccattttctgtccctgagtgagtctctggcgtcccaaattgcctgcgtttctcgcaggctctattccgttcgctggttcgccacctcaggggaacgatggccatggagtccacagccactgccgccgtcgccgcggagctggtttctgccgacaaagttgaagatgttcctgctccttctacatctgcagataaagtggagagcaaccattaatctgctttctgtcactgaagatgggttgcattttgtagaatattatctaaatagaatcatacatctggatgtggatagtgaagctaagaaactattgggtttaggacagaaacatctggtgatgggggatattccagcagctgtcaatgcattccaagaagcagctagtcttttaggtaagaaagtatggggagacagctaatgaagtgtggagaagccttctttttctatgggaaatcacttctggagtggcaagaatgg

SEQ ID NO: 22642 - DNA, 1099 bp, Homo sapiens
  SIMILAR (763)..(1098): 971254mologous to Homo sapiens histone-binding protein,accession number M97856,Smith-Waterman Score=531.
tccctgagtgagtctctggcgtcccaaattgcctgtttttctcgcaggctctattccgttcgctggttcgccacctcaggggaacgatggccatggagtccacagccactgccgccgtcgccgcggagctggtttctgccgacaaaattgaagatgttcctgctcctttctacatcctgcagataaagtggagagtctggatgtggatagtgaagctaagaaactattgggtttaggacagaaactatctggtgatgggggatattccagcagctgtcaatgcattccaggaagcagctagtcttttaggtaagaagtatggagagacagctaatgagtgtggagaagccttctttttctatggggaaatcacttctggagttggcaagaatggagaatggtgtgttgggaaacgcctttggaaggtgtgcatgtggaagaggaagaaggagaaaaaacagaagatgaatctctggtagaaaataatgataacatagatgaaactgaaggctcggaagaggatgataaagaaaatgataagactgaagaaatgccaaatgattcagtccttgaaaacaagtctcttcaagaaaatgaggaggaggagattgggaacctagagcttgcctgggatatgctggatttagcaaagatcatttttaaaaggcaagaaacaaaagaagcacagctttatgctgcccaggcacatcttaaactcggagaagttagtgttgaatctgaaaaactatgtgcaagctgtgggaggagttccagtcctgccttaacctacaggaccagtacctgggagcccacgaccgtctccttgcagagacccactaccagctgggcttggcttatgggtacaactctcagtatgatgaggcagtggcacagttcagcaaatctattgaagtcattgagaacagaatggctgtactaaacgagcaggtgaaggaggctgaaggatcgtctgctgaatacaagaaagaaattgaggaactaaaggaactgctacccgaaattagagagaagatagaagatgcaaaggagtctcagcgtagtgggaatgtagctgaactggctctgaaagctactctgg

SEQ ID NO: 22643 - DNA, 3258 bp, Homo sapiens
  SIMILAR (781)..(2442): 851254mologous to Homo sapiens histone-binding protein,accession number M97856,Smith-Waterman Score=2218.
gcctgagtgagtctctggcgtcccaaattgcctgtttttctcgcaggctctattccgttcgctggttcgccacctcaggggaacgatggccatggagtccacagccactgccgccgtcgccgcggacgtggtttctgccgacaaaattgaagatgttcctgctccttctacatctgcagataaagtggagagtctggatgtggatagtgaagctaagaaactattgggtttaggacagaaacatctggtgatggggggtattccagcagctgtcaaatgcattccagggagcagctaagtcttttaaggtaagaagtatggagagacagctaatgaagtgtggagaagccttctttttctatggggaaatcacttctggagttggcaagaatggagaatggtgtgttgggaaacgccttggaaggtgtgcatgtggaagaggaagaagggagaaaaaacagaagatgaatctctggtagaaaataatgataaccatagatgaggaagcaagggaagagttgagagaacaggtttatgacgccatgggagaaaaagaagaagccaaaaaaacagaagacaagtctttggcaaagcctgaaactgataaagaacaggacagtgaaatggagaagggtggaagagaagatatggatataagtaaatctgcagaggagccacaggaaaaagttgacttgactctagattggttaactgaaacctctgaagaggcaaaaggaggagcagcaccagaaggaccgaatgaagctgaggtcacttctgggaagccaggacagggaggtaccagatgctgaggaagaaaaatcagtttctggaactgatgtccaagaagagtgcagagaaaaaggaggtcaggagaagcagggagaggtaattgtgagcatagaggagaagccaaaagaagtttcagaagagcagcctgtggtgactctagaaaagcagggcactgcagtggaggtagaagcagagtctttagacccgacagtcaagccagtggatgtgggtggggacgagccagaggagaaggtagttacctctgaaaacgaggcaggaaaggcggttcttgaacaactggtaggtcaagaagtaccacctgctgaagagtcaccagaggtgcaaacagaggctgcagaggcctcagctgtagaggctggatcagaagtctctgaaaagcctgggcaggaggctccagttctccctaaggatggtgcagtcaatggaccgtcagttgtaggagatcagactcctattgaaccacagacttctatagaaagactgacagaaacaaaagatggctcaggactagaggagaaggtcagggcaaagctggttcctagtcaggaggagactaagctgtctgtagaagagtctgaggcagctggagatggggttgataccaaggtagcccagggagctactgagaaatcacctgaagacaaagttcagatagctgctaatgaagagacacaagagagagaagaacagatgaaagagggtgaagaaactgaaggctcggaagaggatgataaagaaaatgataagactgaagaaatgccaaatgattcagtccttgaaaacaagtctcttcaagaaaatgaggaggaggagattgggaacctagagcttgcctgggatatgctggatttagcaaagatcatttttaaaaggcaagaaacaaaagaagcacagctttatgctgcccaggcacatcttaaactcggagaagttagtgttgaatctgaaaactatgtgcaagctgtggaggagttccagtcctgccttaacctgcaggaacagtacctggaagcccacgaccgtctgcttgcagagacccactaccagctgggcttggcttatgggtacaactctcagtatgatgaggcagtggcacagttcagcaaatctattgaagtcattgagaacagaatggctgtactaaacgagcaggtgaaggaggctgaaggatcgtctgctgaatacaagaaagaaattgaggaacttaaggaactgctaccccgaaattagagagaagatagaaaatgcaaaagagttctcagcgtaagtggaaatgtagctgaacttgttttctgaaagctactctggtggagagttctaccttccaggtttcacctcctggtggaggaggctcttccagtctcccatgattgcccagtagaaaacccaacagacggtgcttcctcatcaaatttgtgtgacttgatatttccccacctttgtcagaaagaagagggaaccccagaggaagagagtccccgggaaaagatgatgcaaagaaagccacaacaagagccggaggtgaaacaggaggcagtggggatgctgctccccagtggaaatgaagttgcggaaaacatggaggaggaggctgagaatcaggctgaaacgcggagcagcagtggaggggacagtggaggctggagctacagttgaaagcactgcatgttaagagggggcacagccctctctcccaagggaaagtgtttttgtatataatgtatttttttcacttttggaggattctttttgtataacttcaataaagattgtaagcaaaggttgaggctttgatggtttttttcttacttattggctgaatctgccttggagcactgctggttttatatattagccaaaggttttgttctggccttctgtactgatctgtgttcctgatcctaattcctatctgtctaacgtggaggtgatcaagtgtggctgtaggcctttgttttccaatggtgctatattctgttttcaaacacttcactgaacccagctgtcttgcaaactttcagtggtgctgtccctggatgggggctacaaaaacaagaattggtgaagatcttgctcttcagtgctgaaaatggatgatggactttggctgtgagccaggcctaggatggttcttgtcctatatccacctagtcttcacctggggctataattctgtcctggaaaaagaactctgaaaacctgggtcaggggaaatgattccttaaggaaaacggtctgcatttgatctctggtttgaaagtagccaaggggactgatggtggacactccagatgtggttggaagcatatgtggggaggctggctggttgagttttgttattttctgtatagaaaggttgagatatatcaacacttggaattgttacccatctgcagaattgacttctcaaataaagatgctaaaaatcaaaaaaaaaaaaaaaaa

SEQ ID NO: 22644 - DNA, 416 bp, Homo sapiens
  SIMILAR (414)..(328): 1001254mologous to Mus musculus ring-box protein 1,accession number AF140599,Smith-Waterman Score=167.
  misc_feature (1)...(416): n = a,t,c or g
agggcgggtatataaaaaacccctnnnnnnnnnnnnnnnnnnnnnnnnnttttccagaatccaactggactttatttgacacagaatacaatatggctacagaaacagcaaactgaaaaaacaaagcagaaaaaaacacagttccatccaatttgtaattaggtaacagcagggaaagtcattaaatgaataacaaaacaattaagcttgatggaagaagtcttttcctagtgcccatacttttggaattcccactctctgttgtccaatggacacacctgtcgtgttttgagccagcgagagatgcagtggaagtgaaaagcatgaaagatccataatgtggttcctgcagatggcacagttatcaaccacaatatcccaggcccagagggctactgcattccactttttcactt

SEQ ID NO: 22645 - DNA, 398 bp, Homo sapiens
  SIMILAR (398)..(351): 1001254mologous to Mus musculus ring-box protein 1,accession number AF140599,Smith-Waterman Score=81.
tttttttccagaatccaactggactttatttgacacagaatacaatatggctacagaaacagcaaactgaaaaaacaaagcagaaaaaaacacagttccatccaatttgtaattaggtaacagcagggaaagtcattaaatgaataacaaaacaattaagcttgatggaagaagtcttttcctagtgcccatacttttggaattcccactctctgttgtccaatggacacacctgtcgtgttttgagccagcgagagatgcagtggaagtgaaaagcatggttacagactccccatgcgacagtacactcttctgaagtagcggacgctggttagcttgacattctatgcctttttcacttcaaagcgcttcttgcccgcgccgctgttggtgccgct

SEQ ID NO: 22646 - DNA, 358 bp, Homo sapiens
  SIMILAR (356)..(228): 1001254mologous to Mus musculus ring-box protein 1,accession number AF140599,Smith-Waterman Score=241.
  misc_feature (1)...(358): n = a,t,c or g
ctcannnnnnnnnnnnnnnnnnnnnnnnnnnnnnnnnnnnnnnnnnnnnnnnnnnnnnnnnnnnnnnnnnnnnnnnnnnnnnnnnnnnnnnnnnnnnnnnnnnnnnnnnnnncannnnnnnnnnnnnnnnnnnnnnnnnnnnnnnnnnnnnnnnnnnnnnnnnnnnnnnnnnnnnnnnnnnnnnnnnnnnnnnnnnnnnnnnnnnnnnnnnnnnnnnnnnnnnnnnnaagatccataatgtggttcctgcagatggcacagttatcaaccacaatatcccaggcccagagggctactgcattccactttttcacttcaaagcgcttcttgcccgcgccgctgttggtgccgctcgggg

SEQ ID NO: 22647 - DNA, 386 bp, Homo sapiens
  SIMILAR (384)..(256): 1001254mologous to Mus musculus ring-box protein 1,accession number AF140599,Smith-Waterman Score=241.
  misc_feature (1)...(386): n = a,t,c or g
tttttaaaatatctcannnnnnnnnnacatcannnnnnnnnnnnnnnnnnnnnnnnnnnnnnnnnnnnnnnnnnnnnnnnnnnnnnnnnnnnnnnnnnnnnnnnnnnnnnnnnnnnnnnnnnnnnnnnnnnnnnnnnnnncannnnnnnnnnnnnnnnnnnnnnnnnnnnnnnnnnnnnnnnnnnnnnnnnnnnnnnnnnnnnnnnnnnnnnnnnnnnnnnnnnnnnnnnnnnnnnnnnnnnnnnnnnnnnnnnnaagatccataatgtggttcctgcagatggcacagttatcaaccacaatatcccaggcccagagggctactgcattccactttttcacttcaaagcgcttcttgcccgcgccgctgttggtgccgctcgggg

SEQ ID NO: 22648 - DNA, 666 bp, Homo sapiens
  SIMILAR (1)..(150): 1001254mologous to Mus musculus ring-box protein 1,accession number AF140599,Smith-Waterman Score=280.
gcgatggatgtggataccccgagcggcaccaacagcggcgcgggcaagaagcgctttgaagtgaaaaagtggaatgcagtagccctctgggcctgggatattgtggttgataactgtgccatctgcaggaaccacattatggatctttgtaagtaattggaggaggatgggaggaagttgagaaggttgcagagattgtggctatcttgatgtgactgattttcttcttcacacgaggagatagcaagcctactctgagcactcggtcttctgtatctagtctgttggtgtgtttgaaatagagtagtttttttatgatgtcctggaggcatacccagctctcagaataaatctactcaatctaaagatggcagggacacatttagaattaattgtggacgacaggcactgttgatttttcctgcatatcttccatcttgtacctagactcaaaggtagaaatagtgaaaggagaattgcttgaacctgggaggcagaggtggcagtgagccgagatcacaccactgcactacaacctgggcgacacagcaagactcaaagtctcaaaaaaaaaaaaaagtctatctgatctaatttttgctggtcattgtttacaaaggaaagaagcgttaaggagtgaggattttgtatgttaagcccaaacat

SEQ ID NO: 22649 - DNA, 509 bp, Homo sapiens
  SIMILAR (302)..(508): 1001254mologous to Mus musculus ring-box protein 1,accession number AF140599,Smith-Waterman Score=406.
tttcgttccgcccctttttgaagcttggggtcctctcacttggaggggtcctctcacttggagggatcctcgctgaaccgaggcctcacactgcctggttagagtctggagtgtaatgcttggctcttctgagacgtctgttggcttttcacacaaccaccccactcttgggttctctgtcacgtccagaatctcccccttccaaaataataataaaaagcatggtggaacttgttaagaaaatccgagcccaaatcctgtggcagttagggagggttgagtactagtcgcgaacgacttgtggaatgcagtagccctctgggcctgggatattgtggttgataactgtgccatctgcaggaaccacattatggatctttgcatagaatgtcaagctaaccaggcgtccgctacttcagaagagtgtactgtcgcatggggagtctgtaaccatgcttttcacttccactgcatctctcgctggctcaaaacacgacaggtgtgtccat

SEQ ID NO: 22650 - DNA, 3386 bp, Homo sapiens
  SIMILAR (1)..(1143): 981254mologous to Homo sapiens putative p150,accession number U93564,Smith-Waterman Score=2059.
atggccatactgcccaacgtaatttacagattcaatgccatccccatcaagctaccaatgactttcttcacagaattggaaaaaactactttaaagttcatatggaaccaaaaaagagcccgcatcgccaagtcaatcctaagccaaaagaacaaagctggaggcatcacactacctgacttcaaactatactacaaggctacagtaaccaaaacagcatggtactggtaccaaaacagagatatagatcaatggaacagaacagagccctcagaaataatgccgcatatctacaactatctgatctttgacaaacctgagaaaaacaagcaatggggaaaggattccctatttaataaatggtgctgggaaaactggctagccatatgtagaaagctgaaactggatcccttccttacaccttatacaaaaatcaattcaagatggattaaagatttaaacgttagacctaaaaccataaaaaccctagaagaaaacctaggcattaccattcaggacataggcgtgggcaaggacttcatgtccaaaacaccaaaagcaatggcaacgaaagccaaaattgacaaatgggatctaattaaactaaagagcttctgcacagcaaaagaaactaccatcagagtgaacaggcaacctacaacatgggagaaaattttcgcaacctactcatctgacaaagggctaatatccagaatctacaatgaactcaaacaaatttacaagaaaaaaacaaacaaccccatcaaaaagtgggcgaaggacatgaacagacacttctcaaaagaagacatttatgcagccaaaaaacacatgaaaaaatgctcatcatcactggccatcagagaaatgcaaatcaaaaccactatgagatatcatctcacaccagttagaatggcaatcattaaaaagtcaggaaacaacaggtgctggagaggatgtggagaaataggaacacttttacactgttggtgggactgtaaactagttcaaccattgtggaagtcagtgtggcgattcctcagggatctagaactagaaataccatttgacccagccatcccattactgggtatatacctaaaagattataaatcatgctgctataaagacacatgcacacgatctcatccaggataccacattgcatttagtcatcaggtcttcttaggctttgctaacattttcctcattttggatgaccttgaaagttctgagtactggtcaggcctatgcatgctttgtgatgaatttgtagccacagtgcagtgcttgggcgaaaagacatatgcccagtgtggattggcagcagatggtgctcatcagaatgcattgaacagtaatccaagccctcatgaagccatcattagcaaagcctttcctactgatggtgtgggccctgcccatgggggcgtgggacctgttgcatggatgatctggtttgtaggagagccagagaggtggcaggagtctcagactggaagccccaccctgagggatggtctggcagacaggccatccttgaagggcagcagccagcagccccaggcagagggagagaaaaaagaagcagcacagacacctgtagaaatagcactaatttggcctgatttaaattcaggtgctaacttgtggcagtcctgtgaatgtcaggctcagggcctgaggagttgcttgtggcctcactcacagggaaggcatgcatctgatggaagaactcagccacagccaaccccagcagtagaacccactctggaggtcaagggctccttgagggcagggacttactgcatggtagaccctgagcagcctgtcctccagggcaggagagaatgcagcacatggctattggagtccaagtcattcacctgctggttatttgacagggacttcctgagtgcctactcgagagaaacagaaccaatagagggtgtgtgtgtggacagaaaaagggagagggagagggagagggaaattgtattgaaggaattggctgatgcagttatagcagctggaaagtccaacatctgcagggttccacttcttggaccacctgcagggccatctcacagcattgtgaacattccttcaggctcctatttggggaaggagaaccttgtgggaaaatgtgccctgaatgtgagtgtgaatgtgaatgtgcaatttattgctgatgtggtagatgggactgaggcaaaaggacctggtggagaatggaaaagaaccagtgacaaaaaccacgatttctcaatagacgccaaaaaggccttcggcaaaattcaacaacgcttcatgctaaaagcactcaataaactaggtattgatggaacatatctcaaaataataagagactctggcacccctggagatgctgctggacctttgttgcaagaaagagtcaatgctaccacccttccatcagcccatatccccatggcaccatccactctaaaccagggcaatgatgaaaaagcaggggatcagagaagagcaagggcttgcgtgaagagcaacaacttgtacactgagggttgtgagagctggaagtctgagggagtgtgggtcccaaccttgcactcaagtgcatggtctgtatcttgtggaggagcctgcacagacaaggagttgcggaaccttgcctcccggctgaaggattggtttggagctctccacgaggatgcgaacagagtcatcaagcccaccagctccaacacagcccaaggcaggtttgacactagcatcctgcccatctgcaaggactccctgggctggatgttcaacaagttggacatgaactatgacctcctgcttgacccttcagagatcaatgccatctacctggataagtacgagccctgtatcaagcctcttttcaactcgtgtgactccttcaaggatggcaagctttctaacaatgagtggtgctactgcttccagaagcctggagagctcatcgcgtttgggcctctaaaggttaagggccctgtaattttgactaatagccaaccatccccatcctctgctgctgaccctgcagcagatattctgacatgggccttcatacctcggtgtaatgaggagggctattacaaagccacacagtgccacggcagcacggggcagtgctggtgtgtggacaaatatgggaatgagttggctggctccaggaaacagggtgctgtgagctgtgaagaggagcaggaaacctcaggggattttggcagtggtgggtccgtggtcctgctggatgacctagaatatgaacgggagctgggaccaaaggacaaagaggggaagctgagggtgcacacccgagccgtgacagaggatgatgaggatgaggatgatgacaaagaggatgaggtcgg

SEQ ID NO: 22651 - DNA, 4099 bp, Homo sapiens
  SIMILAR (921)..(2096): 711254mologous to Homo sapiens testican,accession number X73608,Smith-Waterman Score=1372.
cactttgttcacatacaccaagagagagcatccgttccagaatccaaacttggactttatttgacacagaatacaataaggctaacagaaacagccaaactgaaaaaaacaaagccagaaaaaaacaccagttcccatcccaatttggtaattaggttaacagccagggaaaagtccattaaatgaataacaaaacaattaagcttgatggaagaagtctttttcctagtgccccatacctgaaagacaaagtaaattactttttggaattccccactctctgttgtccaaatggacacacctgtccgtgttttgagccagcgacgagatgcagtggaagtgaaaaggcatgggttacagacttccccatgcgacagtacactcttctgaagtaggcggaccgctggggttaggcttgacattctatgcaaagatcccataatgtgggtttctgcagatgggcacagttatcaaccacaatatcccaaggccaagagggctactgaattccacttttttaacttcaaagcgcttcttgcccgcgccgctgttggtgccgctcggggtatccacatccatcgctgcgggctcacaaagcggccagacgctcggcggcggcgtgtggcaggagcgcaggggcgcgagccggcgatcagccttcccggcgaccgtgccgcgggagctcgagcaactcggactaggggacccgggccggcccccaagatgccggcgatcgcggtgttggcggcggccgccgcggcgtgtgtgcttcctccaagtcgagagccggcacctggacgcgctcgccggaggcgcgggccccaaccacgggcaatttccttagacaatgaccaggtggctgagcaccgtctcccagtacgaccgggacaagtacatggaaccgctttcgagacgaagttgaggatgattatttcagaaactgggaatcccaacaagccctttgaccaagccctgggacccatccaaggacccctgcctgaaggtaaaatgcagccctcacaaagttgtgtgtgacccagggactaccagaccgccctggtgtgtcagccgcaagcacctgctccccaggcaaaaagaatggggaacgtgggcccagaaacactggggtttggacctttgaattttggtcaagttgcaagccctgttcccgtgggcgcagttcagccatgggtcttgcgggttcagatgggccactcctaacagcattccaagttgcaaatttggagttccatgcttgttctactgggcaaaagccttcgccaccctctgtgatggggccctgtccctgttcttcccagagcctggagccaccaaagcacaagggcagaaagggagtgccttgcacagacaaggagttgcggaaccttgcctcccggctgaaggattggtttggagctctccacgaggatgcgaacagagtcatcaagcccaccagctccaacacagcccaaggcaggtttgacactagcatcctgcccatctgcaaggactccctgggctggatgttcaacaagttggacatgaactatgacctcctgcttgacccttcagagatcaatgccatctacctggataagtacgagccctgtatcaagcctcttttcaactcgtgtgactccttcaaggatggcaaacctttcctaaacaatgaatggtgcctactgccttcccagaaccctggaggtctccccttgcccagaatgaaatgaacagaattcaagaagctgagtaaggggaaaagcctgttgggggccttcatacctcggtgtaatgaggagggctattacaaagccacacagtgccacggcagcacggggcagtgctggtgtgtggacaaatatgggaatgagttggctggctccaggaaacagggtgctgtgagctgtgaagaggagcaggaaacctcaggggattttggcagtggtgggtccgtggtcctgctggatgacctagaatatgaacgggagctgggaccaaaggacaaagaggggaagctgagggtgcacacccgagccgtgacagaggatgatgaggatgaggatgatgacaaagaggatgaggtcgggtacatatggtagtgcccacaagaaagaggacacaagttttgcacaaaattgcaagtcacttcctattcctgcatttgtatctaagactccaaggcaccaaggtctcttctccattgttgctctctataccccgaccctaaggtttggaagacaactgcctgttccccagaggattctgattttgcatatgtttgtatgggagaaagggtgttgtgttttttttttttgttgttgtttattttttggatagggaagtcattggcttaattagagcctccttcctttctgtgagatttttccaacaagcatgtgatttacgtggaattctgacagtgcagggagcccccaccctcttaaatgtcaaagaccctttttgattacccacactggtggttattacagcatggttcccagccttacagtgtcctaagtgcttctcttgtgtcctgtagatgttgtgaaaaagaaaaaaacaaaaaatacaccacactgtactttttccccctgccccccgttactgtccggtgattattattaaaaattagatttttttcacatcattatatctggcttcctataaacaacagaccttaattcagtcaagactccctttggggaaattcattttattaaaaattggtgtctggatacttccctgtacatgcataaatatgcatgcatgtacagaaagactgtatgtgtgtgccttgcacacacacccatacctctcagaaaaagtgtttgggtatcttaaaaactcgaaaaacaatgataaatttctcagcttgtccagacctggaacaaaatttctggaataagaaatttgtattaaagtccttttttgcactaacagttggctcttgtagcctgcaggctgaggaagtctcttctctgtgcatcagcagagttactgaaagcctctgattgagaaaaaacctccgtctgcctaaatcacttttctcgcagaagccatgcgactcccacacgacacgggcagcttcacaagccatctctttcatttctgcttgaagcccccttggctggcagcaatcctgtctggccataggtttcttccttccttacctacttcaaggggctttttctaagggcatggcacacatatcttcctgtttctctggaggagtaccatggggttccttaaaagaagaaaatttctaattctgaactcaatgttttgcttttactccctttctactgacaaatcatgataagggcacaaaagctgtacagatttttttttttaaccactcaatcccaaatggaggcctacaaagaacatcgtaataacacatggaagcaaaccctgggtttttaagagccaaattctgtcccccccctccactccccccaagtgacaagatactaatgaagaaagttcttcaccatagtgtttgttttaactaaactcattggagtctagttccaaatttgggtaggggtcatcatctctacattccttaggatttctctccctatcaagctggcccagatacaaagtcccaaacaagtagtcatctgaagttccccccatttccttcagtaccagtctataagctactgtccgccacttgattttcatctatcagggtgtcctaatcagaatcagccacccaagcaagcctctctggcccacatatctatctcttgccttcccccatgaacttcagcctgtccacacaaaagccacataaactcaagcaagaaatatgttcagccaaaacatgattatagtggcagctgaccaatcccccatcccaaattgaccatttagatgtaccaactcaccttaaattagcatgttccaatccagtcgggcattgcctggaatacagtaggcatcatacctatagttgggtcttaggataaggaaatggaacttacttggatataggcaaagtcctttggcttcgtaaataaccctgaggatttgcacttactttccccataggaagacagaccataggcaaactctgttttggggatcctcaact

SEQ ID NO: 22652 - DNA, 694 bp, Homo sapiens
  SIMILAR (113)..(373): 321254mologous to Nicotiana alata PRP3,accession number A31038,Smith-Waterman Score=103.
tcatggcgtccaaggcgctggctgcggagaagtggccgcggtctccatagagctgggggcgggcggcccggtatggagagcagccccgagagcctgcagccgcctgcagctcctccgcgggtttggacttgaaggacagtggtttggagagtcctgctgccgccgaggcgcctcctgagagggcagtacaaggtgaccgcctccccggagacagccgtggccggagtgggtcatgagttgggtaccgccggagacgcgggagcccgcccggatctcgccggcacctgccaagcagaactgaccgccgccggctccgaagagcccagcagcgccggcggcctcaagcagcagttgcagcgaccccgagccctcctggggaaatctccgaagcctgggactctctggagtcgttctctaaacctgcattcttttcccagtaagctgcgagttcaatagtgaggagggagcggagaacagggtccctgaggaggaggagggcgcggcggtgttgcccggggctgttcctttgttgttcgttttgtcctgcgtaggtaatatatctaatagtgatgaaagaacctggactgggagagtctagcaagtagtaaggatcaggatggggttttttatagtgcctcggggtgcttgcttcggcgtcttggaacttgtttatgatgaaggtaattcgactcat

SEQ ID NO: 22653 - DNA, 470 bp, Homo sapiens
  SIMILAR (36)..(119): 1001254mologous to Homo sapiens Human secreted protein, SEQ ID NO: 5215,accession number G01134,Smith-Waterman Score=141.
acttctgcttaattggattgtttttattcccacaggccttgtctggttttagacagattcatgttatagatatggacactatagatgtttccaatctaaataggcagtttttatttaggtaagttttaatatcttagcggttttctttttttaagctctgataatcatttgaacttgtacattgcagtttaataatttttaaaaatgacttgagaggataatactaattttattttaaaaaacaaaaactaccattcccattgtaggtaaagttttgtaagaaaattttgggcatcttggtgatagtagttatgtaaacaaatacatgtttttgttttttcgaagaagtctccttccaaaggtttatgtgatttttgggaatatcctcacgttaactgtgctctgaagaaaggaaagaacggtagctcttcctccagttgatgtcagaagagaatactcgctggagtatt

SEQ ID NO: 22654 - DNA, 2210 bp, Homo sapiens
  SIMILAR (1060)..(1467): 301254mologous to Homo sapiens Human NAE1-beta protein,accession number Y25339,Smith-Waterman Score=110.
tttcgtgaacaatatggcggatggcgaggagccggagaagaaaagaaggagaatagaggagctgctggctgagaaaatggctgttgatggtgggtgtggggacactgagacttggaaggatcgtctggaaccatgtaaagaagattcctcgagcgatctggacccttcacacaccctgatttcgaacccgagcactgaatctctccagttcttgttagatacatgtaaaagttctagtcattggagctggcggcattaggatgtgagctcctgaaaaatctggccttgtcttggttttagacagattcatgttatagatattggacactattagatgtttccaattcttaaattaggcagtttttatttaggcctaaagatattggaagacctaaggctgaagttgctgcagaatttctaaatgacagagtttcctaattgccaatgtagttccacatttccaacaaggatccaggattttaacggacactttctatccgacaatttcatattgattgtgtgtgggactgggactctatcatgcgccagaagatggataaatggcatgctgatatctcttcctaaattatgaaagaatggtgtcttaagatccaagctccattgtccctttgatagattggggggacagaagggttttaaagaaaatgcccgggtgattcttgcctggaatgactgcttgtatcgaatgcacgctggaactttatccaccacaggttaattttcccatgtgcaccattgcatctatgcccaggctaccagaacactgtattggagtatgtagggatgttgcagtggcctaaggagcagccttttggagaagggggttccattagatggagatgatcctggaacatatacaatggattttccaaaaatccctagagagagcatcacaatataatattaggggtgttacgtataggctcactcaaggggtagtaaaaagaatcattcctgcagtagcttccacaaatgcagtcattgcagctgtgtgtgccacctgaaggtttttaaaatagccacaagtgcatacattcccctttgaataattacttgggtgtttaatgatgtaggatgggctgtatacatacacatttgaaggcaggaaaggaaagggaaaactgcccagcttgtaggccagcttcctcaaaatatttcagtttttctccatcaggctaaactacagggaggttttggggattattctaaccaatagtgcttctctgcaaaatgaaatcctcccagccatcacagccaccctaggaggggaaaaaataggaacactttacttacagtcggtaacctctattggaggaacggaacagggccaattttttccaaacaattgaaaggaattggggcttgttggatggaccaaaaactggccggttgctggatgtcaccacccccacagactgtactattccaaacttccattttacttcttaagggaaaatctcccacataataggaaaactcatggaaataatatactttgtggatgcttaagaagttgaatccgatgtcatttttagcaataagtgttgccacggatttggtctttttttatataatggacccactctttttttaccttgtaaccttcccttgaagacagaattttgggtgttggtgcttgcaagcaagcattttcattaataatatgagaaatgatacctggagagagagattatgagcaaatgtattgcttcttttagaggaggaagcatacaacctctttttgtgtgaattttgttattatggtcaaagaatgcattcctaagttttcattttatgtattcaaatacacaaaaggtgtcccctttaagggaaataaagaattaaagttttaaataccattaccattttaccaatcctgaccatcctggagtatattgaaccatagggcctatttccttgatataacacctcatttaattgtggcccatcccaaatgaatattattgcaagaatttatcttgttcataatgatttgttaatgggtgttatagctgaataccctgtgcatgaaaatgggcaatattttcatctgtttacttgtagtgccatagaggccaatatgcacaatattaactaatgccaagacatggctgtttaaaaaatttaatgttcaaacagttatcactgatgcttttgcactatttattaataaaatcaatatattgtgt

SEQ ID NO: 22655 - DNA, 1722 bp, Homo sapiens
  SIMILAR (1)..(861): 1001254mologous to Homo sapiens Human serine protease inhibitor from cDNA clone HETDK50,accession number Y28643,Smith- Waterman Score=1503.
atgggtccagcttggctttggctactgggaacagggatcctggcctctgtccactgtcagccccttcttgcccatggagataaaagtctgcaggggcctcaaccccccaggcatcagctctcagagccagcccccgcctaccacagaatcacacccaccattaccaattttgctttgcgtttgtataaagagctggcagcagacgcccccggaaacatcttcttctcgccagtgagcatctccaccaccctggccctgctctctcttggggcccaagctaacacctcagctctgatcctggagggcctgggattcaacctcacagaaacccctgaagccgacatccaccagggcttccggagcctcctccacacccttgccctgcccagccccaaactcgaactaaaagtaggaaactccctgttcctagacaagcgactaaagcctcggcagcactatttggacagcatcaaggagctttatggagcttttgctttttctgccaacttcacagattctgttacaactgggaggcagattaatgactatttgagaaggcaaacatacgggcaagtcgtggactgcctcccggagttcagccaggacacgttcatggttcttgccaattacatcttcttcaaagccaagtggaagcaccctttcagtcgctaccagacccagaagcaggaaagtttctttgtggatgagaggacttctctccaggtccccatgatgcaccaaaaggaaatgcacagattcctctatgaccaggatttggcttgcaccgtcctccagatagaatacagaggaaatgccttggcgctgctggtcctccctgacccggggaaaatgaagcaggtgtcacacaaggcgatggtggacatgagtgagaaggggaccgaggccggggctgcttcaggcctcctctcccagcccccatctctgaacaccatgtcagacccacatgcccacttcaacaggcctttcctcttgctcctttgggaggtcaccacccagagcttactcttcctgggaaaagttgtcaacccagttgcaggcctttttaacagacttccactcctgctctggagctctcctcactctctttttctgcttcatgccccctggcaaattctttctgaggaggtaagaattgaagttcctgcagacaagtacggattcactgctggtaaaagaacagaagctcggagcctttcagtagcttgtagttcaggttcctggaaaacgcagatttgcatgcaagaagtttatcagggaacactctcaggaacaacctctgtgaaggagcaagaaaaacaggtttgcaccaaaggaaaacttcaacgcaattgcaacagcaatgtcagattgcacaggatgctctgtaatggagatatgccaaatgaaattgaagaggagcgagcctttgtacccccacatcaacccatcactgtcacatttttcggcccagtgaatctcatcttggattctcagactccctcctcttgcttccagtacctgagcctaagtcgcttcacagagtcttccctatctgcttcccacgtagccccgctggagaacagagggaagataccccagtgccatgtcttggggcaagagaaaatgaagacagacctggaacatgaacatggtggccttgccagaaagcaagtgtgtgttgctgaaacatcagcagagattgtcaaagggataaagagataa

SEQ ID NO: 22656 - DNA, 1055 bp, Homo sapiens
  SIMILAR (110)..(892): 731254mologous to Homo sapiens Human serine protease inhibitor from cDNA clone HETDK50,accession number Y28643,Smith- Waterman Score=891.
  misc_feature (1)...(1055): n = a,t,c or g
ggttatacatatgcggcgttctcatcatcatcatcatcatggnnnnnnnnnnnnnnnnnnnnnnnnnnnnnnnnnnnnnnnnntgtacgacgatgacgataaggatccgcagccccttcttgcccatggagataaaagtctgcaggggcctcaaccccccaggcatcagctctcagagccagcccccgcctaccacagaatcacacccaccattaccaattttgctttgcgtttgtataaagagctggcagcagacgcccccggaaacatcttcttctcgccagtgagcatctccaccaccctggccctgctctctcttggggcccaagctaacacctcagctctgatcctggagggcctgggattcaacctcacagaaacccctgaagccgacatccaccagggcttccggagcctcctccacacccttgccctgcccagccccaaactcgaactaaaagtaggaaactccctgttcctagacaagcgactaaagcctcggcagcactatttggacagcatcaaggagctntacggagcttttgctttttctgccaacttcacagattctgttacaactgggaggcagattaatgactatttgagaggcaaacatacgggncagtcgtggactggccttccggagntcagccacggacacgttcatggggtcttgccanntacatcntctttcannagccagtgggaagcacnctttcagtcgctaccagacccagaagccaggaaagntctttgnggatgagagggactctctcacggtcccatgaagcacccaagggaatgacagattccttatagacaggattggcctgcacgtcctcacatagaatcaaggaatgccttgcgctgctgtctccctgaaccggaaaaatgagcagtggagctgctttancccaacccgnaaaagggcatgtccggcagcgtgatgccctgcagttatttgaataaccgagaaaatcccaagggccccaaccattaataattaggtaggcggcaaaaatcatttcacaaaaagggattaaagacagcctgcg

SEQ ID NO: 22657 - DNA, 1689 bp, Homo sapiens
  SIMILAR (799)..(1512): 501254mologous to Homo sapiens Human serine protease inhibitor from cDNA clone HETDK50,accession number Y28643,Smith- Waterman Score=460.
ggcttaagtcacaatccaccatttgtttgtgggacaggcagtcagggcagatactttgaaaaaaaagagcccttcctgtttgctgtgcattgtcttcataccagttcccagaattgacctgacaaatattgaccaggttgctgtgatcttcaaacaccattttcctgtgggtagaggtgatgcagtgctgaggacctgggcccctgctcagtgcctttgctctagaatgggtccggcttggctttggctactgggaacagggatcctggcctctgtccactgtcagccccttcttgcccatggagataaaagtctgcaggggcctcaacccaacaggcatacagctctcagagccagcccccgcctaccacagaatcacacccacccattaccaattttgctttgcgtttgtataaagagctggcagcagacgcccccggaaacatcttcttctcgccagtgagcatctcacaccaccctgtgcctgctctgtcttgggggcccaagctaacaactcagctctgatcctggagggcctgggattcaacctcacagaaacccctgaagccgacattcaccagggcttccggagcctcctccacacccttgtcctgcccagccccaaactcgaactaaaagtaggaaactccctgttcctagacaagcgactaaagcctcggcagcactattttgacagcatcaaggagctttaccgagcttttgctttttctgcccacttcacagattctgttacaactgggaggcagattaatgactatttgtaaaggcgaacatactggccaggcgtggacttgcctttccggagtcagccagagacacgttcatggttcttgcccaatttcattcttttttcaaaagccaaagtgaaagccaccctttccagtcgggtaccagaccccaaaagcaggccagttttcttggtggatgagaggacttctttcccaggtccccatgatgcaccaaaaggaaatgcacagattcctctatgaccaggatttggcttgcactgtcctccagatagagtagcagaggaaatgccttggcgctgctggtcctccctgacccggggaaaatgaagcaggtggaggctgctctgcagccacagaccctgagaaaatggggccaattgctcctgcccagtctgttggatttgcacttgccaaggttttcaatttctggaacatataacctggaagacatactttccccaaattggttctcaccaacatacacactcaacaagataacttctctgcagtcagtgggtggctagctaaacaaatccatatccaaggtgtcacacaagtcgatggtggacatgaatgagaagggggaccaaaggccggggctgcttcaggcctcctctcccagcccccatctctgaacaccatgtcagacccacatgcccacttcaacaggcctttcctcttgctcctttgggaggtcaccacccagagcttactcttcctgggaaaagttgtcaacccagttgtatgggtaaccatggtgggaggccaggagttatcttatctcatcctggaccaaacagataggccagaaccagcctgcatcctggggctgctatgtggttcagttaattagtggtgccaagattttaataaaagttggacctttgggttctgtgaaaaaaaaaaaaaaaaaaaaaaa

SEQ ID NO: 22658 - DNA, 681 bp, Homo sapiens; identical to SEQ ID NO: 18380
  SIMILAR (88)..(288): 971254mologous to Escherichia coli K12 putative ATP-binding component of a transport system,accession number AE000184,Smith- Waterman Score=337.

SEQ ID NO: 22659 - DNA, 1923 bp, Homo sapiens
  SIMILAR (811)..(1890): 971254mologous to Escherichia coli Flagellar M-ring protein (fragments),accession number D90834,Smith-Waterman Score=1767.
atggccacccatgtcgaaaccgacagccctttcgccattcctgtagagggaagcggcgagggctatttcttattacatatattttatttcagatcagttttcagtgcttcaccgatatccgccaggctgcgaacggttttcacgcctgccggcttccagaccagcgaatttctcatccgcagtccctttcccaccggcaatgatggcacccgcgtggcccatacgtttgcctttcggcgcagtcacaccagcgatgtaacccacaactggcttggtaacgtgctctttgatgtacgcagctgcttcttcttcagcgctaccgccgatctcaccgatcatcacgatcgcttcggtctgcggatctttttcgaacatttcgagaatgtcgataaagttagagcccgggatcgggtcaccgccgataccgacacaggtcgactgaccgaaaccgtaatccgtggtctgtttaaccgcttcataggtcagtgtaccggaacgggaaacgatacccactttacccggtttgtgaatgtgaccaggctggataccgattttgcattcacccggagtgataacgcctgggcagttcgggccgatcatacgaacgcctgcttcatccagcttcactttcacggtcagcatatccagcgtcgggatgccttcagtgatggtgataatcagtttgatgcctgcgtcgatggcttccagaatggagtctttgcagaacggtgctggtacgtagataacagaagcggtagcgccagtggcagcaacggcttcacgcacggtgttgaacaccggcaggccgagacttctttagaggagacgaacgcagagcttaatcgcctgcgtgcgaatccgaaaattccattgattgttgccggttccgcggcagtggcggtcatggtcgcactgatcctgtgggcgaaagcccccgactaccgcacattattcagcaatctttccgatcaggatggtggcgcaattgtcagccaactgacgcaaatgaatattccttaccgcttcagcgaagccagcggcgctattgaagttccggcagataaagttcacgaactgcgtctgcgcctggcacaacaaggtttgccaaaaggcggcgcggtcggtttcgaactgcttgatcaggaaaagtttggtatcagccagttcagcgaacaggtgaattatcagcgggcgctggaaggcgagctttctcgtaccatcgaaactatcggcccggtaaaaggggcgcgcgtacatctggcaatgccgaaaccgtctttattcgtccgtgaacaaaaatccccttctgcatcggtgacggtaaatctgttacccggccgcgcactcgatgaagggcaaattagcgccattgtgcatctggtttccagcgccgttgctggtctgccgccgggaaacgtcacgctggtggatcagggcggacatctgttaacccagtccaataccagcgggcgcgatcttaatgacgctcagttgaaatatgccagcgatgtcgaaggccgtattcagcggcgtattgaagcgatcctgtcgcctattgttggtaacggtaatattcacgcccaggttacggcgcagctggacttcgccagtaaagaacaaacggaagaacagtatcgccctaacggtgatgaatctcatgcggcgcttcgttcacgccagcttaatgagagcgagcaaagcggttccggttatccgggcggcgtaccgggggcgttgtcgaatcaaccggcacctgcgaataacgcgccaatcagcacgcctccggcaaatcaaaataaccgccagcagcaggcgagcaccaccagcaatagtgggccgcgtagcacacagcggaatgaaaccagtaactacgaagtcgatcgcaccattcttagagcacagggcgtgatacccgccttgcga

SEQ ID NO: 22660 - DNA, 2289 bp, Homo sapiens
  SIMILAR (1113)..(1391): 831254mologous to Escherichia coli K12 putative ATP-binding component of a transport system,accession number AE000184,Smith- Waterman Score=377.
acctgaatttgaccaaccctgcgactaccgtccgttggcacaggataagttaccgcagaggcggtactgcaaaagccgacaacagcgaaggccgctgcgaataatgttttcaatttcatattcatgttaagcgagattttgtgcctggcaggccattgggttgagaatattagagtattggaagcgcattataagttcattccagctcacagtgaaattatgatgtgtacgaaatcacattttttgcctttggcttgagtgtagaccttaagcgaggagcaggatcttctttcagacttatggcataatgcgcggtttgtcatatctcttttcaggatacgcctgtgttagtttccagtaacgtcaccatgcagttcggcagtaagccgttgtttgaaaacatttccgtcaaatttggcggcggcaaccgttacggccttgattggcgcgaacggtagtgggaaatccacctttatgaagatcctcggcggcgaccttgagccgacgctgggtaacggttccctcgatcccaacgagcgccattggtaaactgcgtcaaggaccagtttgcctttgaagagttcactgtgctggatacggtgatcatggggcataaagagcttgtggaaagtgaagcaggagcgcgaccgcatctatgctttgccggaaatgagtgaagaagacggctataaagtggccgatctggaagttaaatacggcgaaatggccggttactctgcggaagctcgcgccggtgaactgttgcttgggcgtgggaattccagtggaacagcactacggcccgatgagtgaagttgctcctggctggaagctgcgtgtgcttctggcgcaggcgctgtttgctgatccggatattctcctgctcgacgaaccgaccaacaacctcgacatcgacaccattcgctggctggaacaggtgctgaacgagaataacagcacacatgatcatcatctcgcacgaccgtcacttccttaacatggtctgtacccacatggcggatctggattacggcgagctgcgcgtttatccgggtaactacgatgagtacatgacggcggcgacccaggcgcgtgaacgtctgctggccgataacgccaagaagaaagcgcagattgctgagttgcaatctttcattgataaaatcaaactggaagaggtgaaagcctccagccgtcagaacccgttcatccgttttgaacaggataagaaactgttccgtaacgcgctggaagtggaaggtctgaccaaagggtttgataacggtccgctgtttaaaaatctcaacctgctgctggaagtgggtgaaaaactggcggtactgggtaccaacggcgtcggtaaatcaacgctggctgaaaacgctggtgggcaatctgcaaccggacagcggcaccgtaaaatggtctgagaacgcgcgcattggttactatgctcaggaccacgaatatgagtttgaaaatgatctgcccgtgttcgaatggatgagccagtgcaagcagtaaggcgatgacgagcaggcggtacgcagtattttcggtcgtttgctgttcagccaggacgtcatcaaaaagccagctaaagtgctttccgcaccgttctgcaaagactccattctggaagccatcgacgcaggcatcaaactgattatcaccatcactgaaggcatcccgacgctggatatgctgaccgtgaaagtgaagctggatgaagcaggcgttcgtatgatcggcccgaactgcccaggcgttatcactccgggtgaatgcaaaatcggtatccagcctggtcacattcacaaaccgggcacgggtgaactgaatattaccaccggaggtatagttaaagcgcgtgatacacagatagctctcaatgacaaaagtaagggcgacgtgagggtggatgggcagaactctcttcttgaaacattcaatatgtacgtagggacatctggtacgggtacgttaaccctgacgaataacggtacgctgaatgtcgaaggtggagaagtttacttaggtgtttttgagcctgctgtaggaacgctaaacattggtgctgctcacggtgaggcggcggcagatgccggatttatcaccaatgcgacgaaagtggagtttggtcttggcgaaggcgtttttgtctttaatcataccaataacagtgatgccggctaccaggtcgatatgctgattacaggtgacgataaagacggaaaagtgatccatgatgcacgccatacggtgttcaatgcaggggaatacttatag

SEQ ID NO: 22661 - DNA, 580 bp, Homo sapiens
  SIMILAR (1)..(447): 971254mologous to Homo sapiens suppressor of sterile four 1,accession number AJ292529,Smith-Waterman Score=719.
gcccagcagagtgcagttcggctcaccgagatcggcccgcggatgacactgcagctcatcaaggtccaggagggcgtcggggagggcaaagtgatgttccacagttttgtgagcaagacggaggaggatctgcaggccatcctggaagccaaggagaagaagctgcggctgaaggcgcagaggcaggcccagcaggcccagaatgtgcagcgcaagcacgagcagcgggaggcccacagaaagaagagcctggagggcatgaagaaggcacgggtcgggggtagtgatgaaaaggcctctgggatcccttcaaggacggcgagcctggagttgggtgaggacgatgatgaacaggaagatgatgccatcgagtatttttgccaggcggtgggcgaggcgcccagtgaggacctgttccccgaggccaagcagaaacggcttgccaagccgcactggagcagcggctggattgaacgccccagattggggcccgagatgtggccctcggtttcctttcataaaggagttgtgtccccagcccttccactccagtaaaaaactgcattggcaaaaaaaaaaa

SEQ ID NO: 22662 - DNA, 2732 bp, Homo sapiens
  SIMILAR (273)..(136): 951254mologous to Homo sapiens suppressor of sterile four 1,accession number AJ292529,Smith-Waterman Score=231.
ttttgccttcctgatctttactggagtggaagggctggggacacaactcctttatgaaaggaaaccgagggccacatctcgggccccaatctggggcgttcaatccagccgctgctccggtgcggcttgggctcaggccactcttttccctgggcggccccggccccggcctcgcccaccatcccgggaagcccctctgggcccccgcctggcctgggctccctgggacttgtccttggtcttgggaaacttttggtcacaaagggcaacccttgcctagatccatttcccaccgcttccgcttccgccctggagacttggcaagccgtttctgcttggcctcggggaacaggtcctcactgggcgcctcgcccaccgcctggcagaaatactcgatgtcatcatcttcctgttcatcatcgtcctcacccaactccaggctcgccgtccttgaagggatcccagaggcctcttcatcactacccccgacccgtgccttcttcatgccctccaggctcttctttctgtgggcctcccgctgctcctgcttgcgctgcacattctgggcctgctgggcctgcctctgcgccttcagccgcagcttcttctccttggcttccaggatggcctgcagctcctcctccgtcttgctcacaaaactgtggaacatcactttgccctccccgacgccctcctggaccttgatgagctgcagtgtcatccgcgggccgatcggatgcacgaacagctcttttttgataccgcagccgttatcacgaatgcggataagtttcgccccaccgcgttcgatatcaatatcgatacgcgtcgcacctgcatcgaggctgttttccactagttctttgactaccgacgcaggtcgctcgaccacctcacctgcggcaatctggttcgccagttgtggcggtaagactggcagtttgtgccgttgcaccctgcggcgcagattgcatcggatgcgcaaggaagtaattgcgcaggcctttgtaaatggcttctgccagctgttgttggtaatcgtcgctcgcccagcaaacgttcttcgctgttgttgctgataaaaccggtttcgaccagtactgatgggatatccggcgagcggggtaaccgtgtatcagctgaccagccgtggggaccatgagctgctggttctcctggaggactgggggggccgtggagcacgtgcccactatgatggcttctccctggaacccgagagcgaccactaccgcctgcggcttggccagtaccatggtgatgctggagactctctttcctggcacaatgacaagcccttcagcaccgtggatagggaccgagactcctattctggtaaggagaactcctattctggtgagaggataggggaggcgggactcctgttctggtgagggaatgaaaggaggtagggtaggtaagacgcccctctggtaagtataaggataagcaagcttttattccgtcaagagaacaaaggtcaggacttttatcctggtggggggatggggagtccagattccttctctgatgaggcaaaaaaagaatcaagactcctgttcaagtaaagggcagagggtgagagctagtactcttattctagaaaggaagtagatccttttctttgataaaggaatgcccgcgcagactcctagtttgcagaaaaggtgggaaaagatgtgacttgtactttggtaaggagatagggaaggaattaaggctattactctgaagaaagttggggggccagggctcctatttttttgctgaggagatggaagatcagggcttgtattcaataagaatgggaggggccaggggattgcctggcaaaagccttgcactgtgaggtgcaggtagaggcttttattctggtgagaggacatggactctctctctcccctcaggtaactgtgctcctgtaccagcggggaggctggtggtaccatgcctgtgccccactccaacctcaacggtgtgtggcaccacggcggccactaccgaagccgctaccaggatggtgtctactgggctgagtttcgtggtggggcatattctctcaggaaggccgccatgcctcatttggcccctgaagctgtgactctgtgttcctttggtcccctaggccctagaggacattggtcagcaggagccccaagttgttctggccacaccttctttgtggcttaatgccaatgtgtcccacagaacttcccactgtggttcttgggaccctggggcgctgaaaatggggaccccagaatccccccccgccatatcttgggcctcaaaagggcttccccaaggtcattcatatctcggtttgagctcatatcttactaataacacaaagtagccacagaccgtgtctggtttgtatctgcacctggcaggggtcactccctgggcccgccctccttcgtcctccacctcctcctcttcctcctcctcctccttcaggtcctccaggatgaggttgtccaggtcttccaggaggccaccctggctcaagcaggaagccacagtggagccactgctaatgtgaggtgttgctggggtggagcactttgggcaggtggttctgcttccggctcttggggtgagcacaggatgtcccaggcacgtggggctctcgccggttgtagcagtcggcagctgagcaggagtgagtgtgggtgctgcggcgatccgggtctcggtctccggacgcgtgt

SEQ ID NO: 22663 - DNA, 210 bp, Homo sapiens
  SIMILAR (155)..(205): 521254mologous to Homo sapiens G18.1a protein,accession number AJ243937,Smith-Waterman Score=52.
  misc_feature (1)...(210): n = a,t,c or g
ttctcgggtcgacaatttcgtcggatcctgtaggccgcggcggaccccttgcgccacctgcgccgcggggcatttatcaaggcgggtcggcatgcgggtcgnnnnttncggtatgcctgcaggcgaccgcactactgaatggatctcgcccgcctcgcactggtactggtggtcaggacctcggccagcacgaaatcgtcgacccgggaa

SEQ ID NO: 22664 - DNA, 1192 bp, Homo sapiens
  SIMILAR (703)..(1116): 361254mologous to Schizosaccharomyces pombe 60s ribosomal protein L10,accession number Z97992,Smith-Waterman Score=104.
ctagcgatttcccgggtcgacgatttcgtggcgtgagaagccatgaggtgagttggtcctgaaagccctatccgcgttcatccgcgccttcagggtgccccgccgagggttcggatcctgtaggccgcgccgcggacccttgcgccacctgcgccgcaggggcatttctcaaggcgggtcaggcctgcgggtcgcccttcctaccaggtccgaccactgagagcctccctcttccaccggggcttgggtctgggtctgagctcccgtagctctacttggtgtccgaaatctacgggggagtccgccgtgggccgcccgcccgtctcgaagcctagacctcggaggcttccaggcagtccgagcgtgtggactcccgcggccttgagcgccctgtagcttctctcccgcatcagcaaagtctcatcgaaactccctgtacgaggcggtgcgggaagtctctgcacgggagaccagcgcaagtcgccgcaagttccttggagacggtggagttgcagatcagcttgaagaactatgatccccaggaaggacaaagcgctttctcggggcacccgtccaggctttaagtccacttccccgcccttaagttctctggtgtgtgtccttgggggacccagcaagcacttgtgacgaaggctaaggcccgtgggatatccccccacaatggacatcgaaggcgcctgaaaaaaactcaaccaagaattaaaaaacttggtcaagaaagctggcccaagaaagtatgattgcgttttttggcctcaagagtctcttgattcaagcaagattccaccgaatccctccggcccagggtttaaataaagggcaggaaaagttccctttccctgcttaacacacaacggaaaacatgggttggcccaaagtgggattgaggttgaagttcccacatttcaagtttccaaatgaagaaaggtgtttatgtctgggctgtagctgtttggtcacgtgaaagatgacagactaatgagctagtgtataacattcacctggcttgtcaactttcttgggtgtcattgctcaaagaaaaaaactggcagaaatgttccggggccttatattatcaagagcaccatggggcaaagccccagcagccatatattaaggcacattagaataaattctattaccagttaaaaaaaaaaaaaaaaagggcgcc

SEQ ID NO: 22665 - DNA, 496 bp, Homo sapiens
  SIMILAR (278)..(376): 1001254mologous to Homo sapiens NADH:ubiquinone oxidoreductase 18 kDa IP subunit,accession number AF020351,Smith- Waterman Score=181.
tccgtttccagggttccgaccaggtcgttgaggacttccacatggagattggcacaggaccagactcaagacacacaactcataacagttgatgaaaaattggatatcactactttaactggcgttccagaagagcatataaaaactagaaaagtcaggatctttgttcctgctcgcaataacatgcagtctggagtaaacaacacaaagaaatggaagatggagtttgataccagggagcgatgggaaaatcctttgatgggttgggcatcaacgatggagctatgacattgaagagaggaaggttccaaaacccaagtccaagtcttatggtgcaaacttttcttggaacaaaagaacaagagtatccacaaaataggttggcactgactatatctctgcttgactgtgaataaagtcagctatgcagtatttatagtccatgtataataaatacatctcttaatctcctaataaattgggcctttaaactaca

SEQ ID NO: 22666 - DNA, 483 bp, Homo sapiens
  SIMILAR (264)..(365): 1001254mologous to Homo sapiens NADH:ubiquinone oxidoreductase 18 kDa IP subunit,accession number AF020351,Smith- Waterman Score=187.
gcacgagaggtgaaattgaatcatagtttacatctttaacaatttgagatatggtaaataatctgcaggcaatcttttggacccttttctcacagaggattataagggaacaaatagtaagtatatctcagatgtgttgacatatactcttgatgataaatgaacattaagttaagttataaaagctagcctctgcttgctgtgcttttcaggtatcctctttaattctgtttctgtggatttgtctttgttttttcctcctaggatggagctatgacattgaagagaggaaggttccaaaacccaagtccaagtcttatggtgcaaacttttcttggaacaaaagaacaagagtatccacaaaataggttggcactgactatatctctgcttgactgtgaataaagtcagctatgcagtatttatagtccatgtataataaatacatctcttaatctcctaataaattggacctttaaacta

SEQ ID NO: 22667 - DNA, 736 bp, Homo sapiens
  SIMILAR (104)..(592): 381254mologous to Homo sapiens NADH:ubiquinone oxidoreductase 18 kDa IP subunit,accession number AF020351,Smith-Waterman Score= 122.
  misc_feature (1)...(736): n = a,t,c or g
tcatcctggcgtttgcctgcagcaagatggcggcggtgtcaatgtcagtggatactgaggcagacgttgtggcggagaagggcagtggctgtagctgcccttttccgtttccagggttccgacccnaggtcgttgaggacttccacatggagatttggcacatgagccagactcaagacacacaactcattaccagttgatgaaaaattgggatatcacttacctttaactggccgttcccagaggagcatattaaaaacttggaaaagtcagggatctttgttccctgctcgccaataacatgccagtctggagtaaacaacacaaaagaaatggaaggatggagtttgatacccagggagcggatgggaaaatctctttgatgggtttgggcatcaaccggcttgatccccttatcccaacatggttcttaaccttccagtacttaaagaagatgcagtttccctttgcagaaaaaaaatggatgggagctatggacattggaagagaggaagggttccaaaacccaagtcccaagtctttatgggtgccaacttttccttggaacaaaagaacaagagtatccaccaaaataggtttggcactgactatatctcctgcttgactgtgaataaaagtcacgctgtgcagtatttatagtccatgtataataaataacatcccttaatctccctaataaattggacctttaaactacaaaaaaaaaaaaaaaaaa

SEQ ID NO: 22668 - DNA, 1945 bp, Homo sapiens
  SIMILAR (1273)..(1671): 971254mologous to Homo sapiens Human secreted protein clone rd232_5 protein sequence SEQ ID NO:58,accession number Y94926,Smith -Waterman Score=672.
atgaacaaagtgaacccgacacagcaggataaagaggaccaccctgaacttataattacctctataggggataaacgccagctcacgttggaggcggcatctggtgtgtgccaccgcgggacacagactagggtcaaagaggaaagtaagaaatttcttatctccatgtcattcagaggcggaaaaccagttcacaaggtggtagagcgtgcctgtgtgtgtacctgcctgcaccacacgtctgtgcccgcaacacacaacacacaacgacgacacaccaccccgaccacaaggaaaaacggaaggaagagaagagggaaaaaagagcgagaaaagcggaaggaccgagagcacaacacagggagaaggacgaaaagaaaaaagacaaggaacataggcggacagcgaacgcagcaaaagcaaaaacaaagcgaagacaaagcacgacgagaaccaggcggtgggaggaagcagggaagggggagagaggacggaacgagacagaggcggggagggcggacccggaatagggaagagggcgcgcagaggggtcgaaacggaagggaggggaagggaggagaacggaggaagaaacacatatggcctaggcgccagacatcaccgctacccagcagacggaacaacaagggcacggcacgagacaacgcgacaccacgctccgaaggcacacagcggaagacgcacaaccctcggagcacgcgagcgccgaccaagcccacaccaagaaaacagaatagagtgtctcgagaacgaacgggcagtatttgcttacatgacaaagaccgaaagattctcttcagtggagacgtcgtgtatgatggatcactgattgactggctcccatacagcaggataagtgactatgttggaacttgtgaacgtctaatagaattagtggacagaggtctggtagagaagcgaagattacgtctcagagtcttctgtcacagcatgacacttgaacgatgtgacaagatgccgtcagcgaatatttcacgccaacataaagttgtgggagaaatgctgtgtttgggtgggaaattagctgcccagcagggagcactctgcgagaagatggccaaaaggtccgccgccgccgctgtcccggccccgcccttgactccgctccttccgtgccgcttcactccccgaggaaaagatttggtggccaagtcagcggatccaacccgcgaccaccagcgacctactggctgcgtctttgtccagcgtccacactgcgctggcagagactgtcgggtagcagatatcaagagagttaacaatctcatcagtgatcaagacttttttgcccttaggtctatcaaaattccagtaaaaaagttcagttccttgaccgaaacactttgtcctccaaaaggaagacagacttcacgtcattcatctgttcaatactcttccgaacaacaggaaattttgccagctaatgattctcttgcttacagtgactcagctggtagctttttaaaagaagtagaccgagacatagaacaaatagtaaagtgtacagacaataagagagagaacctcaatgaggtagtatcggccttaacagcacaacaaatgcgttttgaacctgataacaaaaacactcaacgtaaagacccctattatggagcagactggggaatataggaggcggacagctgtagtgataaaggtgatagcaagtataataacaccagtgttctatttgttgtattatgaaattttagctaaggtggatgttagtcatcattcaacagtggactcttcacatttacattcaaaaatcacacccccatcacagcagagagaaatggaaaatggaattgtgccaactaaaggaatacatttcagccaacaagatgatcataaactgtatagtccagattctcagtcacctgctgctcaacaggaaacatag

SEQ ID NO: 22669 - DNA, 642 bp, Homo sapiens
  SIMILAR (7)..(642): 771254mologous to Homo sapiens collagen type I alpha 1,accession number X98705,Smith-Waterman Score=835.
  misc_feature (1)...(642): n = a,t,c or g
ggcacgaggcctggacttcccggaccccccggaccccccggacctcccggaccccctggcctcggaggaaactttgctccccagctgtcttatggctatgatgagaaatcaaccggaggaatttccgtgcctggccccatgggtccctctggtcctcgtggtctccctggcccccctggtgcacctggtccccaaggcttccaaggtccccctggtgagcctggcgagcctggagcttcaggtcccatgggtccccgaggtcccccaggtccccctggaaagaatggagatgatggggaagctggaaaacctggtcgtcctggtgagcgtgggcctcctgggcctcagggtgctcgaggattgcccggaacagctggcctcccntggaatgaaggggacncagaagtttnaagtgggttttgggaatggtgccaaggggaagatgctgggtcctgctgggtcctaaagggtgaagcctggcagccctgggtgaaaatgggagctcctggtcaagatgggccccccgtggcctgcctggtngagagaggtcgcccttggagccccngggccctgctggtgctcgtgggaaatgatggtgctactggtgctgcccgggccccctgggnccccaccggccccgct

SEQ ID NO: 22670 - DNA, 4821 bp, Homo sapiens
  SIMILAR (2091)..(3473): 821254mologous to Homo sapiens pro alpha 1(I) collagen,accession number AF017178,Smith-Waterman Score=2125.
ggggcagcagacgggagtttctcctcggggtcggagcaggaggcacgcggagtgtgaggccacgcatgagcggacgctaaccccctccccagccacaaagagtctacatgtctagggtctagacatgttcagctttgtggacctccggctcctgctcctcttaagcggccaccgccctcctgacgcacggccaagaggaaggccaagtcgagggccaagacgaagacatcccaccaatcacctgcgtacagaacggcctcaggtaccatgaccgagacgtgtggaaacccgagccctgccggatctgcgtctgcgacaacggcaaggtgttgtgcgatgacgtgatctgtgacgagaccaagaactgccccggcgccgaagtccccgagggcgagtgctgtcccgtctgccccgacggctcaagagtcacccaccgaccaaagaaaccaccgggcgtcgagggacccaagggagacactgggcccccgaggcccaaggggacccgcaggcccccctggccgagatggcatccctggacagcctggacttcccggaccccccggaccccccggacctcccggaccccctggcctcggagggaaacttttgctccccaagctgtcttatggctatgatgagaaatcaaccggaggaatttccgtgcctggccccatgggtccctctggtcctcgtggtctccctggcccccctggtgcacctgtgagtatccaggacgtcttcatatgcctccttgggctttggtcttttggagggaagactgggatgagggcaggagagatgctcagagatctcttgggtccccaaggcttccaaggtccccctggtgagcctggcgagcctggagcttcaggtcccatgggtccccgaggtcccccaggtccccctggaaagaatggagatgatggggaagctggaaaacctggtcgtcctggtgagcgtgggcctcctgggcctcagggtgctcgaggattgcccggaacagctggcctccctggaatgaagggacacagaggtttcagtggtttggatggtgccaagggagatgctggtcctgctggtcctaagagtcccaccatgaatgaatttctcactcattattctctgatctacagggtgagcctggcagcccttggtgaaaatggagctcctggtcagatgggcccccgtggcctgcctggtgagagaggtcgccctggagcccctggccctgctggtgctcgtggaaatgatggtgctactggtgctgccgggccccctggtcccaccggcaccgctggtcctcctggcttccctggtgctgttggtgctaagggtgaagctggtccccaagggccccgaggctctgaaggtccccagggtgtgcgtggtgagcctggcccccctggccctgctggtgctgctggccctgctggaaaccctggtgctgatggacagcctggtgctaaaggtgccaatggtgctcctggtattgctggtggctcctggcttccctggtgcccgaggcccctctggaccccagggccccggcggccctcctggtcccaagggtaacagcggtgaacctggtgctcctggcagcaaaggagacactggtgctaagggagagcctggccctgttggtgttcaaggaccccctggccctgctggagaggaaggaaagcgaggagctcgaggtgaacccggacccactggcctgcccggaccccctggcgagcgtggtggacctggtagccgtggtttccctggcgcagatggtgttgctggtcccaagggtcccgctggtgaacgtggttctcctggccctgctggccccaaaggatctcctggtgaagctggtcgtcccggtgaagctggtctgcctggtgccaagggtctgactggaagccctggcagccctggtcctgatggcaaaactggcccccctggtcccgccggtcaagatggtcgccccggacccccaggcccacctggtgcccgtggtcaggctggtgtgatgggattccctggacctaaaggtgctgctgtgagtattaaggagagcccggcaaggctggagagcgaggttgttcccggaccccctgggcgctgtcggtcctgctggcaaagatggagaggctggagctcagggaccccctggccctgctggtcccgctggcgagagaggtgaacaaggccctgctggctcccccggattccagggtctccctggtcctgctggtcctccaggtgaagcaggcaaacctggtgaacagggtgttcctggagaccttggcgcccctggcccctctggagcaagaggcgagagaggtttccctggcgagcgtggtgtgcaaggtccccctggtcctgctggtccccgaggggccaacggtgctcccggcaacgatggtgctaagggtgatgctggtgcccctggagctcccggtagccagggcgcccctggccttcagggaatgcctggtgaacgtggtgcagctggtcttccagggcctaagggtgacagaggtgaaagtggtcccagcggccctgctggtcccactggagctcgtggtgcccccggagaccgtggtgagcctggtccccccggccctgctggctttgctggcccccctggtgctgacggccaacctggtgctaaaggcgaacctggtgatgctggtgctaaaggcgatgctggtccccctggccctgccggacccgctggaccccctggccccattggtaatgttggtgctcctggagccaaaggtgctcgcggcagcgctggtccccctggtgctactggtttccctggtgctgctggccgagtcggtcctcctggcccctctggaaatgctggaccccctggccctcctggtcctgctggcaaagaaggcggcaaaggtccccgtggtgagactggccctgctggacgtcctggtgaagttggtccccctggtccccctggccctgctggcgagaaaggatcccctggtgctgatggtcctgctggtgctcctggtactcccgggcctcaaggtattgctggacagcgtggtgtggtcggcctgcctggtcagagaggagagagaggcttccctggtcttcctggcccctctggtgaacctggcaaacaaggtccctctggagcaagtggtgaacgtggtccccctggtcccatgggcccccctggattggctggaccccctggtgaatctggacgtgagggggctcctggtgccgaaggttcccctggacgagacggttctcctggcgccaagggtgaccgtggtgagaccggccccgctggaccccctggtgctcctggtgctcctggtgcccctggccccgttggccctgctggcaagagtggtgatcgtggtgagactggtcctgctggtcccaccggtcctgtcggccctgttggcgcccgtggccccgccggaccccaaggcccccgtggtgacaaggggctctcctggtgaacaaggtccctctggagcctctggtcctgctggtccccgaggtccccctggctctgctggtgctcctggcaaagatggactcaacggtctccctggccccattgggccccctggtcctcgcggtcgcactggtgatgctggtcctgttggtccccccggccctcctggacctccttggtccccctggtcctcccagcgctggtttcgacttcagcttcctgccccagccacctcaagagaaggctcacgatggtggccgctactaccgggctgatgatgccaatgtggttcgtgaccgtgacctcgaggtggacaccaccctcaagagcctgagccagcagatcgagaacatccggagcccagagcggagccgcacagaaccccgcccgcacctgccgtgacctcaagaatgtgccactctgactggaagagtggagagtactggattgaccccaaccaaggctgcaacctggatggccatcaaagtcttctgcaacatggagactggtgagacctgcagtgtaccccacatcagccgcagtgtggccctagaagaatctggtacatcagcagagaaccccaagggacaagaaggcatgtctggttcggcaaaaggcatgaccgattgaattcaagttcgagtatggcggcaaggggctccgaccccttgccggatgtggacattcaagctgacctttcctgcggcttgatgtcccacccgaggccttcccagaaacatcaccttaccactgcaagaaacagggtgggcctaacttggacccagcagacttggcaacctcaaagaagcgccctgctcctccaggggctccaacgaagatcgagatcccgcgccgaggggcaaacagccgcttcaccttacagcgtcacctgtcgattggctgcacgagtcacaaccgggagccctggggcaagacagtggattgaatacaaaaccaccaagacctcccgcctgcccatcatcgatgtggcccccttggaggttggtgcccagaaccaggaattcggcttcgacggttgcccctgttctgcttcctggaaaactccctccatcccaacctgggctccctcccaccccaaccaactttcccccccaacccggaaacagacaagcaacccaaactgaaccccctcaaaagccaaaaaaatgggagacaattttcacatgggactttggaaaatattctcttcctctgcactcatctctcacacctacgttttcatctttgacccaccgacacatgcccaaaaacccaacgtccattcaaccttaccaaaaaaaaaaaaaaaaaaaaaagaataaataaataacttttta

SEQ ID NO: 22671 - DNA, 392 bp, Homo sapiens
  SIMILAR (157)..(294): 341254mologous to Oryctolagus cuniculus immunoglobulin heavy chain constant region,accession number AF314407,Smith-Waterman Score=62.
  misc_feature (1)...(392): n = a,t,c or g
ggtcatacatcatcgtgtttgtaagagaagatggtcattttattctctgtataaaacttagctctaaagcagaaactaaagcagcaaatgcaggaaggctgtctcgccatcctcaagactcagcagctctcattctccagtggtgagcacaccatttgtgctgctgctgttgtcgtgaaaaataataacagtggaagtcacaaaaatgtcccctgcccagccccctcgccgcccttgacctcctgcaggccatgtgtgtattacttgtctagtgatgtcctctctgctcgctgcattgtggtgttctcttctcaaggctttgaaatctccccttgcactgagattagtcgtcagatctctccccgtctccctncccaacttataangaccng

SEQ ID NO: 22672 - DNA, 470 bp, Homo sapiens
  SIMILAR (103)..(270): 1001254mologous to Homo sapiens unc-18 homologue,accession number D63851,Smith-Waterman Score=285.
atttcccgcgtcgacgatttcgtcgcgcccacctgaggaggcggcggggtccgcaggcgtcgcgggacgaggagatcggagccgggagactcgcgcagcgccatggcccccattggcctcaaagctgttgtcggagagaagattatgcatgatgtgataaagaaggtcaagaagaagggggaatggaaggtgctggtggtggatcagttaagcatgaggatgctgtcctcctgctgcaagatgacagacatcatgaccgagggcataacgagtgagcatgcgctctgcacttgagcagtgctggagccttctctctgtggcgggcttagctctttcctattcattattatctcctttgattttagattcttccagcaacctgtgtgctaagaccagaagctcctgagaggcgcaaggctatcttgttcatcactgaatccctagcaccaaatccagaccctgcggagagc

SEQ ID NO: 22673 - DNA, 3827 bp, Homo sapiens
  SIMILAR (657)..(1913): 741254mologous to Homo sapiens unc-18 homologue,accession number D63851,Smith-Waterman Score=1400.
ctgacgcgcggctgcggggcggagagctgcggctggcccagcgcgcccacctgaggaggcggcggggtccgcaggcgtcgcgggacgaggagatcggagccgggagactcgcgcagcgccatggcccccattggcctcaaagctgttgtcggagagaagattatgcatgatgtgataaagaaggtcaagaagaagggggaatggaaggtgctggtggtggatcagttaagcatgaggatgctgtcctcctgctgcaagatgacagacatcatgaccgagggcataacgattgtggaagatatcaataagcgcagagagccgctccccagcctggaggctgtgtatctcatcactccatccgagaagtccgtccactctctcatcagtgactttaaggacccgccgactgctaaataccgggctgcacacgtcttcttcactgactcttgtccagatgccctgtttaatgaactggtaaaatcccgagcagccaaagtcatcaaaactctgacggaaatcaatattgcatttctcccgtatgaatcccaggtctattccttggactctgctgactctttccaaagcttctacagtccccacaaggctcagatgaagaatcctatactggagcgcctggcagagcagatcgcgaccctttgtgccacccctgaaggagtacccggcctgtgcggtatcggggggaatacaaggacaatgccctgctggctcagctaatccaggacaagctcgatgcctataaagctgatgatccaacaatgggggagggcccagacaaggcacgctcccagctcctgatcctggatcgaggctttgaccccagctcccctgtgcttccatgaatttgactttttcagggtatgagttattgatcttgcttgcctattcgaaaatgatgtattacaagtatgagaccagcggcattgggggagggcacggggttaagggaggtgcttctgggacggaggacgacgacctgtgggatagcactgcgcccacaagcacatcgcagaggtgttcccagggaagtcacccggtctctgaaagatttttcttctagcaagagaatgaatactggagagaagaccaccatgcgggacctgtcccagatgctgaagaagatgcctcagtaccagaaagagctcagcaagtactccacccacctgcaccttgctgaggactgtatgaagcattaccaaggcaccgtagacaaactctgccgagtggagcaggacctggccatgggcacagatgctgagggagagaagatcaaggaccctatgcgagccatcgtccccattctgctggatgccaatgtcagcacttatgacaaaatccgcatcatccttctctacatctttttgaagaatggcatcacggaggaaaacctgaacaaactgatccagcacgcccagatacccccggaggatagtgagatcatcaccaacatggctcacctcggcgtgcccatcgtcaccgattccacgctgcgtcgccggagcaagccggagcggaaggaacgcatcagcgagcagacctaccagctctcacggtggactccgattatcaaggacatcatggaggacactattgaggacaaacttgacaacaaaccactacccttaatatctctacccgttcctctgcctccttcagcaccacggccgttcagcgcccgctatgggcactggccataaggaacaaggcccccaggcgagtaccgcagtgggcccccgtcttcatcatttttcatcccttggggggtgtgagcctgaatgagatgcgctgcgccttacggaggtgacccagggccaacggaaagtggggaggtgcttgatagggttccacacacatccttcaaccccacagaaacctgcctggacacactgaagaaacctgaataaaacagatgaagaaataagcagttaaaaaaataagtcgcccctccaaaacacgcccccatcccacagcgctccgcagcttcccaccaccgcccgcctcagttcctttgcgtctgttgcctccccagccctgcacgccctggctggcactgttgccgctgcattctcgtgttcaagtgatgccctcatcttgtttgaaacagaaagaaaagtatatgcaattgtgttttttaaaaagagtatcttatacatgtatcctaaaaaagagaagctcatgtggcaattgggtgcacagcagggaggaaatttctggactgttaggatgaatggacgccttctccccgttatttaagatttgtgaccttgtacataaccctgtgtgacgtgcacattgcttgggtatggaacggtagaaatttgggtgtttttaaaaccttgtttggggttgttcctgtccttgttgagaatcatagagatgtctgtgttcttggagtatttcacactgaggactaatctgctatcttcattccagtccctacccctcagtgcctgctctcattcaaataacctgggaggtgacaatcaagatatctcaggaggtccaaggtggaacagacctctttggctttcccagcgtcttatacccccggtagtgcagctgtgggtggaggctggggtgtctgcacgaaatcaggccagcgtcctcctccacagcctgtcactgccccctccccagcctgtgtccacagtgctgtgatcccgagggaagtcctccagtctaagtcacagtgccctgacaggtgagaagcaaactcccactggaagcctccatctctttggaaaaacagttagtctggagcctgtggcccaggcccttctgtccccaggcatcatcccaacagctcattttccctagtccgccttcgttcaagggtcaggaatggaccagaacagatgggttctggaggcccctgaacagagggctatggctgtggagaaggttcttggacccgttggactcacacagaccctgtaccctctcggcaagcatcttcagtcagattatcctcagtttcagatacttcataataccttgtgttgtgtggggtcatacatcatcgtgtttgtaagagaagatggtcattttattctctgtataaaacttagctctaaagcagaaactaaagcagcaaatgcaggaaggctgtctcgccatcctcaagactcagcagctctcattctccagtggtgagcacaccatttgtgctgctgctgttgtcgtgaaatataataacagtggaagtcacaaaaatgtcccctgcccagccccctcgccgcccttgacctcctgcaggccatgtgtgtattacttgtctagtgatgtcctctcaaaagtgctgtacgcgagctcggcgccacctccgcctccctttcagagcctgctccccgccctctccgctcgctgcattgtggtgttctcttctcaaggctttgaaatctccccttgcactgagattagtcgtcagatctctccccgtctccctcccaacttatacgacctgatttccttaggacggaaccgcaggcacctgcgccgggcgtcttactcccgctgcttgttctgtcccctccctcggaccaaacagtgctcatgcttcaggaccttgtttgtcgaagatgttggtttccctttctctgttatttatataaaaataatttatcaaaaggatattttaaaaaagctagtctgtcttgaaacttgtttaccttaaaattatcagaatctcagtgtttgaaagtactgaagcacaaacatatatcatctctgtaccattctgtactaaagcacttgagtctaataaataaagaaatcagcaccccttcccggtgtccagggggaaaaaaaaa

SEQ ID NO: 22674 - DNA, 4008 bp, Homo sapiens
  SIMILAR (112)..(1263): 911254mologous to Rattus norvegicus rbSec1B,accession number U21116,Smith-Waterman Score=1759.
tttcgtgccgcggagagctgcggctggcccagcgcgcccacctgaggaggcggcggcgtccgcatgctgtgcgggacgaggagatcggagccgggagactcgcgcagcgccatggcccccattggcctcatagctgttgtcggagagaagatcatgcatgatgtgatgctgaacgacctgaacatgggggaatggaaggcgctgttggtggatcagttaagcatgaggatgctgtcctactgctgcctgatgacagacatcatgaccgagggcataacgattgtggaagatatcaataagcgcagatagccgctccccagcctggaggctgtgtatctcatcactccatccgagaagtccgtccactctctcatcagtgactttaaggacccgccgactgctaaataccgggctgcacacgtcttcttcactgactcttgtccagatgccctgtttaatgaactggtaaaatcccgagcagccaaagtcatcaaaactctgacggaaatcaatattgcatttctcccgtatgaatccagggtctattccttggactctgctgactctttccaaagcttctacagtccccacaaggctcagatgaagaatcctatactggagcgcctggcagagcagatcgcgaccctttgtgccaccctgaaggagtacccggctgtgcggtatcggggggaatacaaggacaatgccctgctggctcagctaatccaggacaagctcgatgcctataaagctgatgatccaacaatgggggagggcccagacaaggcacgctcccagctcctgatcctggatcgaggctttgaccccagctcccctgtgctccatgaattgacttttcaggctatgagttatgatctgctgcctatcgaaaatgatgtatacaagtatgagaccagcggcatcggggaggcacgggtgaaggaggtgctcctggacgaggacgacgacctgtggatagcactgcgccacaagcacatcgcagaggtgtcccaggaagtcacccggtctctgaaagatttttcttctagcaagagaatgaatactggagagaagaccaccatgcgggacctgtcccagatgctgaagaagatgcctcagtaccagaaagagctcagcaagtactccacccaccttgcaccttgcttgaggacttgtatgaagcattaccaaggcaccgtagacaaactcttgccgagttggagcaggacctggccatgggcaacagatgctgaagggagagaagattcaaggaccctatgcgagccatcgtccccattctgctggatgccaatgttcagacttattgacaaatccgcatcatccttctctacatctttttgaagaatggcatcacggaggaaaacctgaacaaactgatccagcacgcccagatacccccggaggatagtgagatcatcaccaacatggctcacctcggcgtgcccatcgtcaccgattccacgctgcgtcgccggagcaagccggagcggaaggaacgcatcagcgagcagacctaccagctctcacggtggactccgattatcaaggacatcatggaggacactattgaggacaaacttgacaccaaacactacccttatatctctacccgttcctctgcctccttcagcaccaccgccgtcagcgcccgctatgggcactggcataagaacaaggccccaggcgagtaccgcagtggcccccgcctcatcattttcatccttgggggtgtgagcctgaatgagatgcgctgcgcctacgaggtgacccaggccaacggaaagtgggaggtgctgataggttctactcacattcttactcccaccaaatttctcatggacctgagacaccccgacttcagggagtcctctagggtatcttttgaggatcaggctccaacaatggagtgagagccaaagaaacaaagatccacacacatcctcaccccacagaaactgctggacacactgaagaaactgaataaaacagatgaagaaataagcagttaaaaaaataagtcgcccctccaaaacacgcccccatcccacagcgctccgcagcttcccaccaccgcccgcctcagttcctttgcgtctgttgcctccccagccctgcacgccctgggctgggcactgttgccgctgcattctcgtgttcagtgatgccctcttcttgtttgaaacaaaagaaaattaatggcattgtgttttttaaaaagagtatcttatacatgtatcctaaaaagagaagctcatgtgcaattggtgcacagcaggagaaatttttggactgttaggatgaatggacgccttctccccgttatttaagatttgtgaccttgtacataaccctgggtgacgtgcacattgcttggggtatgggaacggtaggaaatttggggtgtttttaaaaaccttgtttgggggttgttcctgtccttggttgagaatcatagagatgtctgagttcttggagtatttcacactgagggactaatctgctatcttcattccagtccctacccctcagtgcctgctctcatccaaataacctggggaggtgacaatcaggatatctcaggaggtccaaggtgggaacagaacctctttgcctttcccagcgtcttcatacccccggtagtggcagctgtggggtgggaggctgggggtgtcttgcacgaagttcagggccagcgtcctacttccacagcctgtcactgccccttcccccagcctgtgttccacagtgttgttgatcccgagggaagtcctccagtcttaagtcacagtgcccttgacagggtgaggaaggcaaacttcccgctgggaagcctccatcttctttgggaaaaacagtttagtctgggagcctgtggcccaggggcctttttgttccccaggggattcattcccaaacaagttcattttttccctaagttcccgcctttgtttcaaaggggttcagggaatggaccagaacagatgggttctggaggcccctgaacaggagggctatggctgtggagaaggttcttggccccgttggactcacacagaccctgtaccctctcggcaagcatcttcagtcagattatcctcagtttcagatactttcataataccttgtgtttgtgtggggtcatacatcatcgtgtttgtaaagagaagatggtcattttattccccgtataaaacttaggtctaaagcagaaactaaagcagcaaatgcaggaaggctgtctcgccatcctcaagactcagcagctctcattctccagtggtgagcacaccatttgtgctgctgctgttgtcgtggaaatataataacagtgggagtccacaaaaatgtccccctgccccagccccctcgccggcccttgacctcctggaaggccatgtgtgtaattacttggtcctaagtggatgtccttcttcaaaagtgctgtaacgcgaagctcgggcgccaacctcggccctcccctttcaagagcctgctcccccgccctctctggctcgctggcattgtggggtgtttcttcttcttcaagggttttgaaaatcttccccttggcaatgaggattaggtcgtcagatctctcccccgtctcccctccccaacttatacggccctggatttcccttagggacgggaacccgcagggcaccctgcgccgggcgccttactccccgctgcttgttctgtcccctccctcggaccaaacagtgctcatgcttcaggaccttgtttgtcgaagatgttggtttccctttgctctgttatttatataaaaataatttatcaaaaggatattttaaaaaagctagtctgtcttgaaacttgtttaccttaaaattatcagaatctcagtgtttgaaagtactgaaagcacaaacatatatcatctctgtaccattctgtactaaagcacttgagtctaataaataaagaaatcagcaccccttcccggtgtccagggggaaaaaaaaa

SEQ ID NO: 22675 - DNA, 410 bp, Homo sapiens
  SIMILAR (109)..(159): 881254mologous to Mus musculus synaptonemal complex protein,accession number Y08486,Smith-Waterman Score=72.
cgtcgacttttttttttttttaagcaatgaaatattttatttgctgaaataggtataacacttaaataaaaattaaacaaatgtttaatatctccttccatgaaacagcagcagcaagagatagcaagtgttcggaagtctcttcaatccatgttattctgatgactctttgaagaaagaacttgaacctaagtaatatgatacaattataacgttaggctaagaagcatattgtaagtctttagaatagtttaattgtaacatctttaatcataaacctgtttcattgtaaggacctccctttctgttaaggtcaaatctaaataggttatggggttggttaggcaactattccctaaaggaatatggtattaaggctttcagctctttaggtaatggtagtggaattt

SEQ ID NO: 22676 - DNA, 529 bp, Homo sapiens
  SIMILAR (529)..(290): 501254mologous to Homo sapiens cholinephosphotransferase 1 alpha,accession number AF195623,Smith-Waterman Score=129.
tttttttttttttttttttaagcaatgaaatattttatttgctgaaagtaggtagtaacacttaaataaaaattaaacaaatgtttaatatctccttccatgaaacagcagcagcaagagatagcaagtgttcggaagtctcttcaatccatgttattctgatgactctttgaagaaagaacttgaacctcctgacacagggggatttcccttcactccatagattcccccctaacttcatctccctcttttccttggggctattaggtcaggtcaatatggcttgtggaacctgttcagggtgcttggatggacatgcagtcttggaatatatttaggatggagggtgtcttgaaattttggcaggggcacaaaggcactaaaggtattatccaccatatcaaatgaagaaatcaccattgccatccatagaacaacatattcgtctattaaaattataaagggcctggtctaaaaacaaaagacctggccccaaaaagacagtgtcttgaagatatagttcactttt

SEQ ID NO: 22677 - DNA, 1580 bp, Homo sapiens
  SIMILAR (186)..(707): 951254mologous to Homo sapiens cholinephosphotransferase 1 alpha,accession number AF195623,Smith-Waterman Score=874.
tgggggctggggccccggcagccgggcaggccggcctgacctcgacctccgccgtgcgggcccgaccggtgagtccagcccggcagtcgcaggacccggccgccagcctctccctccacctctccctgcccccagcgccaggcgcgggctgcgctcggtggcggcggcggggccctcaggcggccatggcggcaggcgccggggccgggtccgcgccgcgctggctgagggcgctgagcgagccgctgagcgcggcgcagctgcggcgactggaggagcaccgctacagcgcggcgggcgtctcgctgctcgagccgccgctgcagctctactggacctggctgctccagtggatcccgctctggatggcccccaactccatcaccctgctggggctcgccgtcaacgtggtcaccacgctcgtgctcatctcctactgtctcacggccaccgaagaggcaccatactggacataccttttatgtgcactgggactttttatttaccagccactggatgctattgatgggaaacaagccagaagaacaaactcttgttcccctttaggggagctctttgaccatggctgtgactctctttccacagtatttatggcagtgggagcttcaattgccgctcgcttaggaacttatcctgactggtttttttcccgctccttttatttgggatgtttggtgttttattgccgctcattggcagacttatgtttcaaggcatgttgagatttggaaaagtggatgtaactgaaattcagatagctttaagtgattgtctttgtgcttgtctgcatttgggaggagcaacaatgtgggggactatacgattcctattctagaaataaaattgaagatccttccagttcttggatttctaggtggagtaatattttcctgttccaaattattcccatgttatcctccattggtggtgttggcaagaatggaatccactatagcaggcaccagtgtcttgtcacctgggactccacatagggactaattattatactgggcaataatgatctattaaaaagtcaggcaactgatggtgttttgaaaaagcatcccttgtctttaatatccccaatgtttgggatgtgtctttggccaaagtctcacaaaaaattagtggtagctcacatgaccaaaagtgaactatatcttcaagacactgtctttttggggccaggtcttttgtttttagacccagtactttaataactttatagacgaatatgttgttctatggatggcaatggtgatttcttcatttgatatggtgatatactttagtgcctttgtgccctgcaaatttccaagacacccttcatcctaaatatattcaagactgcatgtcatcaagcacctgaacaggttcaagttctttcttcaaagagtcatcagaataacatggattgaagagacttccgaacacttgctatctcttgctgctgctgtttcatggaaggagatattaaacatttgtttaatttttatttaagtgttatacctatttcagcaaataaaatatttcattgcttaaaaaaaaaaaaaaaaaaa

SEQ ID NO: 22678 - DNA, 1093 bp, Homo sapiens
  SIMILAR (596)..(1090): 921254mologous to Homo sapiens KIAA1470 protein,accession number AB040903,Smith-Waterman Score=797.
atgcccaggaagaaggcggcggcggcggcctgggaggagccgagctcgggcaacggcactgcccacgccagggcccaggaaacgcggcggcccggcgggcaggaagcgcgagcggcccgagcgctgcagtagcagcagtggtggcagcagcagcagcggcgacgaggacggcctggagctcgacggggcccccggcaggggcaagcgcgcggcgcagcctgtggcagcaggcaaggtgggcggtgcggctgtggtggtcgccgaacccgagcacaccaagaagcacgtcaaacttgagaccctcctcatcaccacagaaggaaagctgtggagctggggtcgaaatgagaaggcgcagctgggacatggtgacaccaagagagtagaagcccccagactcaccgagggtctcagccacgaagtgattgtgtgcagcgtgtgcgcggaaccacaccttggccttgacggaaacgggctccgtgtttgcgtttggggaaaacaagatggggcagctgggccttggcaactagacagacgctgtccccagccctgtgcagataatgtacaacagcctgccaattaccaaaatggccttggctatggctggctgggctacacagagcagaaggatgagatggtcccccgcctggtgaagctatttgacttccctgggcatggggcttcccagatctatgctggttacacctgctcctttgccgtcagtgaagtgggtggtctgtttttctggggggccaccaacacctcccatgaatctaccatgtacccaaaagcagtgcaggacctctgcagctggagaatctggagcctggcttgtgggaagagcagcatcattgtggcagccgatgagagcaccatcagctggggcccatcaccgacctttggggaactgggctacagggatcacaagcccaagtcttccactgcagcccaggaggtgaagactctgcatggcattttctcagagccggtcgccatgggctactcacactccttggtgatagcaagagatgaaagtgaaactgagaaagaaaagatcaagaaactgccagaatacagcccccaaaccctctga

SEQ ID NO: 22679 - DNA, 2155 bp, Homo sapiens
  SIMILAR (1142)..(1408): 981254mologous to Homo sapiens KIAA1470 protein,accession number AB040903,Smith-Waterman Score=453.
atgagcctgggcttagcaagtgagcggctgtgggcaggtttggggttgcccgcattgccacttgccgatgagggaggggagtgtggggagactctgttcgtgtggaggtcacagaaacttgaagggtcaaagtgcaaagggcagcttttgatttttggggcaaccaactgggacttgattggtcgaaaagaagtgcctaaacagcaagctgcttaccgcaatctcggtcagaatttgtgggggccccacagatatgggtgcctggcgggggtccgggtgcggacagtggtctcgggctcgtgtgctgcacacagcctcctcatcaccacggaagggaagctgtggagctggggtcgaaatgagaaggggcagctgggacatggtgacaccaagagagtagaagcccctagactcatcgagggtcttagccacgaagtgattgtgtctgcagcatgtgggcggaaccacaccttggccttgacggaaacgggctccgtgtttgcgtttggggaaaacaagatggggcagctgggccttggcaaccagacagacgctgttcccagccccgcgcagataatgtacaacggccagccaattaccaaaatggcctgtggggctgaattcagtatgataatgggactgcaaaggaaacctctattcctttggggtgccctgaatatgggtcagctggggacacaactcaggatggggaagtttcattcgcccggggcacagcggatagagtacgactgtgaactagttccccggcgagtggccatcttcattgagaagacgaaagatggacagattctgcctgtaccaaacgtggttgtacgagacgtggcctgtggcgctaaccacacgctggtcctggactcccagaagcgagtcttctcctggggctttggtggctatggccggctgggccacgcagagcagaaggatgagatggtcccccgcctggtgaagctgtttgacttccctgggcgtggggcttcccagatctatgctggttaacacctgctccctttgctgtcaatgaaatgggtggtctgtttttctggggggccaccaacacctcccgtgaatctaccatgtaccccaaaagcagtgcaggacctctgcggctggagaatccggaaccctggcttgtgggaagagcagcatcattgtggccgccgatgagagcaccatcagctggggtccgtcaccgacctttggggaactgggctacggggaccacaagcccaagtcttccactgcagcccaggaggtaaagactctggatggcattttctcagagcaggtcgccatgggctactcacactccttggtgatagcaagagatgaaagtgagactgagaaagagaagatcaagaaactgccagaatacaacccccgaaccctctgatgctcccggagactcctccgactccacacctctcgcggcagctgtcatttccatgtgcactgggacgggaagtcaaacgaggaatttaaaaaagcaaaagttgaccgaaggtgcatttttgtttagactccctgaggttccgttttacacatgatccaacgttaactacctttttttctgtatgctttccaaagtccttttttttcccttaatgttgaattaaaatgcttgctcatagttgatttgccattcctacaaaagaggcagaaactttgagcaatctaggttttttttttttttaagttttttctttcttcctctcctgaatacactccccaaaacacccctttccagttacaattagcatcgtgatccaagcagatgccacatggaagaggaatcgccatttactcagaaaaaatgtcccttacaggaaccggcagcagctaggcagtcaccggcccgcctccatccaaaatcacgctcgcgtgcttcggaagcatccggggtcactccttctccgctttttcttgcagatgggcctaggcgcgtgtcggttctgtttctccccttggctgcctgtacgcccacagccttctggctgcgacattatagaatcggccgtgtcccccctggtgggggattggggatctgtgtttagccatttatatctactttagctgttaaagaggtccaaatgaaaatcaggtgattgtggaaccatggggacttgggggtggggca

SEQ ID NO: 22680 - DNA, 518 bp, Homo sapiens
  SIMILAR (320)..(493): 871254mologous to Homo sapiens Niemann-Pick C3 protein; NPC3,accession number AF192522,Smith-Waterman Score=263.
  misc_feature (1)...(518): n = a,t,c or g
ttcccgggtcgacgatttcgtagtaccagaccctggaagaagaatattggccatggagagtatgagagtctctgatgattcaggaaggtcagagcagctcctcaggcctggctgcagctctgggcacttgccaactccctgctggcctttgaggggcggtgcccctggagggccctggctcttatccctgctgttcccacacagaggctgccccggaggcctggggagccacgagaggtccacattgggcgagccctaggcagggtggctcccagcatgctgttgtgcagcctctctgaggctatctgcttcttcctagatgtcagcctttgtggccctgctctccctggacagcaagaggcaggaggcctcccggttggacgtctgctgctgtgtcaagccccaggagctggccccgcctggccagggagaggggactctgcttggcgtcctccanaaagctnatgcccccttnctgctgcactggataactccnaggngttgngctgctgctgttt

SEQ ID NO: 22681 - DNA, 413 bp, Homo sapiens
  SIMILAR (398)..(168): 1001254mologous to Homo sapiens HSPC255,accession number AF161373,Smith-Waterman Score=380.
tcacaaggcagaggctgagcatatgtcttatcacgaaatcgtcgacccgggtcgacgatttcgtcccatgccagctgtgcggacctttgccctgacctctggccttgcagtgatccttgacttcctcctgcagatgtcagcctttgtggcccgggtcgacgatttcgtgctacctttgcctccttttctatgatagccacttgcttcttggccagcttctccagctcgatggacgagttgttggcatgcgtctccacctccttctgtagcttgaggcggtgctcgtccatctcagccttcagcttgttctccagggcgatcagctgcttctggtgctggcgccgcatccgcttataacctgacatctgttcccgcaactcgttctcctgctcatgctcagcctctgccttgtg

SEQ ID NO: 22682 - DNA, 2949 bp, Homo sapiens
  SIMILAR (1)..(2649): 991254mologous to Homo sapiens Niemann-Pick C3 protein; NPC3,accession number AF192522,Smith-Waterman Score=4553.
atggcggaggccggcctgaggggctggctgctgtgggccctgctcctgcgcttggcccagagtgagccttacacaaccatccaccagcctggctactgcgccttctatgacgaatgtgggaagaacccagagctgtctggaagcctcatgacactctccaacgtgtcctgcctgtccaacacgccggcccgcaagatcacaggtgatcacctgatcctattacagaagatctgcccccgcctctacaccggccccaacacccaagcctgctgctccgccaagcagctggtatcactggaagcgagtctgtcgatcaccaaggccctcctcacccgctgcccagcctgctctgacaattttgtgaacctgcactgccacaacacgtgcagccccaatcagagcctcttcatcaatgtgacccgcgtggcccagctaggggctggacaactcccagctgtggtggcctatgaggccttctaccagcatagctttgccgagcagagctatgactcctgcagccgtgtgcgcgtccctgcagctgccacgctggctgtgggcaccatgtgtggcgtgtatggctctgccctttgcaatgcccagcgctggctcaacttccagggagacacaggcaatggtctggccccactggacatcaccttccacctcttggagcctggccaggccgtggggagtgggattcagcctctgaatgagggggttgcacgttgcaatgagtcccaaggtgacgacgtggcgacctgctcctgccaagactgtgctgcatcctgtcctgccatagcccgcccccaggccctcgactccaccttctacctgggccagatgccgggcagtctggtcctcatcatcatcctctgctctgtcttcgctgtggtcaccatcctgcttgtgggattccgtgtggcccccgccagggacaaaagcaagatggtggaccccaagaagggcaccagcctctctgacaagctcagcttctccacccacaccctccttggccagttcttccagggctggggcacgtgggtggcttcgtggcctctgaccatcttggtgctatctgtcatcccggtggtggccttggcagcgggcctggtctttacagaactcactacggaccccgtggagctgtggtcggcccccaacagccaagcccggagtgagaaagctttccatgaccagcatttcggccccttcttccgaaccaaccaggtgatcctgacggctcctaaccggtccagctacaggtatgactctctgctgctggggcccaagaacttcagcggaatcctggacctggacttgctgctggagctgctagagctgcaggagaggctgcggcacctccaggtatggtcgcccgaagcacagcgcaacatctccctgcaggacatctgctacgcccccctcaatccggacaataccagtctctacgactgctgcatcaacagcctcctgcagtatttccagaacaaccgcacgctcctgctgctcacagccaaccagacactgatggggcagacctcccaagtcgactggaaggaccattttctgtactgtgccaatgccccgctcaccttcaaggatggcacagccctggccctgagctgcatggctgactacggggcccctgtcttccccttccttgccattggggggtacaaaggaaaggactattctgaggcagaggccctgatcatgacgttctccctcaacaattaccctgccggggacccccgtctggcccaggccaagctgtgggaggaggccttcttagaggaaatgcgagccttccagcgtcggatggctggcatgttccaggtcacgttcatggctgagcgctctctggaagacgagatcaatcgcaccacagctgaagacctgcccatctttgccaccagctacattgtcatattcctgtacatctctctggccctgggcagctattccagctggagccgagtgatggtggactccaaggccacgctgggcctcggcggggtggccgtggtcctgggagcagtcatggctgccatgggcttcttctcctacttgggtatccgctcctccctggtcatcctgcaagtggttcctttcctggtgctgtccgtgggggctgataacatcttcatctttgttctcgagtaccagaggctgccccggaggcctggggagccacgagaggtccacattgggcgagccctaggcagggtggctcccagcatgctgttgtgcagcctctctgaggccatctgcttcttcctaggggccctgacccccatgccagctgtgcggacctttgccctgacctctggccttgcagtgatccttgacttcctcctgcagatgtcagcctttgtggccctgctctccctggacagcaagaggcaggaggcctcccggttggacgtctgctgctgtgtcaagccccaggagctgcccccgcctggccagggagaggggctcctgcttggcttcttccaaaaggcttatgcccccttcctgctgcactggatcactcgaggtgttgtggtcccttctcagctgctgctgtttctcgccctgttcggagtgagcctctactccatgtgccacatcagcgtgggactggaccaggagctggccctgcccaagctgaagaagccttcagtggaaactgtctccagtgggcaggtgttggagaacccgccctcttcaggtgaagagtttgggcatctggctgcactatcctccaagtggcacccaaaacctgcactgggaacatgggccctgacctggtggacatcaccacctggtgacagagtgccaggcgcattccatccagatgaggaagatgaaggagactgcgtcagaaagtgctgccagtcagcaatcaattccaccacttcactatcaagttctttctgccccaccagtcctgccatgccagcatga

SEQ ID NO: 22683 - DNA, 362 bp, Homo sapiens
  SIMILAR (288)..(362): 1001254mologous to Homo sapiens Niemann-Pick C3 protein; NPC3,accession number AF192522,Smith-Waterman Score=128.
ttcccgggtcgacgatttcgtcctgagtggctgggctgaagggaggtggggtatggttgctggagactggaggttagggtggagggcttgcaaggagttgcatgagatgaggaccagttttaggtcaggaggctctggctgcagccttgggcctatttcttaggctggtttgtaccccaatataagcctgcctgaccctcagcattctccttctgaagtggggtgtcccacccaccatgagggccccagaggcctgagcctgtgaccatgctctgtgctctggcaggatcaccaatgtgttttatgagcagtacctgaccatcctccctgaggggctcttcatgctcagcctctgccttgtg

SEQ ID NO: 22684 - DNA, 4495 bp, Homo sapiens
  SIMILAR (1)..(2166): 1001254mologous to Homo sapiens truncated Niemann-Pick C3 protein; NPC3T,accession number AF192523,Smith-Waterman Score=3762.
atggcggaggccggcctgaggggctggctgctgtgggccctgctcctgcgcttggcccagagtgagccttacacaaccatccaccagcctggctactgcgccttctatgacgaatgtgggaagaacccagagctgtctggaagcctcatgacactctccaacgtgtcctgcctgtccaacacgccggcccgcaagatcacaggtgatcacctgatcctattacagaagatctgcccccgcctctacaccggccccaacacccaagcctgctgctccgccaagcagctggtatcactggaagcgagtctgtcgatcaccaaggccctcctcacccgctgcccagcctgctctgacaattttgtgaacctgcactgccacaacacgtgcagccccaatcagagcctcttcatcaatgtgacccgcgtggcccagctaggggctggacaactcccagctgtggtggcctatgaggccttctaccagcatagctttgccgagcagagctatgactcctgcagccgtgtgcgcgtccctgcagctgccacgctggctgtgggcaccatgtgtggcgtgtatggctctgccctttgcaatgcccagcgctggctcaacttccagggagacacaggcaatggtctggccccactggacatcaccttccacctcttggagcctggccaggccgtggggagtgggattcagcctctgaatgagggggttgcacgttgcaatgagtcccaaggtgacgacgtggcgacctgctcctgccaagactgtgctgcatcctgtcctgccatagcccgcccccaggccctcgactccaccttctacctgggccagatgccgggcagtctggtcctcatcatcatcctctgctctgtcttcgctgtggtcaccatcctgcttgtgggattccgtgtggcccccgccagggacaaaagcaagatggtggaccccaagaagggcaccagcctctctgacaagctcagcttctccacccacaccctccttggccagttcttccagggctggggcacgtgggtggcttcgtggcctctgaccatcttggtgctatctgtcatcccggtggtggccttggcagcgggcctggtctttacagaactcactacggaccccgtggagctgtggtcggcccccaacagccaagcccggagtgagaaagctttccatgaccagcatttcggccccttcttccgaaccaaccaggtgatcctgacggctcctaaccggtccagctacaggtatgactctctgctgctggggcccaagaacttcagcggaatcctggacctggacttgctgctggagctgctagagctgcaggagaggctgcggcacctccaggtatggtcgcccgaagcacagcgcaacatctccctgcaggacatctgctacgcccccctcaatccggacaataccagtctctacgactgctgcatcaacagcctcctgcagtatttccagaacaaccgcacgctcctgctgctcacagccaaccagacactgatggggcagacctcccaagtcgactggaaggaccattttctgtactgtgccaatgccccgctcaccttcaaggatggcacagccctggccctgagctgcatggctgactacggggcccctgtcttccccttccttgccattggggggtacaaaggaaaggactattctgaggcagaggccctgatcatgacgttctccctcaacaattaccctgccggggacccccgtctggcccaggccaagctgtgggaggaggccttcttagaggaaatgcgagccttccagcgtcggatggctggcatgttccaggtcacgttcatggctgagcgctctctggaagacgagatcaatcgcaccacagctgaagacctgcccatctttgccaccagctacattgtcatattcctgtacatctctctggccctgggcagctattccagctggagccgagtgatggtggactccaaggccacgctgggcctcggcggggtggccgtggtcctgggagcagtcatggctgccatgggcttcttctcctacttgggtatccgctcctccctggtcatcctgcaagtggttcctttcctggtgctgtccgtgggggctgataacatcttcatctttgttctcgagtaccagaggctgccccggaggcctggggagccacgagaggtccacattgggcgagccctaggcagggtggctcccagcatgctgttgtgcagcctctctgaggccatctgcttcttcctaggggccctgacccccatgccagctgtgcggacctttgccctgacctctggccttgcagtgatccttgacttcctcctgcagatgtcagcctttgtggccctgctctccctggacagcaagaggcaggaggcctcccggttggacgtctgctgctgtgtcaagccccaggagctgcccccgcctggccagggagaggggctcctgcttggcttcttccaaaaggcttatgcccccttcctgctgcactggatcactcgaggtgttgtggtcccttctcagctgctgctgtttctcgccctgttcggagtgagcctctactccatgtgccacatcagcgtgggactggaccaggagctggccctgcccaaggactcgtacctgcttgactatttcctctttctgaaccgctacttcgaggtgggggccccggtgtactttgttaccaccttgggctacaacttctccagcgaggctgggatgaatgccatctgctccagtgcaggctgcaacaacttctccttcacccagaagatccagtatgccacagagttccctgagcagtcttacctgagccatccctgcctcctcctgggtggatgacttcattgactggctgaccccgtcctcctgctgccgcctttatatatctggccccaataaggacaagttctgcccctcgaccgtcaactctctgaactgcctaaagaactgcatgagcatcacgatgggctctgtgaggccctcggtggagcagttccataagtatcttccctggttcctgaacgaccggcccaacatcaaatgtcccaaaggcggcctggcagcatacagcacctctgtgagacttgacttcagatggccaggttttagcctccaggttcatggcctatcacaagcccctgaaaaactcacaggattacacagaagctctgcgggcagctcgagagctggcagccaacatcactgctgacctgcggaaagtgcctggaacagacccggcttttgaggtcttcccctacacgatcaccaatgtgttttatgagcagtacctgaccatcctccctgaggggctcttcatgctcagcctctgccttgtgcccaccttcgctgtctcctgcctcctgctgggcctggacctgcgctccggcctcctcaacctgctctccattgtcatgatcctcgtggacactgtcggcttcatggccctgtggggcatcagttacaatgctgtgtccctcatcaacctggtctcggcggtgggcatgtctgtggagtttgtgtcccacattacccgctcctttgccatcagcaccaagcccacctggctggagagggccaaagaggccaccatctctatgggaagtgcggtgtttgcaggtgtggccatgaccaacctgcctggcatccttgtcctgggcctcgccaaggcccagctcattcagatcttcttcttccgcctcaacctcctgatcactctgctgggcctgctgcatggcttggtcttcctgcccgtcatcctcagctacgtggggcctgacgttaacccggctctggcactggagcagaagcgggctgaggagggcggtggcagcagtcatggtggccctcttgcccaaatcacccctcccgagtctccacagctgacaacatctatgtcaaccacagctttgaaggttctatcaaaggtgctggtgccatcagcaacttcttgcccaacaatgggcggcagttctgatacagccagaggccctgtctaggctctatggccctgaaccaaagggttatggggatcttccttgtgactgccccttgacacacgccctcctcaaatcctaggggaggccattcccatgagactgcctgtcactggaggatggcctgctcttgaggtatccaggcagcaccactgatggctcctttgctcccatagagggtccccagtttccaagtcacctaggccttgggcagtgcctcctcctgggcctgggtctggaagttggcaggaacagacacaactccatgtttggcccacactcagtcactttcctaggagcccacttctcatccaacttttcccttctcagatcctctctcgaaagccttaagtccgtgtcaacaagtctttaacacgtagcagtggtccctgaggaacacagacaatggaccactaccctggggtggtggataatcacaggaggccaagaagagaggcaaa

SEQ ID NO: 22685 - DNA, 402 bp, Homo sapiens
  SIMILAR (306)..(109): 341254mologous to Haematobia irritans serine protease,accession number Z22561,Smith-Waterman Score=76.
gaggttactcaagccatcactggcttcccccggaacagaatgttcttcaaaatgttgagatgtcatagaagcaatcaggtcactgcttccacatagcttctctggctcttctggtgcatcccctccaagggaagtattttgaagatcaaagatgcctgttgctggacaaccgtctccgctcagcagcagaggcataggcatcctctgagtctgattccaccccatgcaggtgaatggcttattcctggcccccaaacagtaattcttcacactgtatcaaggagttacccctgttcatgggaaagatacctgccgccagctaggatggtgggccccaaggtttagcaattttcccccccggagtaatcgttggcatttgaaaggaaaaaatccaatccaaaa

SEQ ID NO: 22686 - DNA, 499 bp, Homo sapiens
  SIMILAR (497)..(339): 331254mologous to Helicobacter pylori J99 Ferredoxin,accession number AE001463,Smith-Waterman Score=65.
tttcacataagggatcactttgtgccacagcgatctcggacaaccaggttccggccttccttcaggtgtatggtgaggaggtacgcaaaagggctggggaggatactcaagccatcactggctttccccggtacagattgttcttcaaaatgttgagatgtcatagaagcattcaggtcactgcttccacatagcttctctggctcttctggtgcatcccctccaagggaagttttctgaagatcaaagatgccgttgctggacacccgtctccgcttagcaggagaggcataggcctcctctgagtctgtttccaccacatggaggtgactggcttcttccttgctccaatccaattcttcttcagactgtttcaagggagctactggtggtcttgggaaagatccctgcagtggacagactgctgggcaccgaggtgtaggaagactgtggcccggagtaaggccggccctctgggacgaaatagtcgacccgggaa

SEQ ID NO: 22687 - DNA, 765 bp, Homo sapiens
  SIMILAR (35)..(250): 401254mologous to Oryza sativa DNA binding protein,accession number X88799,Smith-Waterman Score=88.
ttaacgatgataattttcatacacgctccgatgacccgcgcgacgaggccgcgatgaatgttgagtcttggccccattccgcgcgacgcgtccgccgtcgcgccgcacccgctgatccaaagcaacatacccaacgccctccaatgaccagacccgcacaatacgcacatcacgcgaacgagcatcgatgccacgaagcgccgaaccaaaacgacccacgatcccgcgtctgcacccttcaccccgcggtatagtaactgtgtcctccccccacgctctcacgccctccctgtaagccacatacacagctgtcactcccgcacagcgatctcggacaaccaggttccggccttccttcaggtgtatggtgaggaggtacgcaaaagggctggggaggttactcaagccatcactggcttcccccggtacagattgttcttcaaaatgttgagatgtcatagaagcattcaggtcactgcttccacatagcttccaggaaatgagtccacagggcaatgacacctgcatcatgcagtagttagtatggggcacagattcctcagttgtgtcagcttttataggcacaaaggagattttatctgtttctggaactttaacagagtttctgggctgaatgtgaggacagctgctgaatttcccaatatcaatagatttatttgtatgtgttttataccatacactatcatttcccaataatgcaatcaaatgcaatcgttctgcctgatttccagcatcaataaccat

SEQ ID NO: 22688 - DNA, 365 bp, Homo sapiens
  SIMILAR (345)..(58): 371254mologous to Homo sapiens Fragmented human NF-H gene +1 frameshift mutant product,accession number W18664,Smith-Waterman Score=93.
cctctagagcggccgcaatacattggtggggtctggtaggaccagctgtagtccgagccctttaggtctttgattacctgctcgctggcgggaggcagtttgtggggttctgctgtcagcaccaccaagtcgtcgatgatgccctgcaggtgggtgatctctcccagcatggtcagctctccattcaccacaggctgcaggaaggtgatgaaggtgcagaagcggccccgctcctcgatcagcgcccggcgcacggcctgcttctccgtctcctccagcagcaggtacatgtcgttgacgtcctgcagggcactgtccagctggggctgcaggtctcctttccctttgcccgcgttgcagcacac

SEQ ID NO: 22689 - DNA, 621 bp, Homo sapiens
  SIMILAR (299)..(120): 331254mologous to Arabidopsis thaliana Putative ribosomal protein L34,accession number AC021043,Smith-Waterman Score=81.
atgagccaccatgcccagctggatggttgtgataaacccacatgctcctccctctcgctgagagccactgctcgcaggggacagtgtgctcaggtgttggtgatgcaagagctggcgcagcagagcctcagagacccagctctgctgccaccaccatctctgtcagtcccacggggtggatacaagtctccagaaaaatctggaagggatgttattcccctgaatggagagctgaccatgctgggagagatcacccacctgcagggcatcatcgacgacttggtggtgctgacagcagaaccccacaaactgcctcccgccagcgagcaggtaatcaaagacctaaagggctcggtctacagctggtcctaccagaccccaccttcatcacccagcagctccagctcccggaagtccagcatgtgcaggggaaggacgtctgcaaaggcatccccgaaccctttgtactttaattggaagaagcaacgatttgccgccaagcctcattttagaagaccacagtcctctctgaacccccagcagtggctgctggctgggctcttgcaagaagagtcaagttctttgggcaccgacacggcacccctccattctctgggctga

SEQ ID NO: 22690 - DNA, 1900 bp, Homo sapiens
  SIMILAR (273)..(1067): 421254mologous to Macaca mulatta hnRNP A1-gamma isoform,accession number M84334,Smith-Waterman Score=339.
ctttctgtcttgatgacctgtctagtgctataaatgaacacctttctgcccgtggacgccgccgaagaagcatcgttaaagtctctcttcaccctgccgtcattggtctaaagtcaaagtttcttaaaaagcccgaccagttgaggaagctttttcattggagggttgagctttgaaacgactgatgagagcctgaggagccattttgagcagatggggaacgctcacggactgtgtggtaatgagagatccaaacaccaagcgctccagggggctttgggtttgtcacatatgccactgtggaggaggtggatgcagctatgaatgcaaggccacacaaggtggattggaagagttgttggaaccaaagagagctgtttcaagagaagattctcaaagaccaggtgcccagcttaactgttgaaaaagatatttgttggtggcattaaagaagacactgaagaacatcacctaagagattattttgaagagattattttgaacagtatgggaaaattggaagtggttgaaatccattgactggaccggaggccagtggccaagaaaaaggggctttgcctttgtaacctttgacggccatgactccgtggataagattgtcattcagaaataccatactgtgaatggcccacaactgtgaagttagaaaagccctgtcaaagcaagagatggctagtgcttcatccaagccaaagagggtcgagtgggttctggaaacttttggtgtggtcggacgaagtggtttcggtgggaatgacaacttcggtccgtggaggaaacttcagttggtccgtggtggcctttggtggcaagccgtggtggtgtttggatatgggtggcagtgggggatggctataatggatttgggtaatgatggaagccattttggaaggtggtggaagctaccaatgattttggggatttccaccaatcagtcttccaaattttggaccccatgaagggggggaaatttgggaggccagaagctctggccccctatgggcggtggaggcccaatactttgcaaaacccacgaaacccaaggtggcctatggccggttcccagcagcagccagtagctatggcaagtggccagaagattttaattaggaaaccaaagcttaagcaggagaggagagccagagaagtgacaagggaagctacaggttacaacagattttgtgaaactcgccccagacacagtgggtgccagggcctagctgctaccaaagaagaacatgtatttagaccaaatactcatgtgtaatgggcaaaaaaactccgaggggctgtaatttgtgacgtaattgtataacagggttattttagtttctgttctgtgggaaagttgtaaagcattcccaccaaggggttttaaaggtagattttttttttttttgcacccccatgactgttgattgctaaatgtaaccagtctgattgtgatactgaataaatgtcttttttttttaatgtgcctgtgtaaagttagtctacctcttaagccatcttggtaaattttccccaagagtgtgaagttagaattccttcagggtgatgccaggttctatttggaatttatatacaacctgcttgggtggagaaacccttgtcttcggaaacctctggtgtagtggaacttgataagttactgttgtgacctgaagttcacccattaaaagggattaccccaagcaaaatccatggaattattggttataaaagtgaattgttgggcacatccctatgccatatatctaaaatttgaataatggtaccagattaaaattatagatggggaatgaagccttgtgtatcattcattatcatgtgtaatccaataaccgatttaattctcttgaatgaaaaaaaaaaaaaa

SEQ ID NO: 22691 - DNA, 642 bp, Homo sapiens; identical to SEQ ID NO: 2629
  SIMILAR (273)..(449): 501254mologous to Homo sapiens Human secreted protein, SEQ ID NO: 6812,accession number G02731,Smith-Waterman Score=132.

SEQ ID NO: 22692 - DNA, 659 bp, Homo sapiens
  SIMILAR (345)..(659): 1001254mologous to Homo sapiens unnamed protein product,accession number AK023249,Smith-Waterman Score=544.
  misc_feature (1)...(659): n = a,t,c or g
catagccagtgcattgtgcggccatttaggagacactatatagatacagcgggcgcgagctcggccccccacacgtgtggtctagagctagcctaagctcgagaagcttgtcgacaaattcagatctccgtagcagtggcagcataaactgcaaaagatttagttggtgtcttgattagccatccattccttaagtctccctcatctttgatggaatcaaacgaaacgntcggacccgggaacccgggtcgacgatttcgtgcgtccgcgaccaggaggatcggaccttcgccttcgctgtcgccgccgccgccgcccgcggccgtcggggctattagtgaaagatggtggatcgcttggcaaacagtgaagcaaatactagacgtataagtatagtggaaaactgttttggagcagctggtcaacctttaactatacctggacgagttcttattggagaaggagtattgactaagttgtgcaggaaaaagcccaaagcaaggcagtttttcttgtttaatgatattcttgtatatggcaatattgtcatccagaagaaaaaatataacaaacaacatattattcccctggaaaatgtcactattgattccatcaaagatgagggagacttaaggaatggatggctaatcaagacaccc

SEQ ID NO: 22693 - DNA, 432 bp, Homo sapiens; identical to SEQ ID NO: 1960
  SIMILAR (258)..(220): 531254mologous to Homo sapiens Angiogenic factor from human basic fibroblast growth factor,accession number R12112,Smith- Waterman Score=38.

SEQ ID NO: 22694 - DNA, 666 bp, Homo sapiens
  SIMILAR (370)..(639): 601254mologous to Homo sapiens p40,accession number U93567,Smith-Waterman Score=278.
atggggaaaatgtctccaggccatgtcagagactttcacggcagaccctcccatcacaggcccagaggcccaggaggaaaaagtggttttgtgggcaaggtccagggtccccatgctgtgtgcagcctagggacttggtgccttgtgtcccagccactccacccatggctgaaaggggccaatgtacagctcaggctgtggcttcagaaggtggaagccccaagccttggcagcttccacgtggtgttgagcctatgggtgcacagaagtcaagaactgaagtttgggaacctttgcctagatttcagaagatttatggaaacacctggatgcccagaattcccatgtgttgtgcgagagatccgggaggagctaaaggaggatgttcgaacccatcacaaaggagataaaaaccttgaaaaaagattagatgaatggctaactagaataaacagtgtagagaagtccttaaatgacctgatggagctgaaaaccatggcacaagaactacatgatgcatgcacaagcttcagtagccaatttgatcaagtggaagaaagggtgtcagtgattgaagatcaaatgaatgaaatgaagcaagaagagaagtttagagaaaaaagagtaaaaagaaacaaagccgccaagaaatatgggactatgtga

SEQ ID NO: 22695 - DNA, 1056 bp, Homo sapiens
  SIMILAR (316)..(840): 311254mologous to Mus musculus alpha-1 type I procollagen,accession number K03036,Smith-Waterman Score=113.
atgagtttggaaaatcagaacagtcacactggaggtttaaaaacatctttagagaggcccttccacaaacatcgaatcttgggtgaccctcacgctaacactgaggcaaatatttctgtgcccatttcacaaatgagtccagtgaagcttacagaagtgaagcggcttgttcaagagtcacaagccagcaaggagctgaagcaagttctgcggggccattttcgtctcccaagtgacatacaaatatgtagttcaggtcataaggtccccgacacgcagaccctgcaaacttttcggccagaaatttgtcgcgaccctgagacgcccccggccgtgtccaggacccccgtcctcaggccccacaacttctcgcccggcctcggggctccttcccgcgtccgccggcccccgccccgcagacccgtggaccggaccctacccggcggcccccgtccccccgcggcggcggcggcgtcctacgggcgggcgcggctcgctcccgggctggcgggacggcggcggcaactggcccgcgggccggccccggcgcgaggggagcggccgggagcgccccgtttctcacagaccccaacatggcgtcggccgccaccgcccgcgacgacgacacctcccggcgctgcgacggctccgggaccgcgggaggaagcgcccggaaagtttcgcgtctcccctcccggcccgtcaggagccggcggaccacccacccgggcttcacctaccccgacggccgcgggcggcggcggcggcgacagcgaaggcgaaggtccgatcctcctggtcgcggacgcagggcgcggactctgcccgttccccgccggggcttccagggtgtgtgctgtccgcagccccgcgcagccggcgcgatccagacgcggtgggcgggctggccgccagcgcagccgctcgcaggctgaacaccacatggaagctgccacagcttggggcttccaccctctgaagccacagcccgagctctacattggcccctttcagccatggctggagtggctggaatacaaggcaccaagtccctag

SEQ ID NO: 22696 - DNA, 426 bp, Homo sapiens
  SIMILAR (274)..(426): 981254mologous to Homo sapiens unnamed protein product,accession number AK023249,Smith-Waterman Score=252.
  misc_feature (1)...(426): n = a,t,c or g
cgtccgtgacattctgcggccatttaagagacactatataatacagcgggcgcgagctcggccccccacacctgtggtctagagctagcctaagctcgnnnnnnnnnnnnnnnnnnnnagatttcccgggtcgacgatttcgttttatgctgccactgctacggagttcccgggtcgacgatttcgtcctgcgtccgcgaccaggaggatcggaccttcgccttcgctgtcgccgccgccgccgcccgcggccgtcggggctattagtgaaagatggtggatcgcttggcaaacagtgaagcaaatactagacgtataagtatagtggaaaactgttttggagcagctggtcaacctttaactatacctggacgagttcttattggagaaggagtattgactaagttgtgcaggaaaaagtccaaa

SEQ ID NO: 22697 - DNA, 2579 bp, Homo sapiens
  SIMILAR (253)..(441): 961254mologous to Homo sapiens unnamed protein product,accession number AK023249,Smith-Waterman Score=312.
  misc_feature (1)...(2579): n = a,t,c or g
gttcgtgacattcagcggccatttatgtgacactatctaatacagagggcgcgagctcggccccccacacctgtggtctagagctagcctaagctcgnnnnnnnnnnnnnnnnnnnnagatttcccgggtcgacgatttcgtttgattccatcaaagatgagggagacttaaggaatggatggctaatcaagacaccaactaaatcttttgcagtttatgctgccactgctacggagttcccgggtcgacgatttcgttctaatgatattcttgtatatggcaatattgtcatccagaagaaaaaatataacaaacaacatattattcccctggaaaatgtcactattgattccatcaaagatgagggagacttaaggaatggatggctaatcaagacaccaactaaatcttttgcggtttatgctgccactgctacggagttcccgggtcgacgatttcgtcctgcgtccgcgaccaggaggatcggaccttcgccttcgctgtcgccgccgccgccgcccgcggccgtcggggctattagtgaaagatggtggattgcttggcaaacagtgaagcaaatactagacgtataagtatagtggaaaactgttttggagcagctggtcaacctttaactatacctggacgagttcttattggagaaggagtattgactaagttgtcgcaggaaaaagcccaaagcaaggcagtttttcttgcgtaatgatattgttgtatagggcaacattgtcatccagaagaaaaaatatatcaagcaacatattattcccctggaaaatgtcactattgattccatcaaagatgagggagacttaaggaatggatgggtaatcaagacaccaactaaatcttttggcagtttatgctgccactgctacggagaaatcagaatggatgaatcatataaataaatgtgttactgatttactctccaaaagtgggaagacacccagtaatgaacatgctgctgtctgggttcctgactctgaggcaactgtatgtatgcgttgtcagaaagcaaaattcacacctgttaatcgtcgccaccattgccgcaaatgtggttttgttgtctgtgggccctgctctgaaaagagatttcttcttcccagccagtcctctaagcctgtgcggatttgtgacttctgctatgacctgctttctgctggggacatggccacatgccagcctgctagatcagactcttacagccagtcattgaagtctcctttaaatgatatgtctgatgatgatgacgatgatgatatgcagtgactaaggacacatttgggagtatttaatcaggtgaggctctctgagaaatcaactttgggggaaatgcaagactctgagctctctctctgtctgttttgttctagccatgaatttgcctgagaaacttgtaacctatgtgcctcaatatattccatagaaagtaggtccccctgccttctcccactcctcacactcttctacagggataggcttttgcaaatatatcagataaattttttgtttcttgtttatttttaggttattttcttggaaggttgggaaaagaggtttgtttaaccaggtcatgtactacggtgttgtttttcatgttctgttataagtaaaactaaaaagcacagaattggtgggaaaaggggctataatgtgggttccattaataatgttagcagcttttttctaaccatcctgtctaatggttaagacacccagtaacaaaaacacatgatttggaaatactttggctttttcatatacctagtggtgccttatcataatagcaccggtaacatgaaataagcccctaccttcttactttctggtttgttgaaaaaatacactggtgctctttgaagtgataaaatgagtgtttatgaatgggtgtaattaggaaatacttctcatctgacagctacaaataactaagttgtggaggtattttcactctatggtgaataaatatttttccctaaaataggtgggaatatatttttgcgtttatatagggctccaaattataattggcgaatatatattgtaaattaataaaagctgtcattcttaggaatttggtttgaaatttatcagttatacagaattgtcatactgcattagcttctacctttagtaagacatattttttaggtataaattcttatgctttaacattatttctggattgaaaatcttataaaacccttgaaaataaacagtctcttttttacaaagcctgtgttagagcacagatttacctaggcttgaagatttggaagaaataatatgtaagaatggcctcaaggcagaccactttaagtttggctagacttcatatcgtggaagtattgtctatttcagtgtgaaactatcttgaatttgcaaatatagtgttatattttataaagttttgtaaaatcccaaacaatatttctatttttgtaaaacaattgtatgtataatctgtatttgaaatcattttgcaatctatggaaatagagtagcaattgctatttctaaattgtgaactttaagtcaatctagatttatt

SEQ ID NO: 22698 - DNA, 2373 bp, Homo sapiens
  SIMILAR (1783)..(2238): 1001254mologous to Escherichia coli Lysine-specific permease,accession number D90767,Smith-Waterman Score=793.
atgctttcagccagtgcttccagcgcctgttcaaagcacgcaagcggtgcccgcacggtgccttgcgccaatctgcccgatccccgcctttttatgggcgataccggtattgatgagtggcgtaatgccggtttctaccacgcgacgaatgtccagccccaggcacgcgccctgaaaatcccagcttgggatctgcaactgcatattgcgttcaaggtaaatttccgccatctcttcagataccgctcttgccgcttccatgccacccgcaccgacaaagcgcgttacgccaggcgctgcgatcattgccgcacctccgataccaaaggtttcggtaatcgcgctatcgcccatatccgggttcgcctgctcctgcgagaagccggtgaaaaacagaccttgcggagtgtttacaggcgcagtaaaccagcgttcgcccagcccgcttacccgaatcccgaacatattgccgttgcgggtcattgccgtgacgatgctgcctgcgcggatcatcgcgccagcatccatcgccgccttgcattcgcagcccaagtcctggactacctgcaacaagaaaatagttacggtcatcgggtgatggcctcacaacaagccttgcaggatcgcatcttaaaggaaatcatcgaccgcattccgcaacgagaagtttctgcgccctacatcaaaaatggctaccgctatcggcatatttatgaaccaggctgtgaatatgctatctaccagcgtcaatcggcattcagtgaagagtgggatgggcgtagctgggttcgaaaagggctggaagccggattaacgctggggatagaaacggtctggagcaaaaagcgtatcctgacggtttacctgaatatcgccgaatttggcgacggtgtgtttggcgtcgaagctgcggcacaacgttatttccacaaacccgcgagcaaacttacccggtcggaagctgcattactggcagctgtattacctaatccacttcgtttcaaagtctcctcgccatcgggctacgtgcgtagccgtcaggcgtggattttacggcagatgtatcagttaggcggtgagccgtttatgcaacaacaccaccatcgctgttgttatcgacatgttcgaaaaaaaaccagtgggctgggccatgtcgttctcgccggacagcaggcttaccatgaaagcactggaaatggcatgggaaacccgtggtaagcccgtcggggtgatgttccaagcgatcaaggcagtcattatacgagcaggcagttccggcagttactgtggcgataccggatcaggcagagtatgagtcggcgtggaaactgctgggataacagcccaatggagcgcttcttcaggagtctgaagaacgaatgggtgccagcgacgggctatgtaagcttcagcgatgcagctcacgcaataacggactatatcgttggatattacagcgcactaagaccgcacgaatataatgttgcagtagcaggagatcatccagccgcagtacaggtcacgatgactctggttaatgataccggctttgaccccgtattttccgggtctatcggtgactcatggcgtcagcagctgtgcacaccatcctattgttgtgagagggcgtcttccagggcgattgtacctccagcatacctcacagtacaccttcacaggttacagaaacgctcccctaccaaacaacgcataagcgtggctgccgcagcttcggtgcatggtttagccccgttacatcttccgcgcaggccgactcgaccactgttctttcccgatatcagccgctttaaagatccggatgccgcactgcctgaaattgcgctgtacgtcggcggcaagctcttccagtcgattttcctctgcaccacgtttgtgaacacgttagcctctggcctggcttcacatgccagcgtgtcgcgtctgctgtatgtgatggggcgtgacaatgtgtttccggagcgcgtgtttggctatgtgcacccaaaatggcggactccggcactcaacgtcattatggtcgggattgtcgcgttgtcggcgctgttcttcgatttagttaccgccacagcgttaattaacttcggtgctctggtggcgtttaccttcgtgaatctgtcggtgtttaatcatttctggcggcgtaaaggaatgaataaaagctggaaggatcacttccactatttgctgatgccgctggttggcgcgctgacggtgggccgacaatacgcgccacataacctgcaccgtaggttcccattgccagaattaacgccattgccgttgatgattcaggaaaaaatatttcatgaaacactaacgctgcgccgagcgaatataactggaaatccataa

SEQ ID NO: 22699 - DNA, 602 bp, Homo sapiens
  SIMILAR (1)..(246): 911254mologous to Shigella dysenteriae InsB,accession number AF153317,Smith-Waterman Score=425.
aggcagagtatgagtcggcgtggaaactgctgggataacagcccaatggagcgcttcttcaggagtctgaagaacgaatgggtgccagcgacgggctatgtaagcttcagcgatgcagctcacgcaataacggactatatcgttggatattacagcgcactaagaccgcacgaatataatggtgggttaccaccaaacgaatcagaaaaccgatactggaaaaactyyaacgcggaggccagttttagttgaccactaacagactacctgaagggagccgcggtcgcctggcagttgcagtagcaggagatcatccagccgcagtacaggtcacgatgactctggttaatgataccggctttgaccccgtattttccggctctatcgctgaatcatggggtcagcattcgggcacaccatcctattgttgagactgggaggctgccaccatgcttcgcgctttccctctggcgaaaaagggagaaactaaagatctgcgtcagttcccgaacatcgataacgcctatatggaactgggcaccaaccgcgcagacgccgttctgcacgatacgccaaacattctgtacttcatgcaattttaa

SEQ ID NO: 22700 - DNA, 1200 bp, Homo sapiens
  SIMILAR (550)..(909): 541254mologous to Mus musculus Pro-Pol-dUTPase polyprotein,accession number Y12713,Smith-Waterman Score=283.
atgtacaaatttgaagttacgaaaaagaccttcacaaactttgagaagcaggctaaagcagtcacaatgggagcagaacccagtctcttgacatctctggggactctgtggtctggtgaacggttccaatgcatgagggccaagcctcaccaggtgtctactgttaaagtgaaggcattgattggaaaagaatgggaccctgcaacttggaatggggacgtgtgggaggaccctgatgaagctggggacactgagcttgtaaaccctgatcaatcttttttgccagaagaaacagcttctccatccccagtattggcaacattccctctccaaccgatgctgccatcagcctttccacctttgtctgaggagataaaccctgcactgcctgaggcaacagtgatggcctcccctgaggcagttgccaggcaagataatgttgattctcctcaggagccactgccaacatccctgtttgcttctagagctataactagactaaagtcctggtgggcccctagaggcaaggttcagagtgtgacccatgaggagaaggcagatggatcttggagaatgacagtggattattgtaagcttaaccaagtggtgactgcaattgcagctgctataccagatgtggtttcattgcttgagcaaattaatacatctcctgatacctggtatgcggccattgacttggcaaatgcccttttctccattcctgtccataaggggtatatcaactctctggctttgtgtcataatgttatttggagagaacttgattgcttttcacttccacgagataccacactggtccattacattgatgacattatgctgattggatccagtgtgcaagaagtagaaaacaaactggacttactggtgaaggataaattgctgcatttggctcctcctacaaccaaggaagaggtacaacacatggtgggcctgtttggattttggaggcagcacattcctcatttgggtgttttacaccagcccatttatcgagtgatccgaaaggctgccagtttgagtggggtccagaacaggagaaggctctgcaacaggtccaggctgctgttggtgggaaacaatctgaaaacaacctgggtcaccagaggtcaccaggcctctggttttcctgaagaccccactgcttctccagaagctgccatggccaccttgctctga

SEQ ID NO: 22701 - DNA, 1330 bp, Homo sapiens
  SIMILAR (693)..(1184): 371254mologous to Homo sapiens ribosomal protein L23a,accession number U43701,Smith-Waterman Score=137.
atgggagcagaacccagtctcttgacatctctggggactctgtggtctggtgaacggttccaatgcatgagggccaagatctgggaaagatctagaaagggaaggagattctctacggatgtaatctcccccacaaaagacagctttgcagggccatttcaaccaattagcgacacgctcgttcagcatcagagaatctatggactgaaagtgtgtgtcctccccgatccctgcaaaattcgtatattgaaacctaatccccagtgtgttggtaaatgggaagaagaggttgctgaaaatgaaattcaagtgtttggtggggagaggtttgatatcaacaaatattctaagtccccacccccaccaactccccaacccctttacctgactgctggctttgcttcctgcagaaatcacagaaaatctgaggagttgagagaaggaaaaggagagtcaccagggaagtcaaagccttttcacttgcaggccaattttactgtagctctggtaactactttacaaggtgataagcattcacaagaggcttttattaggccagtagctaaggcaaaaactacatgcacatatttaagcaacgtgtgtgaaatgaaagactttaaacgtataaattgtcctgacccttttcacaagatggcgccgaaagcgaagaaggaagcttcctgcccctcctgaaagctgaagccaaagcgaaaggctttaaagggccaagaaggcaagtgttgaagaggtgtccacaaccacaaaaaaagaaaaagaaaaaaagaaagatcccgcacgttcacccacctttcccggcggcccggaagaccactgcggattccggagacagccccaaatatccctcgggaagagccgctccccggagaaacaagcttgacccactatgctatcatcaagtttccgctgacccactgagtctgcccatgaagaagatagaagacaacaacacactgtgtgttcatatgtggagctgttaaaagccaccaccaagaaccagattaaacaaggctgttgaagaagcttgtatgacatttgatgttggccaaggttcaacaccctggatttcggcctggatgggagagaagaagggcatatgttccgacttggctcctgatttaccgattgcttttgggatgtttgccaacaaaatttggggattcatctaaacttgagttccagcttgcctaatttctgaatatatatatatatatatatatccttttcaccatatacatgcctgtctgttcatttctggttgggctgggaaggcacacacacacactgacatgacaggggctttggcaagact

SEQ ID NO: 22702 - DNA, 2679 bp, Homo sapiens
  SIMILAR (309)..(425): 841254mologous to Mus musculus IL-1L1 protein,accession number AJ250429,Smith-Waterman Score=164.
ggggcgggcgtgtggttttctaggcactaaaaaggcttgtgttgtttgccaggcaggggaccaatggggccttttgccttttccaaggtggtatgaccaaggaatgaagcctctcccggtttgggcctggattaatataaatccagctggacccagaaaaaagaagcctcagttttcaggcctttgaacaaagcttcagataaaaggtttctgggtcacaacttttaccatgttttttaactttgtagtttcccaggacacagaccctagatccagggcatgctggagtgcccacaccttctcctaatgtagtcctcaccccttcctgatgtttcagaatgaaggactcggcattgaaggtgctttatctgcataataaccagcttctagctggagggctgcatgcagggaaggtcattaaagggtgggtgaagaaacatgaaccactttcctttggctctatacactctcaggggaaggggcccccagaaggcttagaatagtcatacagattaacataggcctacagagcccaggcattagggcagcacaaaccaggctttaagcaaaggcaaataaaatactacacctctcagcaaagtgaagacacacgctctggggccacctgaagcttctgtgcagaagtgagaatgttttccaagaggcttgtcttgtcattcccttacaggtagatttaggtcaagcattgcattccctgggagccagtaagtaccaaggagagaactaacgtagattctctatcccttttttcccatatgggagtgggtttctgcctctccaccaagggtcccctatgctctctgaagattcctcagtcacttagaagggggggacaccagagaacaggtggcattggttggacctcctgcttgctcactctgccccatgcactgcaacaggtcccttctctaaaaaaattttgcacctgcccacctggggcaccccttgctgagcacagatgcccaggtagatccttcagctaggccatatgtgtatgtgtgtgcttactggtgtatgtatgtgtgcatgcaggcatatatgtgtgagcatatgtgtgcacgcatgtatctgtatgtaaccatgtatgtgtgagtgcaggtatgtaggtatgagcatgggggggggaaaaggaaaaagggggccaggcatgtattcgggccatggaagtatctgatgtatgtgggtggtgaggggattgtacagagaggaaatgagaccttcttttggttttcagcaacctcacaggggggtagaaatttgtccaaaacaattccaaaggggggcttattaagacagggttcagaaaaaggcttgagacccaacggggcattaaaggagggggttgagtctattttgggttgtagaggcttgaagatttgaccctgaactagagggtggagtggaggtggtacaatgtgcttccatgccttgatgtccactctgggccagtggacaggagaagccatgtcatgacagctgctgagaagcctcccttctgcccagcctgggggcaggccgtctcacagcagtcctgtgccctagagcccaggacaggggaagaaggagggaaaggcatccagggccctgcatctggcctctttcccacaggtgaagagatcagcgtggtccccaatcggtggctggatgccagcctgtcccccgtcatcctgggtgtccaagggtggaagccagtgcctgtcatgtggggtggggcaggagccgactctaacactagaggtgagacttggggcatcctcactggggactcagccacagatgctgagcctactgaagccgggcagcccacagccctggtgctgtgggacaccctagcaggattctgttgatggcagctttgcctcctccctaaggatccttgccaaagccctcctttgtggccctggtttctgcccttccctgaccctcccctccttttgccggaagccagtgaccatcatggaggctctatcttggggccaaggaatcccaaaagcttcaccttctaccggcgggacatgggggctcactctccagcttcgagtcggctgctctacccgggctggttcctgtgcacggagcctgaaagccgatcagcctgtcagactcacccagcttcccgagaatggtggctggaatgcccccatcacagacttctacttccagcaggtgtgactagggcaacggtgccccccagaactccctgggcagagccagctcgggtgaggggtgagtggaggagacccatggcggacaatcactctctctgctctcaggacccccacgtctgacttagtgggcacctgaccactttgtcttctggttcccagtttggataaattctgagatttggagctcagtccacggtcctcccccactggatgcctgctactgctgtggaaccttgtaaaaaccacgtggggtaaaactgggaataacatgaaaagatttctgggggcggggggccgcgcccagggtggggaaacatttcctgcttaatggtaactgacaagtgttacccttgagccccgcaggcaaccccattcccaggtggacccttaaggggtcagtagctctcccacatgaagtcctgtcactcaccactgtgccaggagagggaagggggcataagagccagggaactattgccccttgcccagc

SEQ ID NO: 22703 - DNA, 663 bp, Homo sapiens; identical to SEQ ID NO: 10835
  SIMILAR (137)..(661): 971254mologous to Escherichia coli DNA polymerase III beta- subunit,accession number L10328,Smith-Waterman Score=871.

SEQ ID NO: 22704 - DNA, 1080 bp, Homo sapiens
  SIMILAR (585)..(13): 941254mologous to Escherichia coli DNA polymerase III beta- subunit,accession number L10328,Smith-Waterman Score=930.
tcattggcgggatttgagctggctttcgctgacataaagacgtacgccgcggaatttctcgttagagagaatcgccgcgcgagcaaacgcctgcttgagcagatcgcagccagcttccagatgtttgtccgggttcttcggcagaacgcggcgataatccgggaagcgaccatccaccagtttggaggtgaagataaagtcgccaacgtgggcgcgaatgttgttgctgccaatctgtacgcgcagcggattgtcgccgccgtcgagcatacgcatcagttcaatcacgcctttacgcggtacgatcaccgaatggcttggcaaagattgaccaattggcattgaacagaccgccagacggtggccgtcggttgccacggtgcgcagttcttcaccttcggtttcaaacagcataccatttaagtaatagcgaacgtcctgatgcgccatagaaaactgggtcgcttcaatcagacgcttcatcgttgcctgcggcagggtaaattcgacttcactctgccagtcatcgaggttcgggaaatccgccgctttcagcttgaccggcaatttcctgcggcctttctggccaacccacggcgggattattaaaggaaaattgtttccgcccggaaaacgggtcggccgcgtccctcggccccggggtggcgtggaaacacagacgccagacaccgttggcccctccattattttcttatatccgcccctgcagtgaccggagaacggcgtgttcctagggctctgctgccgtcgtggaagcaggatttccgcggttgtgtaacggcctgtcgcaggcgtgcagggacctggactccgcctcgtccccggggctcgggcagccgagccatggcggggaactgtggggcccgcggcgcgctgtcggcgcacacgctgctgttcgacctgccgcccgcgctgctcggagagctctgcgctgttctggacagctgggacagcgccctgggctggcgcggcctgggtgagtccggggggaccgggccggggccggcgggggaagcccaacgccgccgcgggggccccgctcgggcgtcgcccctgcat

SEQ ID NO: 22705 - DNA, 1325 bp, Homo sapiens
  SIMILAR (256)..(158): 1001254mologous to Escherichia coli DNA polymerase III beta- subunit,accession number L10328,Smith-Waterman Score=156.
ttagaggccacatagtccgagatatcgtcctgtgtggtgcctggctttagagcacagggcgatatacagagcacagggcgatgatatcttttggaattcgggattaccaagcggtggagaaccttccagtctcatgggcatgccaacataagccgccgctctggctggccgcatcttcaatctgcacgctggaaaccgaatcggtcagcatcatgcggacgttttcgcatttcagcgcgttcagaacatccagcaccataactgacgttgaagccgatttccatctccgcaccgctataggtaacgtcgaggatctcttccgcttcttcctgttccgggttgttggcggtgattttcagctggttttcgctgacataaagacgtacgccgcggaatttctcgttagagagaatcgccgcgcgagcaaacgcctgcttgagcagatcgcagccagcttccagatgtttgtccgggttcttcggcagaacgcggcgataatccgggaagcgaccatccaccagtttggaggtgaagataaagtcgccaacgtgggcgcgaatgttgttgctgccaatctgtacgcgcagcggattgtcgccgccgtcgagcatacgcatcagttcaatcacgcctttacgcggtacgatcaccgaatggcttggcaaagattgaccaattggcattgaacagaccgccagacggtggccgtcggttgccacggtgcgcagttcttcaccttcggtttcaaacagcataccatttaagtaatagcgaacgtccagccccagacccgcgcccaccagcagcgaaatcgccagacgcggcaacaagctgtagtgaaaaatcatctgctcgatgacgtcaatatccggcgaccaggcagcctgcgcccactggctacgcggcagcgcctgcgagaagttcatccaggtgagcgccgtagcgacaatcactccgatggcgttatccagaacgcgcacaaagtgcattgccgagagcgtcgcaccataaaaccagactgcaggtacgcgctgaaagcgtccggcgcggacaaacggcatggcctgccacagcggcgttgccattagcgcatccatgtctttgctgttgtcgtgatcaaaacagagcacatcaacgtctttatacgccgccagacgatcgatactgacggcggtactgccccagaagttggtttccccttgccaggcatttgggatgccgtactcatcaagaatttccagctcacggatgtgtatcgccgctgcgggtgtcagcgttaagccttgccagccgaaatcttgtgggttaaaggttcctgaatgcat

SEQ ID NO: 22706 - DNA, 2490 bp, Homo sapiens
  SIMILAR (542)..(1123): 501254mologous to Homo sapiens IL-1 receptor-associated- kinase-M; IRAK-M,accession number AF113136,Smith-Waterman Score= 426.
gcctgtcgcaggcgtgcagggacctggactccgcctcgtccccggggctcgggcagccgagccatggcggggaactgtggggcccgcggcgcgctgtcggcgcacacgctgctgttcgacctgccgcccgcgctgctcggagagctctgcgctgttctggacagctgcgacggcgcgctgggctggcgcggcctggcagagagactttcaagcagctggctggatgttcgtcatattgaaaagtatgtagaccaaggtaaaagtggaacaagagaattactttggtcctgggcacagaaaaacaagaccatcggtgaccttttacaggtcctccaggagatgggacatcgtcgagctattcatttaattacaaactatggagcagtgttgagtccttcagagaagagttatcaggaaggtggatttccaaatatattattcaaggaaacagccaatgtcaccgtggataatgttcttattcctgaacataatgaaaaaggagtactgcttaaatcttccatcagctttcaaaatatcatagaaaggaactagaaattttcacaaagactttcttattggggaaaggggagagaatttgggggttaccaggaggggaagattcaaaccctaacatatgctgtcaaattatttaaacaggagaaaaaaatgcagtgtaagaagcattggaagaggtttttatctgagcttgaagttttactactgtttcatcacccaaacatactagagttggctgcatattttacagagacttgagaagttctgtctgatttatccatacatgagaaatggaacactttttgacagattgcagtgtgtaggtgacacggccccactcccttggcacattcgaatcggtatattaataggaatatcaaaaaccattcactacctgcacaacgttcaaccatgctcggtcatctgtggcagtatatcaagtgcaaacatccttttgggatgatcagtttcaccccaaactaactgatttttccatggcacacttccggtccccccctagaacatcaaagttgttgcataaatatgcccagcagcaagcagaaaacatctgtggtacattgccagaagagtacatcagacaggggaaactttccattaaaacagatgtctacagctttggaattgtaataatggaagttctaacaggatgtagagtagtgttagatgatccaaaacatatccagctgcgggatctccttagagaattgatggagaagagaggcctggattcatgtctctcatttctagataagaaagtgcctccctgccctcggaatttctctgccaagctcttctgtttggcaggccggtgtgctgcaacgcgggcaaagttaagaccatcaatggatgaaggtctaaagggcgcttgaaagtactcaagccagcttgtattttggctggagatcctcccacatcactaaaggcccttagggggcctttctcctctattccctggagaaagtaacaaagtattccagtgggaagatgatgaaagagccgaataacaatttactaccctcttgatagaaggccttgaggatgaaacgatggcctcaaaaaaactcctttttgaatgcagccagccttgaggtatggtttctgagcttggaacaaaaagcccgagaagccagagaaaatgaggaagcttgcaacatgcccagttcttctttgtgaagaaagttggttccccaagtataatagttccatccccaggacttaaggcccttataagggaaataaaagatcctttcttcacaagctttcagggcattcttgcctgaaccaagccagtggagagcagctgttcctccaaattttcctgggatgaatatgaacagtacaaaaaagaataaattctaccagaagataaagaaaaaagcaagtattgcataggcacctgagcataggtatgaccttgggaagacattggctccataagcaatgccaagagaatgatcaatagtgagtttgggtgatgcagataaacaatctggataattccatttcttttttcccaaaccctcaaacagagtgccttaaaaaattgttttatcaggataattgtctcatgaccaaatccacgctcaattagagccattcaaaattccttaagatcatgggttctgacttcagccaaacaaaacaatcaaaacctaccaaaaagggactggattgtaatgtcctctccatcatcctcagtgtgagtcctcagagcctccatctgccaagaacattcagttggattccatcgtttggtttagcttgcttgcacgggttgtaggaaatgtctaatttgtaaatgttaatagatacctttggaaagaatcaccttgttattctgattgacccctcttgttttttggttaatccctgactagcctgcttgtctgaaaatgagccaggttcacccttagctacggcatgctctgggttgaaaggggatttcttcccaag

SEQ ID NO: 22707 - DNA, 1964 bp, Homo sapiens
  SIMILAR (410)..(1426): 881254mologous to Homo sapiens Human BAG-4 protein encoded by full length expanded cDNA,accession number Y70516,Smith-Waterman Score=1553.
cggtgggagcggggcgggaagcgcttcagggcagcggatcccatgtcggccctgaggcgctcgggctacggccccagtgacggtccgtcctacggccgctactacgggcctgggggtggagatgtgccggtacacccacctccacccttatatcctcttcgccctgaacctccccagcctcccatttcctggcgggtgcgcgggggcggcccggcggagaccacctggctgggagaaggcggaggaggcgatggctactatccctcgggaggcgcctggccagagcctggtcgagccggaggaagccaccaggagcagccaccatatcctagctacaattctaactattggaattctactgcgagatctagggctccttacccaagtacatatcctgtaagaccagaatttgcaaggccagagtttgaattcttatacaaatggagcgtatggtccaacataccccccaggccctggggcaaatactgcctcatactcaggggcttattatgcacctggttatactcagaccagttactccacagaagttccaagtacttaccgttcatctggcaacagcccaactccagtctctcgtgggatctatccccagcaggactgtcagactgaagcaccccctcttagggggcaggttccaggatatccgccttcacagaaccctggaatgaccctgccccattatccttatggagatggtaatcgtagtgttccacaatcaggaccgactgtacgaccacaagaagatgcgtgggcttctcctggtgcttatggaatgggtggccgttatccctggccttcatcagcgccctcagcaccacccggcaatctctacatgactgaaagtacttcaccatggcctagcagtggctctccccagtcacccccttcacccccagtccagcagcccaaggattcttcatacccctatagccaatcagatcaaagcatgaaccggcacaactttcccttgccagtgtccatcagtacgaatccctcggggaccagtgaacaatggatgattccagaatccttttggattccccaagtcccagtatagtgcctgagccctcagcctgtatgggtaatgcccacccagtgacccatccccaacaatcaagatcaaagtagcagtcttcctgaagaatgtgtaccttcagatgaaagtactcctccgagtattaaaaaaatcatacatgtgctggagaaggtccagtatcttgaacaagaagtagaagaatttgtaggaaaaaagacagacaaagcatactggcttttggaagaaatgctaaccaaggaacttttggaactggattcagttgaaactgggggccaggactctgtacggcaggccagaaaagaggctgtttgtaagattcaggccatactggaaaaattagaaaaaaaaaggattatgaaaggatttataacaaagtggaagcctgttactaacttgaccaaagaacacttgatttggttaattaccctctttttgaaatgcctgttgatgacaagaagcaatacattccagcttttcctttgattttatacttgaaaaactggcaaaggaatggaagaatattttagtcatgaagttgttttcagttttcagacgaatgaatgtaataggaaactatggagttaccaatattgccaagtagactcactccttaaaaaatttatggatatctacaagctgcttattaccagcaggagggaaacacacttcacacaacaggcttatcagaaacctaccagatgaaactggatataatttgagacaaacaggatgtgtttttttaaacatctggatatcttgtcacatttttgtacattgtgactgctttcaacatatacttcatgtgtaattatagcttagactttagccttcttggacttctgttttgttttgttatttgcagtttacaaatatagtattattctct

SEQ ID NO: 22708 - DNA, 320 bp, Homo sapiens
  SIMILAR (77)..(190): 941254mologous to Homo sapiens DNA-binding protein,accession number D49835,Smith-Waterman Score=184.
agcttaaacccctgtcccaagggcgttaaggtcgcccgctggcttggaaggttcacacctatcttccatcagcaccatgatgccggcggtcatgagtgtagggaaggtcacagagaatggcgggagcccccaggggatcaagtccccctcgaagcctccaggaccaaatcggattggctgaaggaaccaggtaagtgttcacacctagcggtgacctctggtgggttcaatccatgagaacattgggagatgtttccgagtttcctatgataaaaccttggaagaattgggaataaaacggacatacccagaggccttga

SEQ ID NO: 22709 - DNA, 5836 bp, Homo sapiens
  SIMILAR (1918)..(4914): 851254mologous to Homo sapiens DNA-binding protein,accession number D49835,Smith-Waterman Score=4352.
cgggatggcaactgcggtcaccctgctaaagtcggggcggggcggcggtcctccccctcaccccccccagtccgagcgccgccgccgccgccgccgccgccgccggccgcttcagtaacacgtccccaggagactcgcaggagcaacacgtgatgtgtctacttatcagggttgctccgagtgtgtgttccaggagtggtggctctgaggtgtgaccctgcccacgtttgggcccagccaccttcagccccccaataaggtgggcagcttgataacacaaagaaaacagtgtcaacgagtactaccaagagaagaagacaagaagtcaacacagactcattttctactccgtgtgaatgatagctacagcaggggaaagtttcatagtctatcagtgggtcagaaaatggagttttatagcagaggcttcttagaagcttaaacccctgtcccaatgacgtcaagttcgtcccgctggcttggaaggttcagacctatcttccatcaacaccatgatgtcggcggtcatgagtgtagggaaggtcacagagaatggcgggagcccccaggggatcaagtccccctcgaagcctccaggaccaaatcggattggcagaaggaaccaggaaacgaaagaggagaagtcttcctataactgccccctgtgtgagaagatttgcactacccagcaccagctgaccatgcacattcgccagcacaacacagacactggaggagccgaccactcatgcagcatctgcggaaagtcactgagctcggccagctccctcgatcgccacatgctggtgcactctggcgagaggccttacaagtgcactgtgtgtggccagtcatttaccaccaatgggaacatgcacagacatatgaagatccatgagaaggacccaactagtgccacagccacagccccaggtagaggagactttgcatccgctaagtcctccaagaggaaactgagtcacgatgccgagtcagagagagaagacccagcaccagctaaaaagatggtagaagacgggcagtcaggtgacttggagaagaaagctgatgaagtctttcactgcccagtatgtttcaaggagtttgtttgcaagtatggactggagacccacatggagacccattcagataacccactaagatgtgacatttgttgtgtcacctttcgaacacatcgaggactgctgcgtcacaacgcgcttgtccacaaacaacttcccagggatgcaatgggcagacctttcatacagaacaacccttcaattcctgctggcttccacgacttaggattcacggacttctcctgtaggaagtttcctcgcatttctcaggcctggtgcgaaacaaacctgcggaggtgcatcagcgagcaacaccgttttgtctgcgacacctgtgacaaggcgttccccatgctctgctcagtggctctgcacaagcagacccacgtggcggcagaccagggtcaagaaaagccgcaggccacgcccctgcctggtgacgccctggaccagaagggcttcctggccttgcttggcctgcagcacaccaaagacgtcaggcctgcccccgccgaggagcccctgccggatgacaaccaggcaattcagctccagacactcaagtgtcagctacctcaggaccccggctgcaccaacctgctgagcctgtcacctttcgaagctgcttccctaggcggttctctcacagttctccccgcaaccaaggacagcataaagcacctgtccctgcagcccttccagaagggcttcatcatccagcctgacagcagcattgtggtcaagcccatctctggcgagtcggccatcgagctggcagacatccagcaaattctgaagatggcagcctcggctccccctcagatcagtcttccgcccttctccaaggcccctggccgccccactgcaggcgatcttcaagcacatgccccctctgaaggcaaagcccctggtcacaccacggacggtggtgggccacctccacgcccccgcctctcatcaacgcccagcaggcttcccgtggctgtatcagccccagcctgccgccaccgcccctgaagctcctcaaaggctcactggaggcggcctccaacgcccacctgctgcagtccaagtccgggacccagccccacgcggccacgcggctctccctgcagcgcagccgcgggcggagctgccgggccagcctgagatgaagacgcagctggagcaggacagcatcatcgaggccctgctgccgctgagcatggaggccaagatcaagcaggagatcacagagggggaactcaaggccttcatgacagcgcccggcggcaagaagacgcccgccatgcgcaaggtgctctacccttgccgcttctgcaaccaggtgtttgccttctcgggggtcttgcgtgcccacgtgcgctcccacctgggcatctcgccataccagtgcaacatctgcgactacatcgccgccgacaaggccgcgctcatccgccacctgcgcacgcacagtggggagcggccctacatttgcaagatctgccactaccccttcactgtcaaagccaactgcgagcggcacctgcgcaagaagcacctcaaggccacccgcaaggatatcgagaagaacatcgagtatgtgagtagcagcgcggccgagctggtggacgccttctgcgccccggacaccgtgtgccggctgtgcggcgaggacctcaagcactatcgtgccctgcgcatccacatgccgacgcactgcggccgcggcctgggcgggggccacaagggccgcaagcccttcgagtgcaaggagtgcagcgccgcgttcgcggccaagcgcaactgcatccaccacatcctcaagcagcacctgcacgtgcccgagcaggacatcgagagctacgtgctggccgccgacggcctgggccccgcagaggcgccggccgctgaggcgtcggggcgcggggaggacagtggctgcgctgcccttggtgactgcaagcccctcactgccttcctggaaccccagaacggctttcttcacaggggccccacccagcctccacctccccatgtctcgatcaagttggagcccgccagtagctttgcggtggacttcaatgagcccctggacttctcgcagaagggcctggccctggtccaagtgaagcaggaaaacatctcctttctgagcccttcttccctggtcccctatgactgctccatggagcccatcgacctgtccatccccaagaacttcaggaaaggggacaaggatttggccactcccagcgaagccaagaagcctgaggaggaggcggggagcagcgagcagccctctccctgcccagcacccggcccttctcttcctgtaactttggggcccagcggaatcctggaaagccccatggcccctgctccggcggccaccccggaacccccagcacagcccctgcagggccctgttcagctggcggtcccaatctactcctcagccctggtcagcagccctccactcgtgggcagctcagccctcctgagtggcacagccttgctgcgtccactgcggcccaagcccccgctgcttttgccaaagccccccgtgacagaagagctgcccccgctggcctccattgcccagatcatctcatctgtatcctcggcccccaccctgctgaaaaccaaggtggcggacccagggcccgcaagcactggcagtaacaccacggcttcagacagcttaggaggttctgtccccaaagccgccaccaccgccacccccgctgccaccaccagcccaaaagagtctagtgagcctcccgctccagccacaggcccagaggctgcctctcccaccgagcagggcccagcgggcacgtcgaagaagaggggccggaaaagggggatgaggagccgaccccgcgccaacagcggcggggtggacctgtactccagcggggagtttgccagcatcgagaagatgctggccactacagacaccaacaagttcagtccgtttctgcagacagcggaggacaacactcaggatgaggtggccggagcccctgccgaccaccatgggcccagtgatgaagagcagggcagtcccccagaagacaagctgctgagggccaagcggaactcgtacaccaactgcctgcagaagatcacctgtccccactgtccccgggttttcccttgggccagctccctacagaggcacatgctcacacacactgacagtcagtcggatgcgggagactgcagccgccgcgggcgaagtggctatgacctcacctcacgggacagagagcagccgtcggagggcgccactgagctccgccaggtcgcaggggatgcgcctgtggagcaggccacggcggaaacggcctcgcgcgtgcaccgggaagagcacgggcgtggggagagccatgagccggaggaggagcatggcactgaggagagcactggggacgccgacggcggaagaggacgcgtcgagcaaccagagcctggacctggacttcgccaccaagctcatggacttcaagctggcggagggcgacggcgaggcaggcgccgggggcgcggcctcgcaggagcagaagctctcctccgacacctgtgggaagagcttcaagttcctgggcaccctgagccgccaccggaaggcgcacggccgcccaggaggcccaaggacgagaagggagatggcgccagcactgcagaggaggggccccagcccgcccctgaacaggaggagaagccccccgagaccccggcagaggtggtggagtcggccccgggtgccggggaggccccggccggaaaagctcgcggaggagacggagggcccctccgacggggagagcgcggccgagaaaaggtcctcagagaagagcgacgatgacaagaaaccaaagacagactcccccaaaagcgtggccagcaaggcagacaagaggaagaaggtctgcagcgtgtgcaacaagcggttctggtcgctgcaggacctgagccggcacatgcgctcccacacaggggaaaggccatacaaatgtcagacctgcgagcgaaccttcaccttgaagcacagcctggttcgccaccagcggatccaccagaaagccaggcatgccaaacaccacgggaaggacagcgacaaggaagagcggggtgaggaggacagcgagaatgagtccacccacagcggcaacaacgccgtctcagagaacgaggctgagctggctcccaatgccagcaaccacatggctgtcacccggagccggaaggagggcttggccagtgccaccaaggactgcagccacagggaggagaaggtcacggcagggtggccgtctgagcctggccagggtgaccttaacccagagagcccggcggccctggggcaggacctgctggagccgcgcagcaagaggcctgcccacccaatcctggccacagctgatggcgcctcccagctcgtcgtaggggatggagtgacagcctcagtccccctcagcacagacaaaagccagcagagcaaagcgtctatacttcatggggtttcctcagtgccctttggctgttgaggagtgagagagagagagagagagagagagagagagagagagagacaagcaggagcgtggctgctcgctcagtgccatagccttaccgcagcctgcgcgggaggcccacagcccgtgccgattccagtgccttaactacttaccggatccctccatattatcatgggtgttgtatttttccaaaatgacttcttaaacaaaacaaatattataatg

SEQ ID NO: 22710 - DNA, 434 bp, Homo sapiens
cagtgaaatataatgcttgtgaagaactattgtagagtcagacacacctggattcacaatcttcactgatactagcatggggtccttacacagaatttttatgacaggaagactacacaaaaaatagataagtctaaccaagttagtaatgggacacacatgaggtagccaatacttactgactgaccctcctctactcataaaccatttaatcctcacaaattcttcaagtagacctggtccttttgcatatttctgtgcttgttatttattgatattaagttccaaggggaggggatgtattcatttagcagaaacaaggaccaaaaaagacattaacagaattggaaactcacaactagttttaaaactgaagtgttcggagctctggtctgtcccaccactgactgagaccaacaatccaccctcctgcc

SEQ ID NO: 22711 - DNA, 703 bp, Homo sapiens
  SIMILAR (80)..(136): 1001254mologous to Homo sapiens Human secreted protein, SEQ ID NO: 4798,accession number G00717,Smith-Waterman Score=96.
  misc_feature (1)...(703): n = a,t,c or g
aatgggtttagttttttttnattttttacaaatatactggagaatcatgcaatgctgccagcattggatgcaatccggggccacagtcaagaaaggcaaaccagagctcagaaaaaaggtacatccagcagtggtttgcctttttttacaaatatacgtgggagaaatcatcgccaatggctggccaaggcatttggatgcaaatcccgggggccacaaagtctgcaaaactccctttgcctaactgggtccctgtaaatggcaagaaccttatcagtctcgcctttaattgttccactatgaactcctggcattatctttcaaaaattaaagaaaccacggccatctttttctaccggtatgaactttcggttgtcggaatgacccactgctgggatggtacccttttttcttggagctctgggtttgccctttcttggactgtggggccatcacccatggtcacccacaccaggcaggcggggaaggtctggttcaagccggtccccttgattcccccttcacgggaggatggatatacagggttttttgggctcctggtgtttgtcaagcaccaattggatttacaggttcctacccggaaggacccaagggaaaatccgggaattttcggcacccagaagggacccacccacggccctcgcttcgacatcttgacctgtgccgaattcctgcagcccgg

SEQ ID NO: 22712 - DNA, 385 bp, Homo sapiens
  SIMILAR (148)..(354): 381254mologous to Homo sapiens Amino acid sequence of a human artemin polypeptide,accession number Y84582,Smith-Waterman Score= 86.
ctggaaacttaggccctgagctcagggccccaattcgttggccgtgaagtccgtaggataccccgtgatcaacgcgattcgagatcgacaaggaaacacggcacacaggttcagctgcttgagcgaaggcagtttgatgaggtgctcggcgcaggcactggttacattggtagaaggccaaactgatggttctccaggtttccgaaaggacgccggagctcagcaaacgagccaagtcagcgtccagctccttcagctcccgctgccggtcacacagctgctcgtacatgcgcttccccacgtctgtgctctccagggttgagatgatctgcagttgggtgtcgttgttgtcgatgatgttgtattccagcatcaagcacaggat

SEQ ID NO: 22713 - DNA, 520 bp, Homo sapiens
  SIMILAR (324)..(238): 401254mologous to Callinectes sapidus copper-specific metallothionein CuMT-II,accession number AF200420,Smith-Waterman Score=62.
aattgccccatgtgctggcctggccagtccccgagggtccccagtacttgaggccggagaaatccacctcctaagaggcgctcagtctcagcagagtcgtgacgtcattggcctcagtccccgtccccataggcctgggcgctcttggctgtggcaactgtcttagaagaatggtcccccatggccgctgatgtgtgcagtaatgagtgccgcccgccttaatcgtggaacagttaatgaacacacctgggtctccggagcccacatgcacccacacatgctcaggcagcagcttagcccctcttattcacaggtgtgggcacagggaactttcgggaatggggggcccagtgtgttcatgttgctctgatctgccgcctcctcacagaaggcctttgttttggagctttgagtggggacaaaatgttggcatttcactcacattcctcttcattctttgaatcagacataaagtctagacgtccccagaggttaatcttgggaacaaaaaaaaaaaaaa

SEQ ID NO: 22714 - DNA, 866 bp, Homo sapiens
  SIMILAR (767)..(264): 291254mologous to Zea mays arabinogalactan protein,accession number AF134579,Smith-Waterman Score=106.
tcaggaaggcacgcttagagcgaaccacatccatcggagagggcagtgcaggtcgcagggtgcacaggtcagtgtttcccgctccactggaaacttaggccctgagctcagggccccaattcgttggccgtgaagtccgtaggataccccgtgatcaacgcgattcgagatcgacaaggaaacacggcacacaggttcagctgcttgagcgaaggcagtttgatgaggtgctcggcgcaggcactggttacattggtagaaggccaaactgatggttctccaggtttccgaaaggacgccggagctcagcaaacgagccaagtcagcgtctgtggacttggagggcagtgttagcctggtgggcccgcctttcctttgcagctccttcagctcccgctgccggtcacacagctgctcgtacatgcgcttccccacgtctgtgctctccagggttgagatgatctgcagttgggtgtcgttgttgtcgatgatgttgtattccagcatcaagcacaggatctccaccatggtctggttccccctcagtgccaggagcatgcagggacccagcttgttttctgccagggagagcaggaattttttggtcttgtaacaggagcccatgaggatgtgcaccatgctggcgaacagctccccgtcatcgtcgcaggccacccctccggggctgtagagctggaaccagccatctttgccggcccgcacgctcagcaggcatgagtggacctcttgcctggggtcttcggcgaacctctgaatcacgtacttcagttccttggtgaacttctcatgtgcgagagcttctctggggaatggaatgggttgaagcaaactggccagagacggtc

SEQ ID NO: 22715 - DNA, 1528 bp, Homo sapiens
  SIMILAR (142)..(107): 661254mologous to Homo sapiens Human secreted protein, SEQ ID NO: 6477,accession number G02396,Smith-Waterman Score=48.
tccttcctttttgttgtcctgtttgtttccctttaaaaaaataactattaatactacccactaacccgacagctgactggtttatacagtactacacgcccaggtgggggcgggagggcggtggggtcgggcgggggggacggtcaaagacttcataaataagaggcggggtcccagacccgcaatttgtcaacatgtcttaaataggtgcattatttaaatcttatgtacaaacaagaatcactttgcatagcaatggtgaggacacaggacgggtgcagtgatgtgactgggtcttcttgtcccaagggcggggggcgagttcgcagctcagctcggagcctctaggaagaaagcatccttcgtccggcccgcaatggtggcatcggagttgacttttcccacacgacggcatcaaacacaaaggcaaagaaaatccacaaagggtcccccaccccccacccacccccaaacccctccccgacccgctgatgctcctcttgttgctacaaagtccactttagatcaggcctgggcgctcttggctgtggcaacttcttagaagaatggtcccccatggccgctgatgtgtgcagtaatgagtgcgcccgccttaatcgtggaacaattaatgaacacacctgggtctccggacccacatgcacccacacatgctcaggcagcagcttagcccctcttattccaggtgtgggcacagggaactttcgggaatggggggcccaagctctcgcacatgagaagttcaccaaggaactgaagtacgtgattcagaggttcgccgaagaccccaggcaagagcatccctgtgagtgtcttctatagtattccagtgttgcgcggctggtccacgactgaggcaagattcgagcctggtccactcatgcctgctgagcgtgcgggccggcaaagatggctgttccagctctacagccccggaggggtggcctgcgacgatgacggggagtgttcgccagcatgtccctggcagccacttttctttctgtctctgaatttccctatccaggtacctcatgtgcacatcctcatggctcctgttacaagaccaaaaaattcctgctctccctggcagaaaacaagtgggtccctgcatgctcctggcactgagggggaaccagaccatggtggaagcatctgctgggagccaggagctgctgcaggcacgggggcagtggtggtcaccgcggccggccctcagtcaaagccgtgggagctagacttcacccctcagtgggaagagcatcgaagagttggcaggcgcagcaaagccatgggagctcccgtggaaatgagagttcgggcagattgctcaggggcctgcaaacatcccccgggggcctgccccatgtccagacccgcacggacgctgacttgctcgtttgctgagctccggctccttcggaaacctggagaacctcagtttgccttcaccaatgtaaccagtgcctgcgccgagcacctcatcaaactgcttcgctcaagcagctga

SEQ ID NO: 22716 - DNA, 397 bp, Homo sapiens
  SIMILAR (34)..(2): 1001254mologous to Homo sapiens similar to rat integral membrane glycoprotein, PIR Accession Number A40670,accession number U21556,Smith-Waterman Score=52.
ccgaagcccctgttgcaagtgaggacaaagtgtggaaggccgtgagggtctgcagtccgagatggccttgtcctcagactgcagtgcactgttgatgcgctggaatgccttctctttttccaggtgcaggtcttcagccgtgacccggtaccccagctctaagcgatgtggcagcatcaaaggctcccctcgtgtctttgagtaactgagggtcagctggcagcgggatgaggctggccccctcctctgctttagcctgcgcaagcctcccgtggagctgtaggagctggagatggcatttcgtttggtgctcgagctcgtccaggatgtctgggatgtgtggttatatctgatttctgagctctgggcgtggaggtctgtctgcagaggcccgggc

SEQ ID NO: 22717 - DNA, 2358 bp, Homo sapiens
  SIMILAR (292)..(2208): 691254mologous to Homo sapiens bA110H4.2 (similar to membrane protein),accession number AL157879,Smith-Waterman Score=2089.
atggtgggcagcaggcggatctctggagttatcccgctgccctttaccaggagagcaggaatcttcagtgatccacgggcaaatatgcagccattgtgggcacctgttcctcccgcgacctttgtgcccacgtctctccctccagtacctactgcacgaccccccacgtccgcctcctgccattgccagcaggtgccttgcgcgggtttagaagtcgcgttgcccggcaacagaacaatctgctggcttagcctttggccaagttggcagctggatgaggacgctcagagcccagctcttgagagttcaagtatccgacagttccccactgctcccaggagcggttacccgggcactctgtgcccctcattcctgtttgggccaaggccgaggacctgcgagtaccacagtaagccagtgctgtgtgctccgagttccagggcatcccccagctcagccactacactgagcacaaggactctgtggggcccaggagcaggtagtcacccctttggggtccacaacacccggctgtccccagacttgtgtccagggaagatagtgttgagggccctcaaggagagcggggcagggatgcctgagcagcacaaggaccccagagtccaagaaaatcctgatgatcagagaacggtccccgaggtcaccggggatgcacggtctgcattttggcccctgcgggacaatggaggcccctctccctttgtgcccaggcccgggcctctgcagacagacctccacgcccagagctcagaaatcagatataaccacacatcccagacatcctggacgagctcgagcaccaaacgaaatgccatctccagctcctacagctccacgggaggcttgccggggctaaagcagaggagggggccagcctcatcccgctgccagctgaccctcagttactcaaagacagtgagtgaggacaggcctcaggctgtctctttgggtcacacacggtgtgaaaagggggcagatacagcaccagggcagacaatcgccccaacggcctctaggccccacatcaacacttcactgcacgttgaggacaaggccatctcggactgcagaccctcacggccttcccacactttgtcctcacttgcaacaggggcttcgggtgggcctcccgtttctaaagcacccactatggatgcacagcaggacagacccaagtcccaagactgcctgggcctagtggcccccctagcatctgctgcagaggtccccgctacagctcccgtgtctgggaagaagcacagaccaccaggacccctgttctcctcctcagatccccttcctgccaactcttcccactcccgggactcagcccaggtcacctcgatgattcctgcccccttcacagctgcaagcagggatgccggcatgagaagaacaaggtcggctcctgcagctgccgcagcagcccctcccccctccacattgaaccccacgtcggggtcactactcaatgcagtggatggaggcccctcacatttcttggcctcagccacagctgcagcacgtgcccagaggtcagaagtgagatataaccagagatcccagacctcccggaccagatcctgcctcaaacgaaatgccagctccagctcccacagctctacggaaggcctccaggaagtaaagcggaggagggggccagcctcatcccactgccagctggccctcagttcctcaaacacagtgagtgaggacggacctcaggctgtctcttcgggtcaccgctgtgaaaacaaggcaggtacagcaccagggcagacacttgcccccaggggtggctcccccagatcccaggcctctaggccccacatcaacactgcactgcacgttgaggacaaggccatctcggactgcagaccctcacggccttcccacactttgtcctcacttgcaacaggggcttcgggtgggcctcccgtttctaaagcacccactatggatgcacagcaggacagacccaagtcccaagactccctgggcctactggcccccctagcatctgctgcagaggtcccctctacagctcccgtgtctgggaagaagcacagaccaccaggacccctgttctcctcctcagatccccttcctgccacctcttaccactcccgggacacagcacaggctaggacaacatctcagagccttctgcctgctgcagactcggctcagcccaaatcactccatgaaattggggtgtggcatctgcctcaaggagcatttctacaacctctgctgcctctaccgcaaatgaaactggctctcacccactggctctcggtgacgggcacagtgcggagccccacagggagtgtgtag

SEQ ID NO: 22718 - DNA, 1203 bp, Homo sapiens
  SIMILAR (169)..(1008): 891254mologous to Homo sapiens dJ831C21.3 (A putative novel protein),accession number AL133466,Smith-Waterman Score=1262.
atgcctgagcaggacaaggaccctagagtccaagagaatcctgatgatcagagaagggtccccgaggtcaccggggatgcacggtctgcatttcggcccctgcgggacaatggaggcctctctctccctttgtgcccgggcccgggcctctgcagacagacctccatacccagagagctggggtaccgggtcactgttgaagacctggaccgggagaaggaggcagcattccagcgcatcaatagtgcactgcaggttgaggacaaggccatctcggactgcagactctcacggccttcccacactttgtcctcacttgcaacagggacttctggtctgcctgccgtttctaaagcacccagtatggatgcacagcaggagagacacaagtcccaagactgcctgggcctactggcccccctagcacctgctgcagaggtcccctctacagctcccatgtctgggaagaagcacagaccaccaggccccctgttctcctcctcagatccccttcctgccacctcttcccactcccaggactcagcccaggtcacctcgctgattcctgcccccttcccagctgcaagcatggatgcgggcatgagaagaacaagccctggcacttctgctcctgcagccgcagcagcccctcccccctccacattgaaccccacgttggggtcactactagagtggatagaggcccttcacatttctgggcctcagccacagctgcagcaggtgcccagaggtcagaaccagagatcccagacctcccggaccagctcgtgccccaaacgaaaggccatctccagctcctacagctctacgggaggcctcccggaacgaaagcggaggagggggccagcctcatcccactgccagctgaccctcagttcctcaaacacagtgagtgaggacggacctcaggctgtctcttcgggtcacacccattgtgaaaagacggcagatacagcaccagggcagacactcgcccccaggggtggcttccccagatcccaggcctctaggccctgtagacacaagtttcccctgctgccacgcaggcgaggggagcctttgatgctgcctcctcccttagagctggggtaccgggtcactgctgaagacctggaccgggagaaggaggtggcattccagcgcatcaagagtgcactgcaggttgaggacaaggccatctag

SEQ ID NO: 22719 - DNA, 1762 bp, Homo sapiens
  SIMILAR (20)..(1762): 741254mologous to Homo sapiens bA110H4.2 (similar to membrane protein),accession number AL157879,Smith-Waterman Score=2079.
gtaccacagtaagccagtgctgtgtgctccgagttccagggcatcccccagctcagccactacactgagcacaaggactctgtggggcccaggagcaggtagtcacccctttggggtccacaacacccggctgtccccagacttgtgtccagggaagatagtgttgagggccctcaaggagagcggggcagggatgcctgagcagcacaaggaccccagagtccaagaaaatcctgatgatcagagaacggtccccgaggtcaccggggatgcacggtctgcattttggcccctgcgggacaatggaggcccctctccctttgtgcccaggcccgggcctctgcagacagacctccacgcccagagctcagaaatcagatataaccacacatcccagacatcctggacgagctcgagcaccaaacgaaatgccatctccagctcctacagctccacgggaggcttgccggggctaaagcagaggagggggccagcctcatcccgctgccagctgaccctcagttactcaaagacagtgagtgaggacaggcctcaggctgtctctttgggtcacacacggtgtgaaaagggggcagatacagcaccagggcagacaatcgccccaacggcctctaggccccacatcaacacttcactgcacgttgaggacaaggccatctcggactgcagaccctcacggccttcccacactttgtcctcacttgcaacaggggcttcgggtgggcctcccgtttctaaagcacccactatggatgcacagcaggacagacccaagtcccaagactgcctgggcctagtggcccccctagcatctgctgcagaggtccccgctacagctcccgtgtctgggaagaagcacagaccaccaggacccctgttctcctcctcagatccccttcctgccaactcttcccactcccgggactcagcccaggtcacctcgatgattcctgcccccttcacagctgcaagcagggatgccggcatgagaagaacaaggtcggctcctgcagctgccgcagcagcccctcccccctccacattgaaccccacgtcggggtcactactcaatgcagtggatggaggcccctcacatttcttggcctcagccacagctgcagcacgtgcccagaggtcagaagtgagatataaccagagatcccagacctcccggaccagatcctgcctcaaacgaaatgccagctccagctcccacagctctacggaaggcctccaggaagtaaagcggaggagggggccagcctcatcccactgccagctggccctcagttcctcaaacacagtgagtgaggacggacctcaggctgtctcttcgggtcaccgctgtgaaaacaaggcaggtacagcaccagggcagacacttgcccccaggggtggctcccccagatcccaggcctctaggccccacatcaacactgcactgcacgttgaggacaaggccatctcggactgcagaccctcacggccttcccacactttgtcctcacttgcaacaggggcttcgggtgggcctcccgtttctaaagcacccactatggatgcacagcaggacagacccaagtcccaagactccctgggcctactggcccccctagcatctgctgcagaggtcccctctacagctcccgtgtctgggaagaagcacagaccaccaggacccctgttctcctcctcagatccccttcctgccacctcttaccactcccgggacacagcacag

SEQ ID NO: 22720 - DNA, 2058 bp, Homo sapiens
  SIMILAR (972)..(1937): 821254mologous to Homo sapiens bA110H4.2 (similar to membrane protein),accession number AL157879,Smith-Waterman Score=1264.
  misc_feature (1)...(2058): n = a,t,c or g
gtaccctgcaaagtcacaggggcggggctgcccaagaccctgggaacccacttcttgcatcacctagatgtgacacatggagtcaaaggaggtcattttggagctttaagatttgcctgctgggttttggacttgcatggggcctgtagctctttcgctttggccaacgctcagagcccagctctcgagagttcaagcatccgacggttccccactgctcccaggagcggttacccgggcactctgtgcccctcattcctgtttgggccaaggccgaggacctccgagtagggctcagttgcctggagccccttcagcccatccccgagttcactttgcttgtgggatctccccgttgctccgactctgtggggcccaggagcaggtagtcacccctttggggtccacaacacccggctgtccccagacttgtgtccagggaagatagtgttaagggccctcaaggagagcggggcagggatgcctgagcaggacaaggaccttagagtccaagagaatcctgatgatcagagaagagtccccgaggtcactggggatgcacggtctgcattttggcccctgcaggacaatggagtcctctttccctttgtgcccagtcccgggcatctgcagacatacctccatgcccagaggtcagaaatcagatataaccagacatcccagaccacctggacgagctcatgcaccaaccaaaatgccatctccagctcctacagctctgcgggaggcttgctggggctaaagtggaggagggggccagcggagcaaaagagcagggcagggatgcctgagcaggacaagggaccccagagtcccaanaaaatcctgatgatcagagaacggtccccgaggtcaccggggatgcacggtctacagttcggcccctgcgggacagtggaggcctctctccctttgtgcccaggcccgggcctctgcagacagacctccatgcccagagctcagaaatcagatataaccagacatcccagacctcctggacgagctcgagcaccaaacgaaatgccatctccagctcctacagctccacgggaggcttgctggggctaaagcagaggagggggccagcctcatcccgctgccagctgaccctcagttactcaaagacagtgagtgaggacaggcctcaggctgtctcttcgggtcacacacggtgtgaaaaggcggcagatacagcaccagggcagacactcgccccaaggggtggctcccccagatcccagggctctaggccccgtagacgcaagattgccctgctgccacacaggtgaggggagctgcaggttgaggacaaggccatcttggactgcagaccctcatggccttcccacactctgtcctcacttgcaacaggggcttctggtgagcctcccgtttctaaagcacccactatggatgcacagcaggacagacccaagtcccaagactgcctgggcctagtggccccccttgcatctgctgcagagatcccctctacagctcccgtgtctgggaagaagcacagaccaccaggacccctgttctcctcctcagatccccttcctgccacctcttcccactcccgggactcagcccaggtcacctcgctgattcctgcggccttcacagctgcaagcatggatgtcggcatgagaagaacaaggcctggcacgtcggctcctgcagctgccgcggcagcccctcccccctccacattgaaccccacgtcggggtcactactcaatgcagtggatggaggcccttcacatttctgggcctcagccacagctgcagcaggtgcccagaggtcagaagtgagatataaccagagatcccagacctcccggaccagatcgtgccgcaaacaaaatgccagctcgagctcccacagctctacggaaggcctcccggaacgaaaggatgccggcatgagaagaatgttttgtgttcgaaattgtttgaggggtttgggtttatttttgttggtttttttttttttgcttacatgggcatccttcagcttttaataatctgaaaaat

SEQ ID NO: 22721 - DNA, 1936 bp, Homo sapiens
  SIMILAR (619)..(1185): 991254mologous to Leishmania major probable levansucrase precursor,accession number AL160371,Smith-Waterman Score=998.
atgatgatgaggtgtgaactaatgagagagaggtccaaggtgccctacatcgtgcgccagtgcgtggaggagatcgagcgccgaggcatggaggaggtgggcatctaccgcatgtctggggtggccgcagacatccaggcactgaaggcagccttcaacgtcaggaagcagccgctcttgtccatgtgcccgacgatcatggtgggccaggacggccaggtccggatggtggtgggagctgctgggggcacgcagatcaccacagacactgcactgcccccaagccacgctgatcacactcccatgccccaggccatcatctacaacctctggttcggctatgacgtgaagagggccgtggaggagccccggctgcacaacaagcttctgcccaacgtcacgacagtggagagaaacattgaccagacagacctccatgcccagaggtcagaaatcagatataaccagacatcccagatctcctggacgagctcctgcaccaaccgaaatgccatctccagctcctacagctccacgggaggcttgccggggctaaagcggaggagggggccagcctcatcccactgccagctgaccctcagttcctcaaagacagtgaacagcgataagttcgacgccaacgatccgatcctgaaagatcagacgcaagaatggtccggttctgcaacctttacatctgacggaaaaatccgtttattctacactgactattccggtaaacattacggcaaacaaagcctgacaacagcgcaggtaaatgtgtcaaaatctgatgacacactcaaaatcaacggagtggaagatcacaaaacgatttttgacggagacggaaaaacatatcagaacgttcagcagtttatcgatgaaggcaattatacatccggcgacaaccatacgctgagagaccctcactacgttgaagacaaaggccataaataccttgtattcgaagccaacacgggaacagaaaacggataccaaggcgaagaatctttatttaacaaagcgtactacggcggcggcacgaacttcttccgtaaagaaagccagaagcttcagcagagcgctaaaaaacgcgatgctgagttagcgaacggcgccctcggtatcatagagttaaataatgattacacattgaaaaaagtaatgaagccgctgatcactaggggtagctctagaccgtcaattcgggaggatgaaaacggcagatcgcaaaaaccagtacatccagaaggagacatgaccatgaacatcaaaaaaattgtaaaccaagccacagttctgacttttacgactgcacttctggcaggaggagcgactcaagccttcgcgaaagaaaataaccaaaaagcatacaaagaaacgtacggcgtctctcatattacacgccatgatatgctgcagatccctaaacagcagcaaaacgaaaaataccaagtgcctcaattcgatcaatcaacgattaaaaatattgagtctgcaaaaggacttgatgtgtgggacagctggccgctgcaaaacgctgacggaacagtagctgaatacaacggctatcacgttgtgtttgctcttgcgggaagcccgaaagacgctgatgacacatcaatctacatgttttatcaaaaggtcggcgacaactcaatcgacagctggaaaaacgcgggccgtgtctttaaagacagcgataagttcgacgccaacgatccgatcctgaaagatcagacgcaagaatggcgaggggaggcctttgatgcttgccaccttccttagaagtgggggtaccggggtcacttgtgaaggaactggaccgggagaaggaggcggcatttccagcgcatcaacagtgcactgcaggttgaggacaaggccatctcggactgcagaccctcatggccttcccacactttgtcctcac

SEQ ID NO: 22722 - DNA, 1036 bp, Homo sapiens
  SIMILAR (713)..(1033): 831254mologous to Homo sapiens similar to rat integral membrane glycoprotein; accession number Z21513,accession number D87002,Smith-Waterman Score=442.
cactcgttgcccaggctggagtgcaatggtgcgatctcagctcactgcagtctccacctcagcaggagagcaggaatcttcagtgatccacgggcaaatatgcagccattgtgggcacctgttcctcccgcgacctttgtgcccacgtctctccctccagtacctattgcacggccccccacgtccgcctcctgccattgccagcaggtgccttgcgccggtacctggctgtgcttattcatccattatggtcgctctgtcactggtgccattatgtgctcacatgcccactccctcaggtttagaagtcgtgttgcccggcaacagaacaatctgctggcttagcctttggccaagttggcagctggacgaggacgctcagagcccagctcttgagagttcaagtatccgacagttccccactgctcccaggagcggttacccgggcactctgtgcccctcattcctgtttgggccaaggccgaggacctgcgagtagggctcagttgcctggagccccttcagcccatcccccagttcactttgcttgtgggatctccccgttgctcctgcccctggactgagtggcaggccatcctacaaacacccgcacactcgacatcagtggtgtcaagacaactctaagaaggttttccgtgatcctgcaagacctgtgttccatcctggtgattctgtcttcaacttcactgcacagatagtgttgagggccctcaaggagagcggggcagggatgcctgagcagcacaaggaccccagagtccaagaaaatcctgatgatcagagaacggtccccgaggtcaccggggatgcacggtctgcattttggcccctgcgggacaatggaggcccctctccctttgtgcccaggcccgggcctctgcagacagacctccacgcccagagctcagaaatcagatataaccacacatcccagacatcctggacgagctcgagcaccaaacgaaatgccatctccagctcctatgcgatagctggaccgcctacactgaaataa

SEQ ID NO: 22723 - DNA, 2415 bp, Homo sapiens
  SIMILAR (667)..(2094): 881254mologous to Homo sapiens bA110H4.2 (similar to membrane protein),accession number AL157879,Smith-Waterman Score=2142.
atggacaagtacctactgcacggccccccacgtccgcctcctgccattgccagcaggtgccttgcgcgggtacctggctgcgcttattcatccattatggtcgctctgtcactggtgccattatgtgctcacatgcccactccctcaggtttagaagtcgcgttgcccggcaacagaacaatctgctggcttagcctttggccaagttggcagctggacgaggacgctcagagcccagctcttgagagttcaagtatccgacagttccccactgctcccaggagcggtatatctccgctctgtgcccctcattcctgtttgggccaaggccgaggacctgcgagccatcctacaagcacccagacactcgacatcagtggtgtcaagacaactccaagaaggttttccgtgatcctgcaagacctgtgttccatcctgggtgattcttgccttcaatttcacttgcacagggtaccacagcaagtcagtgctgtgttgctccgagtttcaggggcatcccccagcccagccactacactgagcacaaggactctgtggggcccaggagcaggtagtcacccctttggggtccacaacacccggctgtccccagacttgtgtccagggaagatagtgttgagggccctcaaggagagcagggcagggatgcctgagcaggacaaggaccccagagtccaagaaaatcctgatgatcagagaacggtccccgaggtcaccggggatgcacggtctgcattttggcccctgcgggacaatggaggcccctctccctttgtgcccaggcccgggcctctgcagacagacctccacgcccagagctcagaaatcagatataaccacacatcccagacatcctggacgagctcgaacaccaaacgaaatgccatctccagctcctacagctccacgggaggcttgccggggctaaagcagaggagggggccagcctcatcccgctgccagctgaccctcagttactcaaagacagtgagtgaggacaggcctcaggctgtctcttcgggtcacacacggtgtgaaaagggggcagatacatcaccagggcagacaatcgccccaacgggtggctcccccagatcccaggattctaggccccgtagacgcaagattcccctgctgccacgcaggcgaggggagcctttgatgctgccacctcccttagagctggggtaccgggtcacggctgaagacctgcacctggaaaaagagacggcattccagcgcatcaacagtgcactgcacgttgaggacaaggccatcccggactgcagaccctcacagccttcccacactttgtcctcacttgcaacaggggcttcgggtgggcctcccgtttctaaagcacacactatggatgcacagcagcacagacccaagtcccaagactgcctgggcctactggcccccctagcatctgctgcagaggtcccctctacagctcccgtgtctgggaagaagcacagaccaccaggacccctgttctcctcctcagatccccttcctgccacctcttaccactcacgggactcagcccaggtcacctcgctgattcccgcgcccttcacagctgcaagcagcgatgccggcatgagaagaacaaggcctggcacctcggctcctgcagctgcagcagcagcccctcccccctccacattgaaccccacgtcggggtcactactcaatgcagtggatggaagcccctcacatttcttggcctcagccacagctgcagcacgtgtccagaggtcagaagtgagatataaccagagatcccagacctcccggaccagatcctgcctccaaggaaatgccagctccagctcccacagctctacggaaggcctcccgcaactaaagcggaggagggggccagcctcatcccactgccagctggcccacagttcctcaaacacagtgagtgaggacggacctcaggctgtctcttcgggtcacacccgctgtgagaagaaggcaggggcttcgggtgggcctcccgtttctaaagcacccactatggatgcacagcaggacagacccaagtcccaagactgcctgggcctactggcccccctagcatctgctgcagaggtctcctctacagctcccgtgtctgggaagaagcacagaccaccaggacccctgttctcctcctcagatccccttcctgccacctcttcccactccggggactcagcccaggacacctcgctgattcctgcccccttcacacctgcaagcagggatgccggcatcagaagaatgtttcgtgttcgaaattgtttgagggaaaagtgttgtatattcaaagttccaaagaaacagaatatccaagacatcaccaatcatccaaaacatagtgtaggaggccacagttaa

SEQ ID NO: 22724 - DNA, 4850 bp, Homo sapiens
  SIMILAR (538)..(3948): 921254mologous to Homo sapiens bA110H4.2 (similar to membrane protein),accession number AL157879,Smith-Waterman Score=5301.
  misc_feature (1)...(4850): n = a,t,c or g
atggacaagtacctactgcacgaccccccacgtccgcctcctgccattgccagcaggtgccttgcgcgggtacctggctgcgcttattcatccattatggtcgctctgtcactggtgccattatgtgctcacatgcccactccctcaggtttagaagtcgcgttgcccggcaacagaacaatctgctggcttagcctttggccaagttggcagctggacgaggacgctcagagcccagctcttgagagttcaagtatccgacagttccccactgctcccaggagcggttacccgggcactctgtgcccctcattcctgtttgggccaaggccgaggacctgcgagtaccacagtaagccagtgctgtgtgctccgagttccagggcatcccccagctcagccactacactgagcacaaggactctgtggggcccaggagcaggtagtcacccctttggggtccacaacacccggctgtccccagacttgtgtccagggaagatagtgttgagggccctcaaggagagcggggcagggatgcctgagcaggacaaggaccccagagtccaagaaaatcctgatgatcagagaacggtccccgaggtcaccggggatgcacggtctgcattttggcccctgcgggacaatggaggcccctctccctttgtgcccaggcccgggcctctgcagacagacctccacgcccagagctcagaaatcagatataaccacacatcccagacatcctggacgagctcgagcaccaaacgaaatgccatctccagctcctacagctccacgggaggcttgccggggctaaagcagaggagggggccagcctcatcccgctgccagctgaccctcagttactcaaagacagtgagtgaggacaggcctcaggctgtctctttgggtcacacacggtgtgaaaagggggcagatacagcaccagggcagacaatcgccccaacgggtggctcccccagatcccaggactctaggccccgtagacgcaagattcccctgctgccacgcaggcgaggggagcctttgatgctgccacctcccttagagctggggtaccgggtcacggctgaagacctgcacctggaaaaagagacggcattccagcgcatcaacagtgcactgcacgttgaggacaaggccatcccggactgcagaccctcacggccttcccacactttgtcctcacttgcaacaggggcttcgggtgggcctcccgtttctaaagcacccactatggatgcacagccggacaaactcaagtcccaagactgcctgggcctagtggccgccctagcatctgctacagaggtctcctctacagctcccatgtctgggaagaagcacagaccaccaggacccctgttctcctcctcagatccccttcctgccacctcttcccactcccaggactcagcccaggtcacctcgatgattcctgcccccttcacagctgcaagcagggatgccagcatgagaagaacaaggcctggcacctcggctcctgcagctgccgcagcagcccctcccccctccacattgaaccccacgtcggggtcactactcaatgcagtggatgaaggcccctcacatttcttggcctcagccacagctgcagcacgtgcccagaggtcagaagtgagatataaccagagatcccagacctcccggaccagatcctgcctcaaacgaaatgccagctccagctcccacagctctacggaaggcctccaggaactaaagcggaggagggggccagcctcatcccactgccagctggccctcagttcctcaaacacagtgagtgaggacggacctcaggctgtctcttcgggtcaccgctgtgaaaacaaggcaggtacagcaccagggcagacacttgcccccaggggtggctcccccagatcccaggcctctaggccccacatcaacacttcactgcacgttgaggacaaggccatctcggactgcagaccctcacggccttcccacactttgtcctcacttgcaacaggggcttcgggtgggcctcccgtttctaaagcacccactatggatgcacagcaggacagacccaagtcccaagactccctgggcctactggcccccctagcatctgctgcagaggtcccctctacagctcccgtgtctgggaagaagcacagaccaccaggacccctgttctcctcctcagatccccttcctgccacctcttaccactcccgggacacagcacaggtcacctcgctgattcctgccaccttcacagctgcaagcagggatgccggcatgagaagaacaaggtcggctcctgcagctgccacagcagcccctcccccctccacattgaacaacacgtcggggtcactactcaatgcagtggatggaggcccctcacatttcttggcctcagccacagctgcagcacgtgcccagaggtcagaagtgagatataaccagagatcccagacctcccggaccagatcctgcctcaaacgaaatgccagctccagctccagctcccacagctctacggaaggcctccaggaactaaagcggaggagggggccagcctcatcccactgccagctggcccacagttcctcaaacacagtgagtgaggacggacctcaggctgtctcttcgggtcaccgctgtgaaaacaaggcaggtacagcaccagggcagacactcgcccccaggggaggctcccccagatcccaggcctctaggccccacatcaacagtgcactgtacgttgaggacaaggccatctcggactgcagaccctcacggccttcccacactttgtcctcacttgcaacaggggcttcgggtgggcctcccgtttctaaagcacccactatggacgcacagcaggacagacccaagtcccaagactgcctgggcctagtggcccccctagcatctgctgcagaggtcccctctacagctcccgtgtctgggaagaagcacagaccaccaggacccctgttctcctcctcagatccccttcctgccaactcttcccactcccgggactcagcccaggtcacctcgctgattcctgccaccttcacagctgcaagcagggatgccggcatgagaagaacaaggcctggcacctcggctcctgcagctgccgcagcagcccttcccccctccacattgaaccccacgtcggggtcgctactcaatgcagtggatggaggcccctcacatttcttggcctcagccacagctgcagcacgtgcccagaggtcagaagtgagatataaccagagatcccagacctcccggaccagatcctgcctcaaacgaaatgccagctccagctcccacagctctacggaaggcctccaggaantaaagcggaggagggggccagcctcatcccactgccagctggcccacagttcctcaaacacagtgagtgaggacggacctcaggctgtctcttcgggtcaccgctgtgaaaacaaggcaggtacagcaccagggcagacactcgcccccaggggtggctcccccagatcccaggcctctaggccccgcatcaacagtgcactgcacgttgaggacaaggccatctcggactgcagaccctcacggccttcccacactttgtcctcacttgcaacaggggcttcgggtgggcctcccgtttctaaagcacccactatggatgcacagcaggacagacccaagtcccaagactgcctgggcctactggcccccctagcatctgctgcagaggtctcctctacagctcccgtgtctgggaagaagcacagaccaccaggacccctgttctcctcctcagatccccttcctgccacctcttcccactccggggactcagcccaggacacctcgctgattcctgcccccttcacacctgcaagcagggatgccggcatcagaagaatgtttcgtgttcgaaattgtttgagggaattggaaataactactttaaagttcgtatggaaccaaaaaagagcccgcattgccaagtcaatcctaagccaaaagaacaaagctggaggcatcacgctacctgacttcaaactatactacaaggctacagtaaccaaaacagcacggtactggtaccaaaacagagatatagatcaatggaacagaacagagccctcagaaataacgccgcatatctacaactatctcatctttgacaaacctgagaaaaataagcaatggggaaaggattccctatttaataaatggtgctgggaaaactggctagccatatggagaaagctgaaactggatcccttccttacaccttatacaaaaattaattcaagatggattaaagacttaaacgttagacctaaaaccataaaaaccctagaagaaaacctacgcattaccattcaggacacaggcgtgggcaaggacttcatgtctaaaacaccaaaagcaatggcaacaaaagccaaaattgacaaatgggatctaattaaactaaagagcttctgcacagcaaaagaaactaccatcacagtgaacaggcaacctacagaatgggagaaaattttcgcaacctactcatctgacaaagggctaatatccagaatctacaatgaactcaaacaaatttacaagaaaaaaacaaacaaccccatcaaaaagtgggcgaaggacatgaacagacacttcgcaaaagaagacatttatgcagccaaaaaacacatgaaaaaatgctcaccatcactggccatcagagaaatgcaaatcaaaaccacgatgagataccatctcacaccagttagaatggcaatcattaaaaagccaggaaacaacag

SEQ ID NO: 22725 - DNA, 429 bp, Homo sapiens
  SIMILAR (354)..(277): 651254mologous to Homo sapiens alternative HHLA3 protein,accession number AF126164,Smith-Waterman Score=82.
ttaacgaccatccagctctggtttttcattggtgcctaatggaaaatgagacatgaaaccagatacaatgtcctggtttccaggggtgtggggtgtcatcgacttttcttccttaatggtgtattcgagcacctcggccgagctttcgttcagagaaggaaagtggacacagagcaccagctgcttcgagctgctgtcccggcgaaccaggaacatcgaggtctcacccagagccagcatgttgacggacactcgcttctccttctcacgctcccaaattctttcttgtgtcagatccaagaaccttctcttggggtctggatcgggagccctttctggtaacgtgaggatacggccccaagcacaggaggctcctgaggagccctctgtcctgaccttgctctggtgatatcccaattctgctgccat

SEQ ID NO: 22726 - DNA, 263 bp, Homo sapiens
  SIMILAR (10)..(240): 321254mologous to Mus musculus oracle 2 protein,accession number AF228058,Smith-Waterman Score=81.
cttccctcctcgtcccgggcctcacctgcacccagcgccagagacgctgcaggggacagcgctggaccgtacagacctgcctaacatgccagcgcagccaacgcttcctcaatgatcccgggcatttactctggggagacgagcctgaggcccagctcgggagccaagcagaccgccttcctgaggagaaaatgcagacgaagggttccagtaaccagtgatggattcaccccatctcccgaataaagtttacttgttttaca

SEQ ID NO: 22727 - DNA, 637 bp, Homo sapiens
  SIMILAR (73)..(477): 391254mologous to Homo sapiens unnamed protein product,accession number AK026291,Smith-Waterman Score=121.
atggcggggccggtgaaggaccgcgaggccttccagaggctcaacttcgtgtaccaggtgagtctgcgacaagggccccacggggacggtgctcggcgtcccagagtgactgctcccctcccgcaggccgcccattgtgtccttgcccaggaccccgagaaccaggcgctggcgaggttttacttgctacactgagaggaccattgcgaagcggctcgtcttgcggcgggatccctcggtgaaagaggaacttctctgtcgaggctgctcttccctcctcgtcccgggcctcacctgcaccccagcgcccagagaccgttgcaggggacagcgctggaccggtacagacctgccctaacatgcccagcgcagccaagcgcttcctcaatgatcccgggcatttactctggggagacaggcctgaggcccagctcgggagccaagcaggtgagagattccaaaccactacaaccccttgccaaacacagcccactccatttcagaccgccttcctgaggagaaaatgcagactcagggttccagtaaccagtgatggattcaccccatctcccaaataatggtttacttgttttacattccatgattctgttctgtgggtatttcaactcttaattcc

SEQ ID NO: 22728 - DNA, 446 bp, Homo sapiens
  SIMILAR (50)..(202): 921254mologous to Homo sapiens Human secreted protein, SEQ ID NO: 5491,accession number G01410,Smith-Waterman Score=232.
gcgtcgacccacgcgtccgcaggaggaaggtgggtctgaatctagcaccatgacggaactagagacagccatgggtttgatcatagacgtcttttcccgatattcgggcagcgagggcagcacgcagaccctgaccaagggggagctcaaggtgctgatggagaaggagctaccaggcttcctgcagctctctggcccagggctgggtcatcagcacaccctgctgctgctgttcagatctgcatcctggtcccgcttggtcccacagtgagaacgctttgctatcacatgggcaggctctgagagccctgccggcctggccttctcaaagaagacctgagagcttgggacccaagcagagaggaagaacagggctcagggtgcttgctccatgctcgctccacacctggggctcaaccctggctttccccggctccctgtgtgac

SEQ ID NO: 22729 - DNA, 526 bp, Homo sapiens
  SIMILAR (102)..(236): 571254mologous to Homo sapiens S100P calcium-binding protein,accession number X65614,Smith-Waterman Score=107.
gattttctcggccctgccagcccccaggaggaaggtgggtctgaatctagcaccagtgacggaacctagagaccagccatgggccatgatcatagacgtctttttcccgatattcgggcagccgagggcagccacgccagacccctgacccaagggggagctcaaggtgctgatggagaaggagctaccagggcttcctgcagagtggaaaagacaaggatgccgtggataaattgcctcaaggaccctggacgcccaatgggagatgcccagggtgggactttcagtgaagttcatccgtgttccgtggctgcaatcaccgtctgcctgtcacaaagtactttgaagaaggcaggactcaaatgaatgccctgggagatgttcacagatttcctggcaagagccattgggtccccaaggctttcccaaaatgttttgtttgggcatttatttccccttagggttgagcctgcttcatgttacctctggattaataaatgctttatgaaatgaaaaaaaaaaaaaa

SEQ ID NO: 22730 - DNA, 1128 bp, Homo sapiens
  SIMILAR (305)..(436): 541254mologous to Xenopus laevis snRNP C,accession number X63892,Smith-Waterman Score=120.
ttatgaaggtgttttttctgtatagatagttattaacttggtgtccttggatgggtgatgataggtggagccttctagtccgacatcttgctgctcatcttccttctcctgctcctcctcctttatcttcttcttattgttattattattatttccccatgtagatgcatctatacgtgatcgtctacccgtgtgtgccagaagggctgctgaggaggtggcaggcacactcctgtcctctggtttattttcatgtgttttaacttggagcacaaagataggattgtggttcagaactccaagccccccctccccccagccttccaggtcctctttgcccaagtataatgccagcaccccatatgcgagccctcccatgatgccaatgatgggccctcctttccgtgggatgatgccagtgggacttgctcctggtcccatgctcttgcagtacaacacgtgctcctgaaaggcagggaggtgtcgggactctggagtgcctggcccaatgccggatgcacagtagtgcccaatgcctgcagcctcatacttctgcaccctttctggttgagaatctcttgcccaggacacttttgtgttcagagtgaatttcctgacaagtagcaaatttaagtgtcccctgccagaagcgcactgagcatgcagagccccatcccttttatttttaatgtgcatcagtatgaggcagtcccaaagagggtgctctgggcagagctcagcaaacatctggcctgtggaagaggcctcagcaacacagctctggaaggaggtgggaacaggcaagagctttgaaaggctgcagatggtgagggtgccagggtgacagactgtgggtggcagttttctttgtattccaaataggctgaggattttctctcctttcactgtaatcccttcatgccattgggtccttagctgtggaccatacgtgtcacactgagctttccatctgctggtcctggcctcagcacacttcccacaaacatcaggcctgtcggaagacatccttagccatggaccacacatgtcacccctgagctgtccatctgctggtcctgagctcagcagatctcccactatctttacgatgagtctctggagctgcat

SEQ ID NO: 22731 - DNA, 752 bp, Homo sapiens
  SIMILAR (43)..(78): 1001254mologous to Homo sapiens C protein (AA 1- 159),accession number X12517,Smith-Waterman Score=79.
cattagtcagtctggtggaattccaacggcctgcagagcaacatgcccaagttttattgtgactactgcgatacatactctcacccatgactctccatctgtgagaaagacacactgcagtggaaggaaacacaaagagaatgtgaaagactattatcagaaatggatggaagagcaggctcagagcctgattgacaaaacaacggctgcatttcaacaaggaaagatacctcctactccattctctgctcctcctcctgcaggggcgatgataccacctccccccagccttccgggtcctcctcgccctggtatgatgccagcaccccatatggggggccctcccatgatgccaatgatgggccctcctcctcctgggatgatgccagtgggacctgctcctggaatgaggccgcccatgggaggccatatgccaatgatgcctgggcccccaatgatgagacctcctgcccgtcccatgatggtgcccactcggcccggaatgactcgaccagacagataaggatagaggggaggccttattgtatcggttttatattacctgttctgcttcaccaggagatcatgctgctgtgatactgagttttctaaacagcataaggaagacttgctcccctgtcctatgaaagagaatagttttggaggggagaagtgggacaaaaaagatgcagttttcctttgtattgggaaatgtgaaaataaaattgtcaactctttcagttaaaaaaaaa

SEQ ID NO: 22732 - DNA, 455 bp, Homo sapiens
  SIMILAR (400)..(453): 661254mologous to Homo sapiens Kruppel-type zinc finger protein,accession number AB011414,Smith-Waterman Score=57.
ggtggtttttaatacatgacagaactcacactggggagaagccttataaatgtaatgaatgtgttaaagcattccatagatccacatgccttcatgctcataaaagaactcacactggggagaagccatatgaatgtaatcagtgagggaaagccttcaactcttcccattcctttcaaatacatgaaagaactcacacgggggagaagccatatgaatgtaaggaatgtggaaaagcattcaagggtcccagttctgttcgcagacatgaaagaacccactctacgaaaaaaccctatgaatgtaaacattgcgggaaagcattatcttatcttaccagctttcacaaccacttgggaatgcacactggagagatatctcatacatgtaagatatgtgggaaagccttttattctcccagtgtcacttcaaacacatgaataaactcacactgg

SEQ ID NO: 22733 - DNA, 1668 bp, Homo sapiens
  SIMILAR (495)..(584): 231254mologous to Homo sapiens zinc finger protein ZNF136,accession number U09367,Smith-Waterman Score=43.
ccagatgacaggctgaacttccaggagaagaaagcttctcctgaaataaaatcatgtgacagctttgtgtgtggagaagttggcctaggtaactcatcttttaatatgaacatcagaggtgacattggacacaaggcctatgagtatcaggaatatggaccgaagccatgtaagtgtcaacaacctaaaaaagccttcagatatcacccctcctttagaacaccacaaagggatcacactggagagaaaccctatgcttgtaaagaatgtggaaaaacttttatttcccattcaagcattcaaagacacgtggtaatgcacagtggggatggaccttataaatgtaaattttgtgggaaagcattccattgtctcagtttatatcttatccatgaaagaactcacactggagagaaaccgtatgaatgtaaacaatgtggtaaatcttttagttattctgctacccatcgaatacatgaaagaactcacattggagaaaagccttatgaatgtcagcaatgtggaaaagccttcagatctgcctcacagcttcaaattcatggaaggactcacactggagagaaaccttatgaatgtaagcagtgtgggaaagcctttggatctgcctcacaccttcaaatgcatggaaggactcacactggagagaaaccctatgaatgtaagcagtgtgggaagtcttttggatgtgcctcgcgacttcaaatgcatggaaggactcacactggagagaaaccgtataaatgtaagcaatgtgggaaagcttttggatgtccctcaaaccttcgaaggcatggaaggactcacactggagagaaaccctataaatgtaaccaatgtgggaaaaagtggaaagaccagaacattgaatatgagtaccaaaaccccaggagaaacttcaggagtctcatagaagggaatgtcaatgaaattaaagaagacagtcattgtggagaaacttttacccaggttccagatgacaggctgaacttccaggagaagaaagcttctcctgaagcaaaatcatgtgataactttgtatgtggagaagttggcataggtaactcatcttttaatatgaacatcagaggtgacattgggcacaaggcatacgagtatcaggactatgcaccaaagccatataagtgtcaacaacctaagaaagccttcagatatcacccctcctttagaacacaagaaaggaatcacaccggagagaaaccctatgcttgtaaagaatgtggaaaaacctttatttcccattcaggcattcgaagacgcatggtaatgcacagtggggatggaccttataaatcaagctttcttcgttcacatcctaaagtccctggtcacggccggcgctttgccatgaaccctactttactgaacaaggaggacgaacgcggtaacaagaatgtggtaaccagagagcacttggaccgtatgaagaatagctgcatcgtttgtaacatgggacattccaacacagagattgacgtgaatgtcgttatggggaactacgagagactggagcgggatgcccggatgacaattcgcaaaaaacggaagcgatattccgatatccgattccgaatcatggggcggtatacggttcgagtcgaggttctgacggcggtcaattccgagtag

SEQ ID NO: 22734 - DNA, 2779 bp, Homo sapiens
  SIMILAR (2265)..(2660): 561254mologous to Homo sapiens zinc finger protein,accession number L11672,Smith-Waterman Score=405.
atgggagagaagccttatcaatgcaaagaatgtggaaaagcatttgcatataccagttctcttcgtagacatgaaaggacccactctgggaaaaaaccgtatgaatgtaagcaatatggggaaggcttatcctatcttataagttttcaaacacacataagaatgaactctggagaaagaccttataaatgtaagatatgtgggaaaggcttttattctgccaagtcatttcaaacacatgaaaaaactcacactggagagaaacgctataaatgcaagcaatgtggtaaagccttcaatctttccagttcctttggatatcatgaaaggattcacagtggagccaaaccctatgagtgtaagcagtgtgggaaagccttcagatctgcctcacagcttcgagtgcacggtgggactcacactggagagaaaccctatgaatgtaaggaatgtgggaaagccttcagatctacctcacaccttcgagtgcatggtaggactcatactggagagaaaccctatgaatgtaaggaatgtgggaaagccttcagatatgtgaagcaccttcaaattcatgaaaggacagaaaaacacataagaatgccctctggagaaagaccttataaatgtagtatatgtgagaaaggcttttattctgccaagtcatttcaaacacatgaaaaaactcacactggagagaaaccctatgaatgcaaccaatgtggtaaagccttcagatgttgcaattcccttcgatatcatgaaaggactcacactggagagaaaccctatgagtgtaagcaatgtgggaaagccttcagatctgcctcacaccttcgaatgcatgaaaggactcacactggagagaaaccctatgagtgtaagcaatgtgggaaagccttcagttgtgcctcaaaccttcgaaagcatggtaggactcacactggagagaaaccctatgagtgtaagcaatgtgggaaagccttcagatctgcctcaaaccttcagatgcatgaaaggactcacactggagagaaaccctatgaatgtaaggaatgcgaaaaagcattctgtaaattctcttcttttcaaatacatgaaaggaagcacagaggagagaagccctatgaatgtaagcattgtgggaatggattcacatctgccaagattcttcaaatacatgcaagaacacacattggagagaaacactatgaatttcttttcgatatcatgaaaggactcacactggggagaaaccctatcaatatacatgaaagagctcacacgggggagaagccatatgaatgtagggagtgtggaaaagcattcaagtgtcccatttctgttcgcagacatgaaagaacccactctaggaaaaaaccctatgaatgtaaacatcgtgggaaagtattatcttatcttaccagctttcaaaaccacttgggaatgcacactggagagatatctcataaatgtaagatatgtgggaaaggcttttattctcccaggtcacttcaaagacatgaaaaaactcacactgcagagaaaccctatgaatgcaagcaatgtggtaaagccttcagtagttccagttccttttggtaccatgaaaggactcacactggagagaaaccctatgagtgtaagcaatgtgggaaagccttcagatctgcctcaatccttcaaatgcatgctgggactcaccctgaagagaagccctacgagtgtaagcaatgtgggaaagccttcagatctgccccacaccttcgaatccatggtagaactcacactggagagaaaccctatgagtgtaaggaatgtgggaaagccttcagatctgccaagaaccttcgaattcatgaaaggacacaaacacacgtaagaatgcactctgtagaaagaccttataaatgtaagatatgtgggaaaggcttttattctgccaagactcacactggagagaaaccctatgagtgtaagcaatgtggaaaaaccttcagatctacctcacaccttcgaaaacatggtaggactcacactggagagaagccctatgaatgtcaggaatgtgggaaagctttcagatctatgaagaaccttcaaagtcatgaaaggacacaaacacacgtaagaatacactctggagaaagaccttataaatgtaagctatgtgggaaaggcttttattgtcccaaatcattgcaaagacatgaaaaaactcacactggagagaaactctatgaatgcaagcaacgttcagtagttccttcagtagttccagttccttttgatatcatgaaaggactcacactggagagaagccctataaatgcgagcaatgtgggaaagccttcagagctgtgtcaatcctttgaatgcatggtaggactcaccctgaagagaaaccctatgaatgtaagcagtgtgggaagtcttttggatgtgcctcgcgacttcaaatgcatggaaggactcacactggagagaaaccgtataaatgtaagcaatgtgggaaagcttttggatgtccctcaaaccttcgaaggcatggaaggactcacactggagagaaaccctataaatgtaaccaatgtggtaaagtctttagatgttcttcacaacttcaagtgcatggaagggctcactgcatagacaccccataaccccaggctttaggaggctgaggtggggggactgcttaagcccaggagttcaagaccagcctgggcaacatagtgagactctgttataaaaattaaataaataaataaaaagacaa

SEQ ID NO: 22735 - DNA, 2386 bp, Homo sapiens
  SIMILAR (203)..(2071): 511254mologous to Homo sapiens gonadotropin inducible transcription repressor-4,accession number AB021644,Smith-Waterman Score=1674.
aagttgttgttttgaaaatccatctcaaaacaacaacaacaaaaatgctttatggaagaaagtacagaaagcgagaaagggatgtgatgaccaaagcagggaataaatgtttggagtccacggcactttcttgggaatagagtctaggcccccactgctgtcactgtcacccagcctcctctacacatgtgagatgtttcaggaccctgtggcctgtgaggatgttgctgtaaacttcacccaggaggagtgggctttgctggatatttcgcagaggaaactctacagggaagtgatgctggaaactttcaggaacctgacctctataggaaaaaaatggagtgaccagaacattgaatatgagtaccaaaaccccagaagaagcttcaggagtctcatagaaaagaaagtcaatgaaattaaagatgacagtcattgtggagaaacttttacccaggttccagatgacaggctgaacttccaggagaagaaagcttctcctgaagtaaaatcatgtgacagctttgtgtgtgcagaagttggcataggtaactcatcttttaatatgagcatcagaggtgacactggacacaaggcatatgagtatcaggaatatggaccaaagccatataagtgtcaacaacctaaaaataagaaagccttcaggtatcgcccctccattagaacacaagaaagggatcacaccggagagaaaccctatgcttgtaaagaatgtggaaaaacctttatttcccattcaggcattcgaagacacatggtaatgcacagtggggatggaccttataaatgtaagttttgtgggaaagctgtccattgtctcagattatatcttatccatgaaagaactcacactggagagaaaccatatgaatgtaaacaatgtggtaaatcctttacttattctgctacccatcgaatacatgaaagaactcacactggagaaaagccttatgaatgtcagcaatgtgggaaagcattccatagttccagttcttttcaagcacataaaagaacccacactgggggaaagccatatgaatgtaaacaatgtggcaaatccttcagttggtgtcattcctttcaaatacatgaaagaactcacactggggagaagccctgtgaatgtagcaaatgtaataaagcattccgtagttacagatcctatcttagacataaaaggagtcacacgggagagaagccttatcaatgtaaggaatgtagaaaagcattcacgtatcccagttcccttcgtagacatgaaaggacccactctgcgaaaaaaccttatgaatttcctttcaatatcatgaaaggactcacactggagagaaaccctatgagtgtaagcaatgtgggaaagccttcagatgtgccccacaccttcgaaggcatggtaggactcactggagagaaaccctatgagtgtaaggaatgtgggaaagccttcagatctgcctcacaccttcaaattcatgaaaggacacaaacacacataagaatacactctggagaaagaccttataaatgtaagacatgtgggaaaggcttttattctcccaagtcatttcaaagacatgaaaaaactcacactgcagagaaaccctatgaatgcaagcaatgtggtaaagccttcagtagttccagttcctttccgtaccatgaaaggactcacactggagagaaaccctatgagtgtaagcaatgtgggaaagccttcagatctgcctcaatccttcaaatgcatgctgggactcaccctgaagagaagccctacgagtgtaagcaatgtgggaaagccttcagatctgccccacaccttcgaatccatggtagaactcacactggagagaaaccctatgagtgtaaggaatgtgggaaagccttcagatctgccaagaaccttcgaattcatgaaaggacacaaacacacgtaagaatgcactctgtagaaagaccttataaatgtaagatatgtgggaaaggcttttattctgccaagtcatttcaaatacatgaaaaatcttacactggagggaaaccctatgagtgtggcctccagctgcccagaacagctgcagagagtgtggattctgagaagctgcagggccctggaaagcaggagacccacgtgcagcttttgtctctctattgcctgcgccgtgtcctggactgctcacgggagttctgcaggagacgccggaatatctggaagctgaaaaatggatcgtcatcgccatcattgcttgtcgctgacttcggacttgtcctcggactccttggagacatctgcagactagaagtagacaacataaacataccaatattaataatgccagtgacaacaatgatcctccgaggggtttga

SEQ ID NO: 22736 - DNA, 709 bp, Homo sapiens
  SIMILAR (18)..(104): 371254mologous to Mus musculus Kruppel-related protein,accession number M20758,Smith-Waterman Score=56.
atgaaagaacacatagagagaaatcctgtgactataaaaaatgtggtaaagccttcaatcaatacagttcccttagaagacatgaaagctcatactggagagaaaccctacgaacgtcaaaaatgtgaactcaaccagaggcttcgggactatgcctttcagtaccatgagagtaactctggggtggtatctgctgacagcgaaaccaaatcagggcactctggatgtctaatcaaagagatgaaaaatgcaactaaaactcacaatggtatcactggtggtattattttcaatgctaatcactggagagagacaaacacaatatatacacgtatacatataaacaaacaagaaaagtatcaggcaactcacgtgtcctatgcagcgaactaaaataacaagggcattggcctctccgaggatatgatatttatttaagctgaggtctgaatgaccaggagccttcagagcaaagatcttgaaaaccagatacctcaggcaaaagggaagaattgctttaatcttggactgtttaaataaaaagaaaacagaggcatagtagagtaggcagaaacatatgcgatgagctcagagaggtttataaaaccctacatgatctgttctatccacctctctgagctcatgtagggttttataaacaaggctaaacctctgagtctttttctaagttgatatgaaagcttcagta

SEQ ID NO: 22737 - DNA, 303 bp, Homo sapiens
  SIMILAR (149)..(280): 341254mologous to Homo sapiens AFG3-like protein,accession number AJ001495,Smith-Waterman Score=62.
  misc_feature (1)...(303): n = a,t,c or g
cctagcctaaaatgaaatgtagtttgcctntcttgtgatttgaagagaagcagcagtctttacttttccagccaaatccagtagcagaatcatcttccacaacaaggaattaaaggcggagggatttctctttcctgagctcaccaaacttattccagtgttgnatcgcaagctgttgatgcacaggcgtcttgtggcaagcccagcntcagtttatgttagacaatcagtacacatgctggtgtgttttccaatggccagtgataagnaattaaataagtatttgtgagatttgctattttt

SEQ ID NO: 22738 - DNA, 438 bp, Homo sapiens; identical to SEQ ID NO: 9990
  SIMILAR (32)..(109): 461254mologous to Lycopersicon esculentum Metallothionein- like protein,accession number Z68310,Smith-Waterman Score=66.

SEQ ID NO: 22739 - DNA, 1439 bp, Homo sapiens
  SIMILAR (273)..(560): 321254mologous to Homo sapiens dJ622L5.3 (novel protein),accession number AL049795,Smith-Waterman Score=105.
atgccgagggcggagccaagagcgacactgggggagcaggaaaaggcggggcttccgcttggggcatggaggctgtacctcttacgtcacttccgtaaacaaacggagctgcggaggagcgggtcccgggatgtgaccggggctctgcttgtggctgcggcggtggcttctgaggctgtcgggtctttgcgggttgcggaagggggccccaatacccttcttcttcaggtcttaagaaggctggaccgtggtgcaataaggaacttaaaacaatggaagagcggaaagtgaagaggaggagtcctaagtcttttagtgcccactgtactcaggttgtcaatgtccaaaaaaaaatgtccattccagtgagtaaaaagcacaagggttttcaaatcctgcatcacaagtcaacttcacaagccgaccaaaagttaaaaaagaagtgatgaaaagaaaagaccaaacctcaagggttggaagaagggcaaaggcactccagtcaactcccgatccaacactccttcctcacttgatgtctccagatgttccaggaagatggagagagggctgctcagtctttttgaatgatttccactcctggaaaactttcaaacattttggaaattgaatgttccattagaacagatggaacatgtttccggggaattgcaggagaaattagctcgcttgaatttggagctctatggggagttagaggaacttcctgaggataagagaaaaacagccagtgactccaatctggataggcttctgtcagatttagaagaattgaattcttccatacaaaaactccatttggccagatgcacaagatgttccaaataccttccgctagctaaaatgaaatgtacgtttgctttccttgtgatttgaagagaagccagcagtcctttactttttccagccaaattcccagtagcagaatccatcttcccacaaccagggaatttaaagtaattaaaagtgccaagttccaatgatccgttttcacttactgctttttagtaaatggtgactccgctgtaaattccgccattaactgggaggccctaggcccttggttgaaggcttcaatcaggaaatgtgacgcagagaattgtgcctgctgtgcttcatattgttgccttatggggattatactttgaaatgccattggtgctgatgttccttgacagggcggagggatttctctttcctgagctcaccaaacttattccagtgttgagtcgcaagctgttgatgcacaggcgtccttgtggcaagcccagctttcaagtttatgttagacaatcagtacacatgctggtgtgttttccaatggccagtgataagaaattaaataaagtatttgtgagatttgctattttttaataaaggtaattgttttaaattaaaaaaaaaaaaaaagggcggccgct

SEQ ID NO: 22740 - DNA, 1299 bp, Homo sapiens
  SIMILAR (221)..(382): 351254mologous to Canis familiaris D4 dopamine receptor,accession number AB030234,Smith-Waterman Score=58.
ctagggagtgtcagatggtgtgatctgccctgatggctcgtcttgaattattgttccatctggtgaagcatccggcgccactgtggccagaggtgtctggtccgtatcaggatctggcccttgaagcttccgccccgcctcgccgtccgcgagggactgcggtgtggtacgctccgtgacgtcatgccgccgagcatgtcgggagttgtagttggtccgcccgggccccgcccctgggccgtgcggtgacaccacttcagggccggcccccggaacttttgggcaggcgtcagcgcccgtgtcaccgccacgtcgcggacatggtgagtatctctgctcgtcaccgacccctgtgtttttccccggactttggcagccgccacgagcgggcttcacagcgcctgaaaggagctggtcctgccggggtccaagatggcagctgcgagctgcgtgggcagggcggctctccagttcgcctgtctccgcgcttctgacattcaaagtcattatactttcaactggtctgctttttggtccacttggtgggtggaaaatcttatcatctttgccagaaatatttgccaatttagccacataagggtcagcagaatgtgatgggtaaggatcaaatgttcctgccttcattccaccaggctttttaccaggagaagacggtttaaaagtatttgaaattgttttcttcttctcttcttttttaattggtggtaaagattcctcagaaaaataaggattaccgtcaaaatagtcccttgggtgaagatttaacttaaatggtgctcctttaagtaaacaatggtgctcttcattcgctttccatatccagttcctttctttcccgggtttgtgtataaattctttccaggtgccttgtatttttctcgaggttttgactgcgcgctgaaaaatgggactggaccacctattgttccatagtagcttcctaagccacatgattaaattgtgacacatatttatcacccacagtaatatattccatctcactaaagaggccaatcctttccatgtccgtttttcctccttccgcaggcatggtggcgtctggtgggtggtacctctctatacccgctaacttcaaaagtttccctagggtcacgtgttttatagcaaagtcctttcttgaggacacccactccgacagccgagatcaggttgccccagctcgtccaggttgccccagcttgtccacgttaactgcgctgcgggagcggcgagggttcccaagcgcaagacaagcttgggctgcgcagcgcctctgca

SEQ ID NO: 22741 - DNA, 375 bp, Homo sapiens
  SIMILAR (333)..(247): 411254mologous to Homo sapiens branched-chain alpha-keto acid dehydrogenase complex E1 alpha subunit,accession number S38309,Smith-Waterman Score=63.
cctattaaactggaaattgatgaagaaaaaaacctgctgatcaagtttgacccttcctacagaaacgatctgaacaactgggtggcagaagaaattctagcaattaagtatgtggaacaccctcagatagacagcctggacctgcgcggagaagtgcattaccccaacctcagctttgagacaaaggagctggattttggctgcatcctgaacgatactgagctcattcgctacgttaccatcaccaactgcagtccgttggttgtgaagtttcgctggttcttcttggtgaatgatgaggaaaatcagataaggcttttcatggggttttctgtattccatgtactggccattcatgaatattttccattttga

SEQ ID NO: 22742 - DNA, 4282 bp, Homo sapiens
  SIMILAR (1102)..(1293): 371254mologous to Homo sapiens alias DLC1; candidate tumor suppressor gene,accession number AB020522,Smith-Waterman Score=112.
tttgctctagccccggaggctggcttctacagcctgggtcaacagccctcgactcgcatttctggctctggttgtgttcacccagtgagggtctggcctttctctatagaaccagctattggaactcttaatgtgggagagtccatgcaactggaagtggagtttgagccacagagtgtgggcgatcacagtggaagacttatcgtgtgttatgacacaggtgaaaaggtgtttgtatctctctatggagctgccatagacatgaatataaggctggataagaattccttgaccatcgagaaaacctacatatctctggccaatcagcgaactataaccattcacaatcgcagtaatatcattgcccatttcctgtggaaggtatttgctacccagcaagaagaggacagagaaaaatatagcaaggtcacagccgttttctcaatagcagccagctctaattctagatttgctctgtacgagagctcctacaattctcaaaggagcccctcagagtgggcctgtgatgatctgatcaaagaggagaaggatgagactgatgagttttttgaagagtgcattactgatcctttactccgagaacatctttctgttctgtcccgaacctttgcgaatcaaaggaggctggtgcagggagacagcaaactgttcttcaataacgttttcactgtggagcccctggggtggtcagaaaggaaggaaatggcagaaatccgagatgttcaaaagaaagacactaaagtgctttttgatcaactggctgttgatggtgaggaaggtgatgtctggcccaactcatcagctgaaatcaccgtgtactttaacccactagaagccaagctctatcaacagaccatttactgcgacattttaggccgagaaatccgtctgcccctccgaatcaaaggggaaggcatgggacctaagattcacttcaactttgaattgctggatattgggaaagttttcactggatctgcacattgttatgaggcgatactgtacaacaaagacagcatcgatgctctcttcaacatgacccctccaacttcagctttgggggcctgctttgttttcagtcccaaggaaggcatcattgaaccaagtggagtccaagctatccagatctccttcagctctaccatcctgggaaactttgaagaagagttcctggtcaatgtcaatgggtcacctgagcctgtgaaactgaccattagaggctgtgtcattggacctaccttccattttaatgttccagctctgcactttggtgatgtttcctttgaaaaaaatctcagatctattaaacagctaacaatgaaaaacaaactttttaaaatatcaggagaaaatataggtggttatgtttatatgctagcaagtgtgaaggtcttaaacaagatgcccaatgcaaaggccataaagaaaaaggttgagctagacctgtgcttcccccatgaagctactgagcacactgagatgtgctggtttcctcataccttgatatgttccctcaataatacctctttgatccccatgacttacaaactgcgtatccctggggatggccttggccataaaagcatttcatattgtgagcagcatgtggactacaaaagaccgtcttggaccaaggaagaaatatcctcaatgaaaccaaaagaattcaccatctctcctgactgtggcaccattcgcccccagggatttgctgctatcagggtgacattatgctccaacactgtacagaaatacgagctggcactcgtggtggacgtggagggcatcggagaagaggtgctggcgctcttaattgcagcaaggtgtgttgtacctgccctccacctggtcaatacagaggtggactttgggcactgcttcctgaagtacccgtatgagaaaacactccagcttgccgatcaagatgacctcccaggattctatgaggtccagcctcaggtgtgtgaggaggtgcctactgtgctgttttccagccccacccccagcggggtcatctccccaagcagcaccatccacataccactggtcctggagacccaggtcactggaggaacacagatccacgggtttacatctcaatctttgggagccaggacccccctttggtatgtcacttaaagagggcttggagaaggcccagttatctacgtccatcccaatcaagtggacttcgggaatatctacgtcctaaaagactcttccaggattctcaacctatgcaaccagtccttcattcccgcatttttccaggcacacatgggtgaatgtcagcccttcccagatgtggcactcactgtcagccatctgtcacactcagcctcatgtgcggccacacagcacagcaccactgtgattagatttacccttcgcaagaaacagctgtttgttatcagccagagggctgctgctctcaacaccttgctggagggagcacgcaagcgaatgaggtgggaactggaatgcatgagtgctgaaaccagccaaccgcataggcaccagcaagatcaaactccacttactgggacctgctgcactccacccctcacaggtgggagtgcacagtcaattttccgtttaataacaggaaatatcacaatgaccaagccctccctaaaagcaaaggatagccctaaaagtcaaccaccaaagagacacaaggatgatagagtagtttcgagcctgactcgtgcacacaaaaaatccctttggacgattgaacccaatgaaggcatggttcctccagaaactgatgttcaactggcactgaccgccaacctgaatgacacactgacattcaaggactgtgttattttggacattgaaaatagcagtacctatcggattcctgttcaggcttccggaactggttccactattgtttcagataagccctttgctccagaactcaatttgggggcacattttagcctggatacccactattaccactttaagttgatcaacaagggacgtcggatccaacagttgttctggatgaatgatagcttccgaccccaggccaagctgagtaagaagggccgggttaagaagggacatgctcatgtccaaccccagcccagtggctctcaggagcccagggatccacagagccccgtgtttcatctccaccccgccagcatggagctgtacccaggccaggcaattgatgtgatactcgaaggctattctgctactcccaggatagtgaaagagaagctggtgtgccacgccatcatcggggcacagaaggggaagagcttggtgatggctgtgaacatcacctgtgagttcgtcgcacctctcatccagctctccaccaagcagctcatctaccgactggagaagaaacctaacagtatcctgaaacctgattaccagcccttggccgtaaagaacatttccaccctgcccgtgaacttgttgctgtcaacatctggacccttctttatatgtgagactgataaatccctgctgccggcaactcctgagcctattaaactggaaattgatgaagaaaaaaacctgctgatcaagtttgacccttcctacagaaacgatctgaacaactgggtggcagaagaaattctagcaattaagtatgtggaacaccctcagatagacagcctggacctgcgcggagaagtgcattaccccaacctcagctttgagacaaaggagctggattttggctgcatcctgaacgatactgagctcattcgctacgttaccatcaccaactgcagtccgttggttgtgaagtttcgctggttcttcttggtgaatgatgaggaaaatcagataaggtacccccagcacagaactctcacagaactctgcttttcatttgttttctctttcaggcttttcatggggttttctgtattccatgtactggccattcatgaatattttccattttgaccactaattattgacagcaattaacaaggagcttaaaatcacgatccatcctcgatttcctaacaggaaacatagataaaacatctttgaaagttcccatatcaccaccgaattaacaaagcaatatccataagcccactttaattttgagtctagtgataagaccattagaaattcatcactaaaaaataaagtctttgtagaattgtttaaattattattttattgtggtaatatatatacaacttaacaaatttttaagtgtacaatacagtattattgactataagtaaaccagatttctagaacttaaaaaaaa

SEQ ID NO: 22743 - DNA, 1755 bp, Homo sapiens
  SIMILAR (582)..(67): 1001254mologous to Escherichia coli Acriflavin resistance protein F (EnvD protein),accession number D90845,Smith-Waterman Score=867.
tcatatatctataattattgtcatcttcataaattgtaaatattgatgtctgggtatagcgcggatcacttccatcaccactttatactggttcatcggctggtaaatggtcgagatttgccgctgaccgaaggcgttatttaacagactgttggcggcttgtacgtcgattcccagccgtgccatggtgtcgcggtcgtaaaccagattcatctccgcgccgttatcctgctgatcggagttcacgtccgccagttccggcaacgtcgccagttttttgcggattttcggctcccattctcgcagtgccgccaggtcgtcggataacaacgtgtactggtagctggcgttcgactgacgcccaccaacgcgaatatcctgtaccgccatcaggaacagattcgcccccggttctttcgccagttttacgcgcagacggtcgataatttgctgcgccgtttcgctgcgttcgtcgcgtggcttgagggtgataaacatcatcccgctgttcactcgcgaaccgcctgtaaagccggtgacattatccactgccggatcgtcacggataattttcatgaaatccagacgggtatgattgagcacccattttagtgacttgccgtagccttgttgcagggctaccaacatgcgaccaaaaccacgcagtcgcttttgctcgcgcggcttgctggctttcagcatccagccacacatcattggcgttaatgtcagagaaaccagcaacgatataccaatggcgacagaaagcgtcacggcaaattcgcgtaacagtcggcccggcaatccgcccatcaacagcagcggcaggaacaccgccaccagtgacagactcatcgacagcaccgtaaaaccgacttcgcgagtaccttgcagtgcggcttgcaacggtttcattcccgcttccagatgacgtgcaatgttttccagcaccacgatggcgtcatccaccacgaaaccagtagcgatggtgagcgccattaacgaaagggttattgagactgaatcccttccccaacccagtggtacgcccaagaaatgctcgttgtcgatgttttcgtccatgcccaaatgaccgcgtagccagcgcaccagcggcttgtcgccaatgcctgattcatcttcatggtcgagcgccatcttcacgccggtaaacagcaggaaggcaccgaagatatacaggatccagtcgaactgcgaaattagccagctgccagtgaagatcatgatggtacgcagaacaatcagcccacgaagcaacggcccagttatcaacccccatggccatacggcgggcagttgtaatgccgccggaacagagaaatagaacaaaaaaggaatacgtctgcgtattcctttcgggttgcccggtgaccggatgtgttttttcacacatcgtaatgacgatcgaccggcaatgaagttactccccccagtctggcggcggatctcggtcagcagtttggcggtgatgcgactgaccgccagccctggatgatccaccagatgctcatccaccagggtagcgaacagctctgcttcgtagagcatggtattaatatgctgcggctgggtgagatcctgcatttggctgccacgcggcacgaagcacactttctggcattcagacagtttttcaatcaccagcgatcctgcttcgccctgaatctcgctcgccaggacagaatcactgacttttgagtgctgcaaggtgacgctgaaatcaccgtaatccat

SEQ ID NO: 22744 - DNA, 2067 bp, Homo sapiens
  SIMILAR (881)..(1624): 261254mologous to Streptococcus parasanguinis fimbriae- associated protein Fap1,accession number AF100426,Smith-Waterman Score=110.
ttagatccagctttcttttgattcacatttgaatggtgtatcttttttactttcaactgctttttcattcttcacgtttacacatgggaatgtgcttctctcacctgtcagcatctctgggtaagcattcagtgttctacaaatactgacgtccagaggatgtgagagagctgttgtgggtgggcgccgtgggacatgaactcggagacctgtggatgtgagagagccgtcgtggggtgggcgccgtgggacgtgaactcggagacctgtggatgtgagagagccgtcgtggggtgggcgccgtgagacatgaactcggagacctgtggatgtgacagtgccattgtggggtgggcgccgtgagacatgaactcggagacctgtggatgtgagagagccgtcgtggggtgggcgccgtgagacgtgaactcggagacctgtggatgtgagagagccgtcgtggggtgggcgccgtgagacgtgaactcggagacctgtggtctggacttgctggctcttctcggactgggcatctcgtctttcgtactgatcacgggctgcgccaacatgcttctcatggctgccctgtggggcctctacatgtccctggttaatgtgggccatgtctcccccgcacatcacgttcacatgagctgtctctgctgacggtggcctggtgggggctgtgcttgttgagtgtctggacggtgaagtggctttttctcccttcaccacatgctcttggtgaggacgtcgctctgcagtcttcactggaggtgtgaggttccgccgcctctgggggtctgagcgtggtttgtcgcagcgtggacttgcacgtttttgttttggtactttgggggtctgtcttcttggtgttggctctgaatctgtcgttggctgactctgtcgttgactgactctgtcgttggctctgactctgtccttggctctgactctgtcgttggctgactctgtcgttggctgactctgtcgttggctgactctgtcattggctctgactctgtcgttggctgactctgtcgttggctctgactctgtcgttggctgactctgtcgttggctgactctgtcgttggctctgactctgtcgttggctgactctgtcgttggctctgactctgtcgtctctgactctgtcattggctgactctgtcgttgtctctgattctgtcgttggctgactctgtcattgtctctgattctgtcgttggctgactctgtcgttgtctctgattctgtcgttggctgacttctgtcgttggctctgactctgtcgttggctgactctgtcattggctctgactctgtcattgtctctgactctgtcgttgtctctgactctgtcgttggctgactctgtcgttggctttgactctgtcgttggctgactctgacgttggctctgactctgtcgttggctctgactctgtcattggctctgactctgtcgttgtctctgactctgtcgttggctgactctgtcgttggctctgactctgtcgttggctgactctgtcgttggctgactctgtcattttctgtaactctgtcattgtctctgactctgtcattggctgactctgtcgttgtctctgactctgtcgttggctgactctgtcgttggctctgactctgtcgttggctgactttgtcgttggctgactgtcgttggctgactctgtcgttggctgactctctcgttgtctctaagtctgtcgttggctgactcctgcagtacttccgggtgtttttcctaagaagagtgttcttttcattcctgcagggatcagctgcagtaggtttaacacggttgcggttctgagactgcgtctcccactcattttccagtttgtcatctgacctggtccttatgacaatattggaaataaccaaagtttttttacttcccgtcaaatcacaagtatcttcccatctcgccgacgttgtcttacagcagctttggtcagcatgtactgctcctgtagtgaatggactatgtactctgaggtcggttttcacacagtaatgggagcactgtccatccat

SEQ ID NO: 22745 - DNA, 992 bp, Homo sapiens
  SIMILAR (663)..(1): 971254mologous to Escherichia coli O157:H7 putative transport protein,accession number AE005538,Smith-Waterman Score=1103.
cacggcgaaaatcacgtcgctcaattccaccagaatcagtaccagcatcagcggtgtggcgtacagcaatccattcttacgcacaaagaaatgctcgttgtcgatggtgtcggtcatgcgcaaatgaccgcgtagccagcgcaccagcggcttgtcgccaatgcctgattcatcttcatgggcgagcgccatcttcacgccggtaaacagcaggaaggcaccgaagatatacaggatccagtcgaactgcgaaattagccagctgccagtgaagatcatgatggtacgcagaacaatcgcccggagcacgccatacaccagcacggggggttgtaatgccgccggaacagagaaatagctgaacaccgtcagccagacaaagacgttatcgaccgccagcgatttctcaatcagataacctgtgagaaaggccagtgcctgtggatcggcaacggcgcgaccttcggtttgcaccagataccaccagaaagcggcgttaaacagtaacgacagcgtcacccagaccagcgaccaggccgcagcctgtttcatggtcatggcatgtgccccacgacgcccctgcaacaacaggtcgatagccagcataatggcgacaacaacagcgaatccgccccatagcaacggcgtgccgacagtattcatagaagttccttacacataaaaaaacggccaccgtcggaagacgtcagccggtgctttttatgcatagacctcgccttccggcaaggtttcactttcaacaaaaaaggaatacgtgtgcgtattcctttcgggttgcccggtgaccggatgtgttttttcacacatcgtaatgacgatcgaccggcaatgaagttactcccctttgcaggtaacaaagtatgacagaccattcagccagtcaatggtctgttacataccttttacactgttttactttggcaattatagttttacgctatctgacggaaaaatcaccccagtctggcggc

SEQ ID NO: 22746 - DNA, 596 bp, Homo sapiens
  SIMILAR (388)..(465): 421254mologous to Homo sapiens Sequence of human microtubule- associated protein tau,accession number R59837,Smith-Waterman Score =53.
gcattctgcaggttttccattttagtgggttctgcttttatttcagagacagacatgtgtcttctctgtccgtttccaataggtaaagccatatcagttagactgcaatactttaaacacgagacaaaacaatccatatgtttagggaaccagaaaagtcccctggtctgtcccttctttggggagcagggcctcgacagctccagctcccttgacctaccttcctccccgaaccccgcccccaccttgtgcccctgtgtccagccccccagggggcctgtgtctgtgtctgtgcctgtgtctgtgatggggagccgcctcgcacccctgttgtctgcttgactctttgtgtctgttatcctgggcaggatggtcattctcaaaaaccctggggtcctgggccaaagacaggcagggcccagtccaggggccccaggcctccccagtcccagtgtgcgagccccacttggacacaagtgttcagagaggtccccctctgccacttgacagggaccttcaaacctcgacagtgatgcaaggacacagagagtaccagataggtagcagagaccaaggcgcagggtgcttcagatgag

SEQ ID NO: 22747 - DNA, 998 bp, Homo sapiens
  SIMILAR (404)..(805): 1001254mologous to Mus musculus presynaptic protein,accession number D38613,Smith-Waterman Score=687.
ggaattcccgggtcgacgatttcgtgtcggccgcggaggagctgcagcctccaacagaagggaaaacggacacctgtggaggggaagaaacgtgtccaagatcattcacacagagcgtcagctctggggtcagaacccagctcccaaggctttccgtgtccagaccacctccctcacctggttggccagcctccacctgatgagccgggcaggctgcaagtggcaagttccctgggaaggtgtggtccctgccatgctatctgctctgctcagcgactgaaggtgcccgcatcccagctctgccaggaagcaaaggttgtcacatcttcccaagccaggccagccaggagcgctgcatgcaaattctgccgtgggctaaggcacgctaaccagagccggcggcatggacttcgtcatgaagcaggcccttggaggggccacaaaggacatggggaagatgctggggggagaggaggagaaggaccccgacgcgcagaaaaaggaggaggagcggcaggaggcgctgcggcagcaggaggaggagcgtaaggccaagcacgcgcgcatggaggcggagcgggagaaggtccggcagcagatccgagataagtatgggctgaagaagaaggaggagaaggaagcagaggagaaagcagccctggagcagccctgcgaggggagcctgacccggcccaagaaggccatccctgcgggctgcggggacgaggaggaggaggaagaggagagcatcctggacacggtgctcaaatacctgcccgggccgctgcaggacatgttcaagaagtaaccaggcctcctgccccagcctactccacctgttactacttctttttggttctttcttttctttttattaggttaagtctcaattctgaaggggaaaacctcagttggcctctgcccctcttccctggccaggggcttctccccctcagctctccctcacacctcccttcatcccagggtatccggaattc

SEQ ID NO: 22748 - DNA, 3539 bp, Homo sapiens
  SIMILAR (604)..(1017): 481254mologous to Mus musculus putative secreted protein ZSIG37,accession number AF192499,Smith-Waterman Score=340.
atgccaagctacaagggctgcggtgagactcagagacacgctaccaatggcaccgcggccccacctcgccgaagcagctgccggggagacgcgataaaactgccccacgcggaaaagaaggaagggcggcccccagcctcaacttcatatcctttgagactgggcactcgctctgcccggagctcctcccactgctggtgcaccagctgggaggatcctccagaggccactgctggagaggaaaaacgccaccccaagtctcctgctgtttgctgtggggaggggacggtgctgactgccagcacggtcacctggcgggcggagcctgcacggggagaaatctgggcgaggctgtgtccccgggaccgcccagggagcagggcagctgctgtgatttgggagaggccgtgctgcgataggctcattgctgaccggaccgggccccccaacagctcggagccccactgccgggcagcaacgattcctctgcccacctggcccctcccagaggggcagaccctgaccctgaaagccctggccaagatggcagcccccgccctgctgctcctagcactgctgctgcccgtgggggcctggcccgggctgcccaggaggccctgtgtgcactgctgccgcccggcctggccccctggaccctatgcccgggtgagaagggtgaggccggcgtccgaggtcgggccggcaggagcgggaaagagggtgccgccaggctgcccggggcctgcagggccgcagagtgccagaaggggcagtgtggggccgccgggcgccgcgtgccgacgtgcctacgccgccttctccgtgggccggcgcgagggcctgcacagctccgaccacttccaggcggtgcccttcgacacggagctggtgaacctggacggcgccttcgacctggccgcgggccgcttcctctgcacggtgcccggcgtctacttcctcagcctcaacgtgcacacctggaactacaaggagacctacctgcacatcatgctgaaccggcggccgcggcgtgctctacgcgcagcccagcgagcgcagcgtcatgcaggcccagagcctgatgctgctgctggcggcgggcgacgcctgtctggagtgttcctgaagaacttccagcagtacttccaggacaggacgagctgggaagtcttcagctacatgcccaccatcctctggctgatggactggtcagacatgaactccaacctggacttgctggctcttctcggactgggcatctcgtctttcgtactgatcacgggctgcgccaacatgcttctcatggctgccctgtggggcctctacatgtccctggttaatgtgggccatgtctggacggatggtggctccacttcaaagagtactgagagcagcgccagggctggaggggacgctgggaggccgccagcacccagggacaccgccctcggtgcttcatttctcactgacgatgaacagcatgtttgggctccaggacttcaatgtaactcccctggcagctcaagcaacgcttcctccgggaagcccgggccgccccacacttgttccgtcgaccgctgcccccaacagcctgcagatgttcacaggaggccacggggcctgtgggtctcgacgtcgcccccgggtctgatcacagcaggattccaataaaacgggtccacgtgcacctcccggccctggctggtgcagcacagcccgccgacaggagctatttctctgttcggcggcattacaacgccgcgtgctggtgtatggcgtgctcggggcgattttctgcgtaccatcatgatcttcactggcagctggctaatttcgcagttgactggatcctgtatatcttcggtgccttcctgctgtttaccggcgtgagatggcgctcgcccatgaagatgaatcaggcattggcgacaagccgctgtgcgctggctacgcggtcatttgcgcatgaccgacaccatcgacaacgacatttctttgtgcgtaagaatggattgctgtacgccacaccggtgatgcggaggatttttagtttccagccttcctgttccttttggaatggaaagctttttccttgtcccttgaacgactgcctctatggtgtcgcctacatttgtgaagaagatgttctttccatcttggtgcagaggcagtcggcagaacccctgcattatggagtaagttgtcacatcttcccaagccaggccagccaggacgctgcatgcaattctgacgtggtaagggtccagaccattcatctcaggcaccggggacagaatatgcaaacaccaagaagatgtatagatggggactggggcacttggagcacagaggaccccagggttttgagaatgaccatcctgcccaggataacagacacaaagagacaagcagaaacaggggtgcgaggcggctccccatcacagacacaggcacagacacagcacaggccccctggggggctggacacaggggcacaagagctattcattgctggtgtggggcccaacctttctgccagtgttgctgagctggcaggctgtggcctggagctgttgggggcaatctttaacttcagtagggagattgcctggagtgaggccaatgccgaggaattagagatggagagacaggtgttgatcccaaaattaactctcataaatatcctgcatgctgaacttcatcacagtcttttttccaggaaccaacctgttacagttggtgctgaacatgagtcaggaaagcagacactgggtggagaggttggagctgaaccacctgctgctcagctggcaatgagacgctggcaccgatcgcccctggcccaggccacgtccctgctgccatctctagagcaggtcagccaaggggcaggccaagtgtgcatctgcaggactcacctgctgggaaataaatccattggcgctggcaccgtgtgggcgctgcagtgccttgcgggcagcatcctaatgccgggaggtgcagggggagggagacgacataaggccaccaggactgggaaatcacatttaagtaagaaaagtatggtcattgtactaccaccaaagtacggtcaatggtacagtgctacccgcaccatgaacaagatgagtaactactatcagattgggaaggtgtggtccctgcatgctatctgctctgctcagcgactgaaggtgcccgcatcccagctctccaggaagcaaaggggcgggaaagaattcactgagttcacgttcttgcagcacaagcctgacctgccgctggcagtgctggggagccaggggtccaaaaggaggattgggctatgcgtggggcagaggcagccaggaaccagaggtgctcgagaacagaaacttgccagcatcactgagaaccagaggtgcctcatggctggcacgttgtgggctgagacagtgtatgcacaggccctggcgctgctgggaggcacacgctaccagcagctggaatcaaccatcatgcccatgtctggcagagaccacaccttcgtgctcacttaa

SEQ ID NO: 22749 - DNA, 1106 bp, Homo sapiens
  SIMILAR (662)..(775): 601254mologous to Homo sapiens Human secreted protein, SEQ ID NO: 7344,accession number G03263,Smith-Waterman Score=120.
caaataactccaggtaaccggcagcagctggtccacatcatagtctgtgagagattgctcatgtcttgcctgttttcctacctcttcattctaaggaaaaggacccacaatctgagtgccctgctctgggacatagggccccacaaagacagtgtcggggaccaaggagctcaggccgcctgccccacctttgccacctgcaagactgtatactccagccaacagaacactgaagattctgctctcagggtgttgattgacgtctggaaggcagagactcgtggattagcaagcatgtgtaagaaagtgctctggatgccacagggtggtaatttgtgcatggaaaatggctggggtgaagaggagactaggcacatagtcacagttggcagcaacgtctccttttgggtgtggatttatttgttccccaatgcaactgtgagcaccatgagtgcaggaaagtgcctgtttctgatcatgggtatttcctggggtgtgacttcatgtacagtcaagagggagaaactctgagtggggagcactaggggaatagttgaaggcttaatcttcattttgggagaaggaggggagtgttattatccacgttcattattcacagtagcaaatttcacagtaggcaaaagggtgacagacactcaattgtccatcgacagataaatggataaacaaaatgtgccatatccatacagtagaatattactcagacataaaaaggaatgaaattccgatgcgtgctacatgtagacaaaccctgaaggcatgatgctatgtgaaattaaccagttacaaaaggacaaacactggatgattccattcataggatgtgcctagagcagtcaaggtcatagaggtggacagtagaatagtggttgcctggggctgtgaggaggaggaaatggggggttcatgtttactgtgtacagaagttctgtttggcaagatgaaaaaattctggagctggatggtggtgacagttgacaataatgaacttaatgctactgatctgtgtacttaaacatggttaaaacaatacattttatgtttgttatattttaccacaataaacagctacttaaaagtcaaaa

SEQ ID NO: 22750 - DNA, 761 bp, Homo sapiens
  SIMILAR (697)..(756): 851254mologous to Homo sapiens putative p150,accession number U93569,Smith-Waterman Score=87.
aaatacgaactaccatcagagaatactacaagcacctctatgcaaataaactggaaaatctagaagaaatggataaattccttgacacatacaccctcccaagactaaaccaggaagaagttgaatctctgcatagaccaataacaggctctgaaattgaggcaataattaatagcttaccaaccaaaaaaagtccaggaccagatggattcacagccgaattctaccagaggtacaaggaggagctgacaaacagagagccaaacatgagtgaactcccattcacaattgcttcaaagagaataaaatacctaggaatccaacttacaaggaacatgaaggacctcttcaaggagaactacaaaccacttctcaaggaaataaaagaggatacaaacaaatggaagaacattccatgctcatgggtaggaagaatcaatatcatgaaaatggccatactgcccaaggtaatttatagattcaccatccccatcaagttaccaatgactttcttcacagaattggaaaaaactacttcaaagttcatatggaaccaaaaaagagcccgtattgccaagtcaatcctaagccgaaagaacaaagctggaggcatcacgctacctgacttcaaactatactacaaggctacagtaaccaaaacagcatggtactggtaccaaaacagagatatagaccaatggaacagagccctcagaaataatgccacatatctacaactatccgatctttgtcaaatgtga

SEQ ID NO: 22751 - DNA, 609 bp, Homo sapiens
  SIMILAR (142)..(609): 611254mologous to Homo sapiens putative p150,accession number U93572,Smith-Waterman Score=423.
atggggagaaaccagagcagaaaagctgaaaattctaaaaatcagagtgcctcatctacaccaaaggatcacagcgcctcgccagcaacggaacaaagctggatggggaatgactttgatgagttgacagaattaggcttcagaaaatcggtaatgacaaacttctcccagctaaaggaggatgttcgaacccatcacaaagaagctaaaaacctagaaaaaagattagacaaatggctaactagaataaacagcatagaggagaccttaaatgacctgatggagctgaaaaccatggcacgagaactacgtgacacatgcacaagcttcagtagccgattcgatcaagtggaagaaggggaaatacaaactaccatcagagaatattatgaacacctctacgcaaataaactagaaaatctagaagaaatggataaattcctggacacatacactctcccaagactaaaccaggaagaagttgaatccctgaatagaccaataacaggttctgaaattgaggcaataattaatagcctaccaaccaaaaaaattccagggccagacagattcacagccaaattctaccagaggtacaaagaggagctg

SEQ ID NO: 22752 - DNA, 564 bp, Homo sapiens
  SIMILAR (202)..(564): 801254mologous to Homo sapiens NAG13,accession number AF194537,Smith-Waterman Score=490.
atggggagaaaccagcacaaaaaggctgaaaattccaaaaggcagaatgcctcttcttttccaaaggattacaactcctcaccagcaagggaacaaaactggatggagaatgagtttgatgaattgacagaaataggcttcagaaggtgggtaacaatgaactcctctgagctaaaggagcctgttctaacccaatgcaaggaagctaagaaccttgaaaaaagaccactcgccagactagtaaagaagaaaactgagaaaaatcaaatagatgcaataaaaaatgataaaggggatatcacaactgatctcacagaaacacaaactaccatcagagaacactataaacacctctacacaaataaactggaaaatctagaagaaatggataaattcctggacacatacaccctcccaagtctaaaccaggaagaagtcaaatccctgaatataccaataacaagatctgaaattgaggcagtaattaatagcctatcaaccaaaaaaagtccaggactggacggattcacagccaaattctaccagaggtacaaagaggagctg

SEQ ID NO: 22753 - DNA, 889 bp, Homo sapiens
  SIMILAR (855)..(887): 901254mologous to Homo sapiens putative p150,accession number U93572,Smith-Waterman Score=48.
gcagataaagaagttcttcgaaaccaatgagaacaaaaagacaatgtaccagaatctctgggacacagctaaagcagtgttaagatggaaatttatagcactgaatgcccatatcagaaagctggaaagatctgaaatcgtcaccctaacatcacaattaaaagaactagagaagcaagagcaaacaaattcaaaagctagcagaagacaagaaataactaagatcaaagcagaactgaaggagatagagacacaaaaaacccttcaaaaaatcaatgaatccagagaaatacaaactaccatcagagaatactataaacacctctatgcaaataaactagaagatctagaagaaatggataaattcctggacacatacaccctcccaagactaaaccaggaagaagtcgaatccctgaatagaccaataacaggctctgaaattgaggcagtagttaatagcctaccaaccaaaaaaagcccaggaccagagagactgacagccgaattctaccagaggtacaaagaggagctggtaccattccttctgaaactattccaaacaacagaaaaagagggactcctccctaactcattttatgaggccagcgtcctcctgataccaaaacctggcaaagacacaacaaaaaaagaaaatttcaggccaatatccctgatgaacatcgatgtgaaaatcctcaataaaatattggcaaaccgaatccagcagcacatcaaaaagcttatccaccacaatcaagttggcttcatcattggggtgcaaggctggttcaacatatgcaaatcaacaaacgtaatctatcacgtaaacagaaccaatgacaaaaaccacgattatctcaatagatacagaaaaggccttcgatga

SEQ ID NO: 22754 - DNA, 849 bp, Homo sapiens
  SIMILAR (412)..(843): 861254mologous to Homo sapiens putative p150,accession number U93572,Smith-Waterman Score=634.
attaaccaaatatatggactgctagccagactaataataaagaagaaaggagagaagaatctaatagacgcagtaaaaaatgatgaaggggatatcaccactgatcccacagaaatacaaactaccatcagagaatactacaaacacctctgtgcaaataaactagaaaatctagaagaaatggataaattcctggacacatacacccttccaagactaaaccaggaagaagttgaatccctgaagagaccaataacaagttttgaaattgaggcagtaattaatagcctaccaaccaaaaaaagcccaggaccagacaggttcacagccgaattctaccagagccgatatcacacggaatgggcaaaagctggaagcagtccctttgaaaaccggcacaagacaaggctgtgccctctctcatcgctcctattcagcatattattggaagttctggccagggcaatcaggcaagagaaagaaataaagggtattcaaataggaaaagaggaagtcaaattgtttctgtttgcagatgaaatgatcgtgtatttagaaaaccccatcgtctcagcccataatatctttaagctgataagcaacttcagcaaagtcttaggatacaaaatcaatgtgcaaaaatcacaaacattcctatatgccaataatagacaaacagagagccaaatcatgagtgaattcccagtcacaattgctacaaagagaataaaatgcctaggaatacaacttacaagggatgtgaaggacctcttcaaggagaactacaaaccactgctcaaggaaataagagaggacataaaccaatggaaaaacattccatgcttatag

SEQ ID NO: 22755 - DNA, 530 bp, Homo sapiens
  SIMILAR (176)..(229): 771254mologous to Homo sapiens NAG13,accession number AF194537,Smith-Waterman Score=72.
aaatacaagctaccatcagagaatactataaacacctctatgcaaataaactacaaaatctagaagaaatggataaattcctggacacatacaccctctcaagactaaaccaggaaaaagtcgaatccctgaatagaccaataacaagttctgaaattgaggcagtaattaatagcctaccaaccgaaaaagtccaggaccagacagattcacagccaaattctatcagagtattggaagttctggccagggcaatcaggcaagagaaagaaataacgggtattcaaatagaaaaggaggaagtcaaattgtatctgtttgcagatgaaatgatgatacgtttagaaaaccccatcgactcagcccaaaatctccttaagctgctgataagcaacttcagcaaagtctcaggatacaaaatcaatgtgcaaaactcagaagcattcctatacaccactaacagacaaacagagagccaaatcatgagtaactcccattcacaattgctacgaagagaacaaaatacctag

SEQ ID NO: 22756 - DNA, 757 bp, Homo sapiens
  SIMILAR (756)..(361): 731254mologous to Homo sapiens NAG13,accession number AF194537,Smith-Waterman Score=489.
tcaagtcggcctaggacgctccagattggtaggggtaggggcgtccaccattactgaggcttgagtaggcagttttcccctcacagtgtaaacaaagccgcaggggaagttccaactgggcggggccctccacagctcagcaaagccaatgtagccagactgcctctctcgattcctcctctctgggcagggcatctctggaaaaaaggtggcagccccagtcaggggattatagataaaacactcatctccctgggacagagcacctaggggaaggggcagctgtgggtgcagcttcagcggacttaagcattcctgcctgctggctctgaagagagcagcggttctcccagcacagcactcaaactctgctaagggacagactccctcctcaagtgggtcgctgacccgtgcttccagctcctctttgtacctctggtagaatttggctgtgaatccgtccagtcctggactttttttggttgataggctattaattactgcctcaatttcagatcttgttattggtatattcagggatttgacttcttcctggtttagacttgggagggtgtatgtgtccaggaatttatccatttcttctagattttccagtttatttgtgtagaggtgtttatagtgttctctgatggtagtttgtgtttctgtgagatcagttgtgatatcccctttatcattttttattgcatctatttgatttttctcagttttcttctttactagtctggcgagtggt

SEQ ID NO: 22757 - DNA, 669 bp, Homo sapiens
  SIMILAR (441)..(503): 521254mologous to Mus musculus reverse transcriptase,accession number U15647,Smith-Waterman Score=61.
atgaaaataccaaatgtacgtctgactgatgtacctgaaagtgatggggacaatggaaccaagcttgaaaactctctgcaggaagttctccaggagaacttccccaacctagcaaggcaggccaacattcaaattcaggaaatacagagaacaccacaaagatactcctcaagaagagcaactccaagacacataattgtcagattcaccaaagttgaaatgaaggaaaaaatcttaagggtagccagagagaaagaaatacaaactaccatcagagaacacaataaacacctctgcataaataaactagaaaatctagaagaaatggataaattcctcgacacatacaccctcccaagactaaaccaggaagaagttgaatacctgaatagaccaataacaggctctgaaattgaggcaataattaataggttaccaaccaaaaaagtccaggaccagttggattcacagccaaattccaccagagatgcagaaaaggcctttgacaaaattcaacagcccttcatgctaaaaactgtcgataaattaggtattcatgggatgtatctcaaaataataagagctatttatgacaaacccacagccaatatgatactgcatgggcaaacactggaagcattccctttgaaaactggcacaagacagtga

SEQ ID NO: 22758 - DNA, 1436 bp, Homo sapiens
  SIMILAR (959)..(1126): 821254mologous to Homo sapiens putative p150,accession number U93564,Smith-Waterman Score=229.
atggggagaaaccagcgcataaaggctgaaaattgcaaaaaccagaactcctcttctcctccaaaggatcacaattcctcgccagcaagggaacaaaagtggacgaagaatgagtttgacaaattgacagaagtaggcttcagaaggtgggtaataacaaactcctccaagctaaaggagcatgttctaacccaatgcaaggaagctaagaaccttgaaaaaaggttagacgacttgctatctggaacaaccagtttaaagaagaacataaatgacctgatggagctgaaaaacacagcacgagaacttcgtgaaccatacacaagtatcaatagccaaatcgatcaagcagaaaaaaggataacagagattgaagatcaacataatgaaataaagggtgaagacaagattagagaaaaaagaatgaaaaggaatgaacaaagccttcaagaaatatgggactatgtggaaagaccaaatctacatttgactagtgtacctgaaagtgatggggagaatggaaccaagtcggaaaacactctgcaggatattatccaggagaactttcacaacctaccaacacagaccaacattcaaattcaggaaatacagagaaaaccacaaagatactccttgagaagagcaaccccaagacacataaacgtcagattcaccaaggttgaaatgaaagaaaaaatgttaagggcagccagagaggaaggtcgggttacccacaaagaaatacaaactaccatcagacaatactataaacacctctatgcaaataaactagaaaatctagaagaaatggataaattcctggacacatacaccctcccaagactaaaccaggaagaagtcgaatccctgaatagaccattaacaagttctgaaattgaggcagcaattaatagactaccaaccaaaaacaaagcccaggaccagacggattcatggattcacagctgaattttaccagaggtacaaagaggatctggtaacattccttctgaaattatgccaaacaattgaaaaggagggagacctccctaactcattttatgaagccagcatcatcctgagaccaaaatcgggaagagacacaacaaaaaaaagagaatttcagacccatatccctgatgaacatcgatgcaaaaatcctcaataaaatactggcaaaccgaatccagcagcacatcaaaaagcttatccaccatgatcaagttggcttcctccctgggatgcaaggctggttcaatatatgcaaatcaataaacataatccatcacattaacagaaccaaagacaaaaaccacatgattatctcaatagatgcagaaaaggcctttgacaaaattcaacagccttccatgctaaaaactctcaataaactaggtaatgatgggacttatctcagaataataagagatatttag

SEQ ID NO: 22759 - DNA, 994 bp, Homo sapiens
  SIMILAR (35)..(124): 831254mologous to Homo sapiens ribosomal protein L29,accession number Z49148,Smith-Waterman Score=149.
gtaccgattttccggtccaacaattcgttcaattcagaaccacaccacacacaaccagggccgaaaatggcacaaaaaagggatcaagaaaccccgagcacaaagatacgaatctcttaaggggcctgaagtgtaaccctctggtcagggtgtaacctgcctcctgagggcagattggctatctcccttgcttggcagcggcacttatggtgggccccaagttcctgaggaacacgcgctttgccaagaagcacaacaaaaagggcctaaagaagatgcaggccaacaattgccaaggccatgagtgcacgtgccgaggctatcaaggccctcgtaaagcccaaggaggttaagcccaagatccccaaagggtgttcagccgcaagcttcgattcgactttgcctacattgcccaccccaagctttggggaaggcgttgcttcgttgcccgtttttgccaaggggcttcaggctgttccgggcccaaaggcaaggccaaagtgcccaaggccaaggtcaaggtttcgccaaggccaaggccaaggccaaggccaaggatcaaaccaaggcccaggctgcagccccagctttagtttccagctcaggctcccaaacgtacccaggcccctacaaaggcttcagagtagatatctctatctgccaacattaggacagaaggactggtgcgaccccccacccccgcccctgggctaccatctgcatggggctggggtcctcctgtgctatttgtacaaagaaacctcaggcagggaaaaaaaaattcatcctaagcttcccttggtaaaatgacaggcattcatgcagcttaaaggttctggaaaactgattttcttccatgatggtactactccacagtctagacaaaatgcagccatcaacatgaaaaactgctgcttgattttttttcctccaacatgttttaaacagagctgcagatgctcaagacgaaatcgtcgaccgggaattcggactg

SEQ ID NO: 22760 - DNA, 702 bp, Homo sapiens
  SIMILAR (3)..(50): 1001254mologous to Homo sapiens synaptogyrin 2,accession number AJ002308,Smith-Waterman Score=95.
  misc_feature (1)...(702): n = a,t,c or g
agcagatgtactgcgtgttcaaccgcaacgaggatgcctgccgctatggagtgcatcggggtgctggccttcctggcctcggctttcttcttggtggtcgacgcgtatttcccccagatcagcaacgccactgaccgcaagtacctggtcattggtgacctgctcttctcagggtgtgctggcctccctggcctaccagcgctacaaggctggcgtggacgacttcatccagaattacgttgaccccactccggaccccaacactgcctacgcctcctacccaggtgcatctgtggacaactaccaacagccacccttcacccagaacgcggagaccaccgagggctaccagccgccccctgtgtactgagcggcggttangtgggaagggggacagagagggccctcccctctgccctggactttcccatgagcctcctggaactgccagcccctctctttcacctgttccatcctgtgcagctgacacacagctaaggagctcatagcctggnggggtggcagacacaccccaagtgctgtgccagacggtcagtcagcgtnaatctncagggactttaggaagggttttantagtgttttcctggttttaataccttagccgctgaatggtagaacagnagtgccatgtgtatgaaatgctanttccccggcggtaancttggacgtattntggttttg

SEQ ID NO: 22761 - DNA, 300 bp, Homo sapiens
  SIMILAR (1)..(99): 1001254mologous to Homo sapiens synaptogyrin 2,accession number AJ002308,Smith-Waterman Score=166.
atggagagcggggcctacggcgcggccaaggcgggcggctccttcgacctgcggcgcttcctgacgcagccgcaggtggtggcgcgcgccgtgtgcttggccaagggtgaaagccagcaagagtccggggctggcatctacccagacagcgtctcactctgctgcccagcccactttcaagtcaatgtggagcttcccagctcgccctccccatcctggatttcagatccctcctaccctcaccctactttctctcggagtttgacaggggagcagggaatcatcctgtatgaagagtga

SEQ ID NO: 22762 - DNA, 1592 bp, Homo sapiens
  SIMILAR (128)..(535): 731254mologous to Homo sapiens synaptogyrin 2,accession number AJ002308,Smith-Waterman Score=442.
  misc_feature (1)...(1592): n = a,t,c or g
gcggcggcggcagcggcggcgacggcgacatggagagcggggcctacggcgcggccaaggcgggcggctccttcaacctgcggcgctttctgacgcagccgcaggtgggtggcgcgcgccgtggtccttggtcttcgccttgatcgtgttctcctgcatctatggtgagggctacagcaatgcccacgagtctaagcagatgtactgcgtgttcaaccgcaacgaggatgcctgccgctatggcagtgccatgcggggtgctggccttcctggccttcggccttgcttcttggtggtcgacgcgtatttcccccagatcagcaacgccactgaccgcaagtacctgggtcattggtgacctgctcttcttcagctctctggaaccttcctgtggtttngtttggtttctgcttcctcaccaaccagtgggcagtcaccaaactcgaagaccgtgctggtgggggccgactctgtgagggcagccatcaccttcagcttcttttccatcttctcctggggtgtgctggcctccctgggctaaccagcgctacaaggctggcgtggacgacttcatccagaattacgttgaccccactccggaccccaacactgcctacgcctcctacccaggtgcatctgtggacaactaccaacagccaccctttcacccagaacgcggagaccaccgagggctaccagccgccccctgtgtaattgaggcgggcggttaggttggggaagggggacagagagggccctcccctctgccctgggactttcccatgagcctcctgggaacttgccagcccctctctttcacctgttccatcctgtgcagcttgacacacagctaaggagcctcatagccttggcgggggctggcagagccacaccccatagtgccttgtgcccaaagggcttcagtcagctgctcactcctccagggcacttttaggaaagggtttttagctagtgtttttcctcgcttttaatgacctcagccccgcctgcagtggctagaagccagcaggtgcccatgtgctactgacaagtgccttaagcttccccccggccccgggtcaaggcccgtgggaacccgctattattctgcgttctctgcccaaaaaaaatccgtgggggccccaatcaaaacctgcccctgtggcaagcgggagccagaccccaggctctttgtgtccctcacctaaaggtttgccttcccctggtgccccactggctgtatgattctggggggccacccaccctagtgccgggtggccttctgggctggccttcccgttggtgttgatgtgcgggtgcttggtgctcattggcactttccctcctgctcccacccctggcagcagggaaggggctttgccctgacaaccaccccgcgcttatgtaaatattctgcatgttgttacttaggaaagcctgggagagggcaggggtggccccactggcctcccaagactctgtctgtgcccgagtgtattataaaaatcgtgggggagatgcccggccctgggatgctgtttggagacgggaataaatgttttctcattcaaaaataaacataaaaaaaaaaa

SEQ ID NO: 22763 - DNA, 337 bp, Homo sapiens
  SIMILAR (8)..(196): 281254mologous to Arabidopsis thaliana putative protein,accession number AL132964,Smith-Waterman Score=79.
cccgcagccagtgcaggcactctggacctctcagggtggcgatgaagtttccagcgcggagtaccaggggagcaaccaacaaaaaagcagagtcccgccagccctcagagaattctgtgactgattccaactccgattcagaagatgaaagtggaatgaattttttggagaaaagggctttaaatataaagcaaaacaaagcaatggtaggtatctgactttgtgttagaattaatttttcctctctaagcgactcattacttaaatctgttccatcacgcaaaagttatttttttctgttacatgaataaaaagttatttttgtttacctgtgaaa

SEQ ID NO: 22764 - DNA, 3030 bp, Homo sapiens
  SIMILAR (1457)..(1744): 341254mologous to Arabidopsis thaliana F12A21.9,accession number AC008113,Smith-Waterman Score=152.
attcatgtagccatccacggtcttcctctttctcaccaacatgtacttatcctcttcctcctcctcctccatgggtagagcgtcaagggacccgaggatccgggaccttgacctggtaagaggacgagctctccgttcagggtttctcctggaagcaacacccgggaatgtacgccttcgcggtctccttgattgcattccatcttgtatctcactctctgagaaaccgcaaaatgattcatcgtcagagtcggcatgaaaaataccggccagttcgttagtgacatctggccttggtttctgtaaaaatccacaatggtctaatacatcttgcacctcactttcatgtgatgccttccaccttggaatgactttgtcagatgccagtgccatgctcttggactttccagcctccagaaccatgagccaaataaacttctgttccttataaattacccagtctgtggtattctgtgtcccaacgcgggaaagacagcccgagccccgcccctccgggcccgggtcggcgcgcccagcctgccagccgcgctgctgctgctcctcctgctgtgggaccgctgaccgcgcggctgctccgctgctccccgctccaagcgccgatctgggcaccccgccaccagcatggacggttcgccgcgtgccgcagaaagatctcagagtaaagaagaacttaaagaaattcagatatgtgaagttgatttccatggaaacctcgtcatcctctgatgacagttgtgacagctttgcttctgataattttgcaaacacgaggctgcagtcagttcggggaaggctgtagggacccgcagccagtgcaggcactctggacctcttcagggtggcgatgaagtttccagcgcggagtaccaggggagcaaccaacaaaaaagcagagtccccccagccccccagagaattctgtgactgattccaactccgattcagaagatgaaagtggaatgaattttttggagaaaagggctttaaatataaagcaaaacaaagcaatgcttgcaaaactcatgtctgaattagaaagcttccctggctcgttccgtggaagacatcccctcccaggctccgactcacaatcaaggagaccgcgaaggcgtaccatttcccgggtgttgcttccaggagaaaccctgaacggagagctcgtcctcttaccaggtcaaggtcccggatcctcgggtcccttgacgctctacccatggaggaggaggaggaagaggataagtacatgttggtgagaaagaggaagaccgtgggatggctacatggaatgaagatgacctggcccagaagcccgtcgctcccagatccatccgtgacccttccgcatataattcgcccagtggaagaaattacagaggaggagttggagaacgtctgcagcaattctccgagagaagatatataacccgttcacttgggctctacttgtcatcaatgccgtcagaagactattgataccaaaacaaactgcagaaaccccagactgcttggggcgttcgaggccagttctgtggcccctgccttcaaaaccgttatggtgaagaagtcagggatgctctgctggatccgaactggcattgcccgccattgtcgaggaatctgcaactgcagtttctgccggcagcgagatggacggtgtgcgactggggtccttgtgtatttagccaaatatcatggctttgggaatgtgcatgcctacttgaaaagcctgaaacaggaatttgaaatgcaagcataatatctggaaaatttgctgcctgccttctacttctcaaatctttcttgtaaaagtttccaattttttcactgaaaccctgagttaaaaatcttgatgatcagcctgtttcataaagaaactcccaatcaagttaatcttaggcagacatgtgtttctggagcatcacaggaggtatattgctagttacactttgccctcctgcagtttcttctctgctcccaacccccatctcacagcatccccctctatttccaatgctcctctccaaccgcttagtttctgaatttcttttaaattacagttttatgaaagcatattttatttacttggtgttgaaatagcccctccataaaaccctaagcacttggaaacacaataatagtattaacctaactagatcctattgaatttcagagaagagccttctaacttgtttacacaaaaacgagtatgatttagcattcatactagttgaaatttttaatagaatcaaggcacaaaagtcttaaaaccatgtggaaaaattaggtaattattgcagattgatgtctctcaatcccatgtattgcgcttatgttacaagttgttgtcacagttgagacttaatttctcctaatttccttctgcccgaagggtaagtggtgcgtccagcttacacaatcataattcaaaggttggtgggcaatgtaatacttaattaacataatgatggaagagctatctggagattatgagtaagctgatttgaattttcagtataaaactttagtataattgtaggtttgcaaagtttatttcagttcacatgtaaggtattgcaaataaattcttggacaattttgtatggaaacttgatattaaaaactagtctgtggttctttgcagtttcttgtaaatttataaaccaggcacaaggttcaagtttagattttaagcacttttataacaatgataagtgcctttttggagatgtaacttttagcagtttgttaacctgacatctctgccagtctagtttttgggccaggtttcatgtgtcagtattccccctcctctttgcattaatcaaggtatttggtagaggtggaatctaagtgtttgtatgtccaatttacttgcatatgtaaaccattgctgtgccattcaatgtttgatgcataattggaccttgaatcgataagtgtaaatacagcttttgatctgtaatgcttttatacaaaagtttattttaataataaaatgtttgttctaaa

SEQ ID NO: 22765 - DNA, 337 bp, Homo sapiens
  SIMILAR (9)..(335): 991254mologous to Homo sapiens neutral calponin,accession number D83735,Smith-Waterman Score=555.
ggcacgagggctccgtccccaagatcaaccgctccatgcagaactggcaccagctagaaaacctgtccaacttcatcaaggccatggtcagctacggcatgaaccctgtggacctgttcgaggccaacgacctgtttgagagtgggaacatgacgcaggtgcaggtgtctcttctcgccctggcggggaaggccaagactaaggggctgcacagcggcgtggacattggcgtcaagtactcggagaagcaggagcggaatttcgacgatgccaccatgaaggctggccagtgcgtcatcgggctgcagatgggcaccaacaaatgcgccagccagtc

SEQ ID NO: 22766 - DNA, 1209 bp, Homo sapiens
  SIMILAR (1014)..(1079): 681254mologous to Sus scrofa h2-calponin,accession number Z19539,Smith-Waterman Score=86.
atgactgtcaaaggagtcttcaagcatggaaggtgtccagggaaggacgtagtgggaggcgattggatcatgtgggcagtttctgccatgctattctcacgacagtggaaccgcctactcaagcctcagcaacggcagatgccccttcccccaccaagctcccgcatcctaagtcgatctcagactgctgcattagcagtgagcaaggctctgtgggtgtgggacccaccaagccaggcacaggaggatatctcctggtctaccagttgtgaagacagtgggaaaagtgcagtatttgggcaagagtgtactgcttctccagatcccaagctggacaaagaggttgtctttggttcatgctccccatatcagtactgtttgcagggaccaggaaaatgggatggagccaggaaagccatcctgaaccatgagttccacgcagttcaacaaggggccttcttaccagctttttgccgagatcaagaaccagctcctgttcaaatgcgaccctcagaagcaggcggcgctctgcagctggatcgagggactcacccgcctctctttcagccccgacttccagaagagtctgaaggaagggattgtcttatgcacactcatgaacaagctgggctcagtccccaagatcaacggctcatgcagaactggcaccagctagaaaatctctccaacttcatcaaggccatggttggatacgacatgaaccccatggacctgttcgaggccaacgacctgtttgagagtaggaacatgacgcagaaccgtatcctgccctctggaccactcgaccatcagcctccagatgggtgcaaacaaacgctccagccagggggcatgacggctcccgggaccccgcagcacatctacaacaccaaactgggagcccacaagtgtgacaactcctccatgtccctgcatatgggtgacacgcagagtgccaaccacagcgtccagggctttggcctgggccagcagatatactatcccaagtactgccctcaaggcctgcagccagtggggctcccttggatgccggcaactgcccaggaccaggggaggcccccgaggatcccccctgctcccaggaggaggccactactgaggcccccgaacatgctggctccctacatcatcgccctgtctgggtttgggggattttcctgtattttcgtctttcttttttttttttaa

SEQ ID NO: 22767 - DNA, 1053 bp, Homo sapiens
  SIMILAR (341)..(439): 511254mologous to Homo sapiens Human secreted protein, SEQ ID NO: 7344,accession number G03263,Smith-Waterman Score=111.
tcacgctgctttcatgcctgctaacacaacatcggggggcaatgccaagcctggagtgtcccacaggttggccggggatacggacagcacaccggggtggggagactcactgagcacgggctgccccatagaagggccagaatcccaagcactgacaacacattcgggaaacgccgggagcgcaggttcattcctgtgggaagtggaacccgcaggccctgtggagaacagcttggcagctgctgacaacacgaaacacactctcggcaaaccacccagcagccacacctcgtcatttacccactggaaatctcctgcccacacaaaaacctgcacccggatgttgatagcatctttcttcataattaccaaaacctggaagcgaccaagatgcccttcagtagataagtggaaaaataaaccgtggtgcatccatactggactattatccagtactgtgccacctggggaaccagggtgcccgattccggagctgtcagggctgctcatggggctgcaaaccacctcttcccgttgctcagtacggcaggtgtggtagacagggtgtgatggggcgggacgtgattcctcagcacccttcccgatgaagtaggtccttctcgcctccacccctgctaagcaggcactgtgcgttcttgtgtcttccagaaggcgccgctcctgctgcactgcagctggtgccacaactgtgaatgttggagttgtccagtcccacagcttcctctgccccacagcacagggcagattggcctgcagggcctcatcacccccattctcctcttttagcatcttcctcaggcggtccttacacacttctcttccagcttttgtgattctttcatatggaggtggagggttgtggctcatgctccgatgggttattgtggagtagagaaacccactggatgtggcacggactgaactcctcggctggtcctcagggttcctcaggggattttcttggatttacatgcagacgatcgtatcatcaacaaactactaaaccctgtctccaatattcatcctcgtgcc

SEQ ID NO: 22768 - DNA, 367 bp, Homo sapiens
  SIMILAR (349)..(74): 1001254mologous to Homo sapiens Human secreted protein clone bv286 1 protein,accession number W30651,Smith-Waterman Score=487.
agatcttccacctgtgatacaatgatgaaaaaagaatacctgacttataggtggcaataaggaataagaatcatccttgaagaatgtcaaggagccatagaaacaggaagaaggaaaggaggactgagcatgcccttgccgctggctcagctgcagatgatggggaggccactggaccacagcccgggctgaatacgtactcttggtcgtgcactgtgttcttatccaggcccatgctgccgggttgggagaagctggctgcaggctcctcagccctggcgcctggggcacaaaaggcccagagcaggccacacaggaagggggttctgagcagggatctcatggtcatcaatatctgtgagatggg

SEQ ID NO: 22769 - DNA, 383 bp, Homo sapiens
  SIMILAR (166)..(330): 981254mologous to Homo sapiens Clone HP01842 of a human secretory signal protein (1),accession number Y03238,Smith-Waterman Score=289.
ggccttgtctatctctgtgtaatccttgagtgtggtctgccactgctggtgtttgtttttctgagctggaggaagtttaagatcttgaacttttcagagtccttaagatttcagcatgatcccagtatctgtcaattggcctgaacctgactgttgatttttaggcatatcatggagcatctagaaggtgtcatcaacaaaccagaggcggagatgtcgccacaagaattgcagctccattacttcaaaatgcatgattatgatggcaataatttgcttgatggcttagaactctccacagccatcactcatgtccataaggaggtaggtctggcagtggcttgggggactgtatcacagaaaggcttccctttgttaatttg

SEQ ID NO: 22770 - DNA, 4350 bp, Homo sapiens
  SIMILAR (241)..(405): 691254mologous to Homo sapiens Clone HP01842 of a human secretory signal protein (1),accession number Y03238,Smith-Waterman Score=172.
  misc_feature (1)...(4350): n = a,t,c or g
gggcgaagccgaggaagagcgttttggggacgggggctggtgaggctcacgttggagggcttcgcgtctgcttcggagaccgtaaggatattgatgaccatgagatcccttgctcagaacccccttcctgtgtggcctgctctgggccttttgtgccccaggcgccagggctgaggagcctgcagccagcttctcccaacccggccagcatgggcctggataagaacacagtgcncgccccaagagcatatcatggagcatctagaaggtgtcatcaacaaacccagagggcggagatgtcgcccacaagaattgcagctccattaccttcaaaaatgcatggattatgatggcaataatttgcttgatggctttagaactctcccacagccatccactcatgtcccataaggaggaagggagtgaacaggcaccactaatgagtgaagatgaacttgattaacataatagatggtgttttgagagatgatgacaagaacaatgatggataccattgactatgctgaatttgcaaaatcactgcagtagatgttatttggccatctcctggttatatacaaatgtgacccgtgataatgtgattgaacactttagtaatgcaaaataactcatttccaactactgctgcagcattttggtaaaaacctgtagcgattcgttacactggggtgagaagaggataaggagaaatgaaagagaagagaaatgggacatctaatagtccctaagtgaatattaaataccttattggacaagggcttgcttcaagcatctgtattagtctgtattaatgctgctgataaagacgtacccgagactgggaagaaaaagaggtttacttggacttacagttccacatggctgggaggcctcaaatcatgccggaagttgaaaggcacttcttacatggcagcaagagaaaatgaggaagaagcaaaagtggaaacccctgataagccatcagatcttgtgaaacttattcactatcacaagaatagcatgggaaagactggcccatgattcaattacctccccttggtctctcccacaacacgtggaattctgtagatacaatttcaagttgagatttggtggacataccaacatatcatctacctggccccttccaaatttaatttcccaatttttaaaaccaattattccttcctaaaattccccaaagtcttaactcttttcagcattaacgaaaaatccacagtccaaagtctcatctgagacaaggcaagtcccttccacctatgagcctgtaaaatcaaaagcaagctagttacttcctagataccaacagggtacaggtattgattaaagacggctgttccaaatgggagaaattggccaaaataaaggggttacagggcccatgcaagtccgaaatccagcagggctgtcaaatttaaagttccagaataatctcctttgactccaggtctcacatccaggtcatactgatgcaagaagtgggttcccatcctcttgggcagctctgccctggctttgtagggtacagcctccctcctggctgctttcacggctgttgttcagtgcctgcgttttccaggtgcacggtgcaagctgtggatctaccattctggggtctggaggacgctggccctccttctcacagctccactaggcagtgcccagtagggactctgtgtgggggctcccacaccacatttcccttctgcactgccctagcagaggttctctcccctgccgctgagagggcctctcccctgcagcaaacttttgcctgggcattgaggcatttccatacatcttctgaaaactaggcggaggtttccaaatctcaattcttgacttctgtgcacctgcaggcttaacagcacatagaagctgccaaggcttgggggcttccactctgaagccacagcccgagctgtatgttggcccctttcagccatggctggagtggctggggacacaagacaccaagtccctaggctgcacacacatgtcaggggctgccctgacatggcctggagacattttccccatggtgttggggattaacattaggctccttgctacttatgcaaatttctgcagctggcttgaatttctccccagaaaatgggtttttcttttctattgcatagtcaggctgcaaatttccaaacttttatgctttgcttcccttatttataagggaatgcctttaaaagcacccaagtcacctgttgaacactttgctgcttagaaatttcttccgctagttaacctaaatcatctctctcaagttcaaagttccacaaatccctatggaaggggcaaaatgctgccagtctctttgctaaacactaacaacaggtcacctttactccagttcccaacaagttcctcatcttcatctgaggccacctcagcctggactttgttgtccatattgctatcaggcttttggtcaaagccattcaacaagtctctaggaagttccaaactttcccacatcttcctgtcttcttctgagtcctacaaactgttccaacctctgcctgttacccagttccaaagtcgcttccacattttcgggtatccttataagcagcaccccactctctgcagcaccaatttactatattagtctgttcttacactgctaaataagacatacctgagactgggaagaaaaagtcggtttaattggacttaaagttccacatggctggggaggcctcagaatcatggtgggaggcaaaagacacttcttacattgtggcaagaaaaaatgaggaagaagcaaaagcaagaaacccctgatacaactgatcagatcttctgataaaatctcagatctcatgagacttattcactgtcacgagaatagcacgggaaagactggcccccatgattcaattacctcccccgtgggtcgtgtcccacaacacgtgggaattctgggagatacaattcaagttgagatttgtggggggacacaaccaaaccatatcagcatcctttcaagaatattagataattggagctgagtactcaggaacttgactgtagtagaatactgctagtttcttaattttaattcacatcaccttgaaaagtaaaacaaccaggctttgccaagtgggatgcttttccagtaacagtgaagtggagtgaatacccaaatgtttgccctggtgggttcctatctccttcaggcaaacatggttcagtattcttgtaaagttcccctgggcctaaaatggattactttgctctggggcaagtgggatatttattagggctatttcaaaagccacagcattaaggaatgtcagcctaggccacagagtctggagattctgagtttcagcctaggccacagggtctaaggttctgttatcctctggacattttggggaaatggatacactactgggctttaagtggatggactctttcagattttcagtattttatacaactactgccacatccttatactttattgcttttctgtcttcttcaacctgggagagaccctgaatttgagtgtgttctctaatcaatagtggtttagctttcttttctaattcactccgtttccaggggttttttattttgcaggttaggaactattaggaatgtcaggactttatcagcaggggtaaaactaccacctggcctagcctaagtaggaagtgaaaagataattcaccaaacaatgattaatcagatagaagttctagtcaagagggatatttgttgaaagttaccctctttttagccctagataccatggattccttttccaaatccagggaaagattagaaaagggaacccccaaaaaacccccttaaccagtgtgaaccctttatagtattttgaaaatgaggaaggaaggcagccagattgtaatttgggtttatttgggatgttgatgggacgttctgtaatagaaaaccctgaaacgatgattgaatgggaaaaagagacctacaaaatttgtcgtaggatgtatacagaccttattttctttattacgagtattataagaaaacatatgtatttgtaaaaatggtttcctgtgtccaagtatttgtgcagtcagagctgactttgtaaacttattcttgtaatagcttcattattttgaaagatttatatatgatgaattctggatatacgaccattattgactgacgaagcaaacacggtaattgagttaggggggggcccttctaaggaatccaagctccggaacgaggtattggaagttttacgttctttattagggcaccttatatacatttcattggcccggggtttaacaacggtgggccggggag

SEQ ID NO: 22771 - DNA, 822 bp, Homo sapiens
  SIMILAR (73)..(819): 721254mologous to Homo sapiens alpha 4 protein,accession number Y08915,Smith-Waterman Score=909.
atggctgctgaagacaaattactgctgccacagctccccgagctgtttgaaaccagcaaacagcttctggatgatgtagaagtagtgactgaacctgccggttcccggatagtccagaagaaggtgttcaagggcctggacctccttgagaaggctgccgaaatgttatcgcagcttgacttgtggcagagcttgagctgccgaaaaccaagaactcagctgaaaaatcacactgctaatttctccatggcttatcctagcctcattgctatggcatctcaaagacaggctaaaagagagagacacaagcagaaggagttggagcacaggttgtctgcaatcaaatctgctgtggaaactggtcaagcagatgatgagcgtgttcgtgaatattatcttcttcaccttcagagcttagaagagattgagagcattgaccaggaaataaagatcctgagagaaagagactcttcaagagaggcatcaacttctaattcatctcgccaggagaggcctccagtgaaacccttcattctcactcggaacatggcccaagtcaaagtatttggagctggttatccaagtctggcaactatgacggtgagtgactggtataagcaacattggaaatatggagcattaccagatcagggaatagccaaggcaacaccagaggaattcagaaaagcagctcagcaacaggaaggtcaagaagaaaaggaggaagaggatgatgaacaaacactctacagagttcgggagtgggatgactggaagggcatccatcctagggactatggcagccaacagagcatgggctga

SEQ ID NO: 22772 - DNA, 536 bp, Homo sapiens
  SIMILAR (246)..(407): 1001254mologous to Homo sapiens alpha 4 protein,accession number Y08915,Smith-Waterman Score=298.
  misc_feature (1)...(536): n = a,t,c or g
aggggttccgngncgaatttaaaacttgaaagcctgncgganccggcnccggaannnnccgggnncgacccacgcggtccgctnnccagtgaaaccctttcattctcacttcggaacatggcttcatagccaaagtanctttggagctggttattccaagggctggccaacttatngtacggtgagtgagctggtatgaagcaacatcnggaaatatggagcacttatccggatcagnggaatatgccaaggcagcaccagaggaattcagaaaagcagctcagcaacaggaagaacaagaagaaaaggaggaagaggatgatgaacaaacactccacagagcccgggagtgggatgactggaaggacacccatcctaggggctatgggaaccgacagaacatgggctgatcttcccacaacaccacaggactgcagggtgcacaactcccctgccaaggaaaaccatgcangcctcccctccctggtctcctgcttcagctctgtacaacgagggcaaagatgctaaatcttgct

SEQ ID NO: 22773 - DNA, 640 bp, Homo sapiens
  SIMILAR (1)..(51): 581254mologous to Homo sapiens alpha 4 protein,accession number Y08915,Smith-Waterman Score=55.
gtggcagagcttgagctgccgaaaaccaagaactcagctgaaaaatcacactgctaatttctccatggcttatcctagcctcattgctatggcatctcaaagacaggctaaaagagagagacacaagcagaaggagttggagcacaggttgtctgcaatcaaatctgctgtggaaactggtcaagcagatgatgagcgtgttcgtgaatattatcttcttcaccttcagagcttagaagagattgagagcattgaccaggaaataaagatcctgagagaaagagactcttcaagagaggcatcaacttctaattcatctcgccaggagaggcctccagtgaaacccttcattctcactcggaacatggcccaagtcaaagtatttggagctggttatccaagtctggcaactatgacggtgagtgactggtataagcaacattggaaatatggagcattaccagatcagggaatagccaaggcaacaccagaggaattcagaaaagcagctcagcaacaggaaggtcaagaagaaaaggaggaagaggatgatgaacaaacactctacagagttcgggagtgggatgactggaagggcatccatcctagggactatggcagccaacagagcatgggctga

SEQ ID NO: 22774 - DNA, 1451 bp, Homo sapiens
  SIMILAR (33)..(500): 511254mologous to Homo sapiens alpha 4 protein,accession number Y08915,Smith-Waterman Score=252.
ggagggggaattcccggctgcggtattcgcacgaggacgagttacagctgccgcggctccccgagctgttcggaaactggtagacagttactggacgaagtagaagtggcgacttgaccccgccggtttccgggatagtccaggagaagggtgttcaagggctttggacctccttgaggagggctgccgaaatgttattcccagtccaccttgttcggccgcgaatgtagattttggaaagatttgtcccccacgcacttgattaccttttggggtccaggcttttcaaggagcccctcccattgaaacaagtcaaccccagcaagcgtcttaggatcattttgcagcggggctcgagaacactttataaaactacttaacttcagtgccattggttatcatgtggggcagagttttgagcttgcccaaaaccattgaacaactctgctgaaaatcacactgccaattcctccatggcttatcctatgctcggtgctatgggcatctcaaagacaggctaaaatacagagatacaagcagaagaaggagttggagcataggttgtctgcaatgaaatctgctgtggaaagtggtcaagcagatgatgagcgtgttcgtgaatattatcttcttcaccttcagaggtggggttgatatcagcttagaagagattgagagcattgaccaggaaataaagatcctgagagaaagagactcttcaagagaggcatcaacttctaactcatctcgccaggagaggcctccagcgaaacccttcattctcactcggaacatggctcaagccaaagtatttggagctggttatccaagtctgcccaactatggacggtgagtgactggtatgagcaacatcggaaatatgggagcattaccggtttcaggggaatagccaagtcagcaccagagggaatttcaggaaaagcagctcagcaacaggaagaacaagaagaaaaggaggaagaggatgatgaaccaaacaacttccacagagcccgggagtggggatgactggaaggacaccccatccttaggggcttatgggaaccgacagaacatgggctgatcttcccacaacaccacaggactgcaggggtgcaccaacgtcccctgcccaaggaaaaccatgcagtcctcccctccctggtcttcctggcttcagctctgtacaaccgagggcaaagatgctaaatcttgctttgcattcagtaaagtgtcaagtgatttaagtgtgtaattgtacccctagatgatatgaaccagcagtcttgttttggcatcatccctcatcatgttgtattccagcttcttcgagtggaaggaaaagagtgttgagaaatggctttgtataatttatggctatccgaattttttgaaaaaataataaaagtcccctttattatatgggcctgtccagaaaaaaaaaaaaaaaa

SEQ ID NO: 22775 - DNA, 457 bp, Homo sapiens
  SIMILAR (138)..(377): 461254mologous to Homo sapiens human P5,accession number D49489,Smith-Waterman Score=212.
  misc_feature (1)...(457): n = a,t,c or g
aatagactgcgtaacctacgccanngcgnggaattcgtcagcttctgcagctctcccgggctagcatggcagcgcggaagagttggacggccctgcggctctgcgccacagttgttgtacttgatatggtcgtctgtaaaggatttgtacaagatttagatgaatcgtttaaagaaaatcgaaatgatgacatttggcttgtacatttttatgcgccatggtgtggccattgtaaaaagctggaaccaatttggaatgaagctggtcttgagatgaaaagcattggttctccagttaaggctggaaagatggatgctacttcctattctagcattgcttcagagtttggagttcgaggttatccaacaattaagctggctctaattcggccacttccaagtcaacaaatgtttgaacatatgcacaagagacaccgcgtatttttcgtttatgtaag

SEQ ID NO: 22776 - DNA, 1512 bp, Homo sapiens
  SIMILAR (967)..(1440): 231254mologous to Caenorhabditis elegans contains similarity to Pfam family PF00085 (Thioredoxins), Score 113, E=9.6e-33, N= 1,accession number AC006834,Smith-Waterman Score=135.
atgcccacccattcccggcagcgtcctgccgcccccgccgcgccaccctgcctggccctgacggagcggacaccttggggtccttccgccgccgctgtgccggaccaatgctggacgtgggaagggcgcgctgccttgtgtttgtgtttttctcattgtggcagaagtttcaataaagcttactcctttgatgggcaagaaggatgccgccgtcccagcttaacgaccaaatcttgccttggctttaggttccgagtcttgtcacgtttaaggatttttaccaccagtactcaagagagggtggtcgaggacagatcagggtcaggccgccgggattgtgcgaaaggtccctatgctgaaaaaggggacctttaccaagagcaaactgttcgtcagctaaatgtggaaaatgaattgttccttgctccagagcaagcagatgtgcaaccagttgcctccgggatccacaagagatggctcatggaaattcagacaggatcccagattgggcaagaatgcatggactgcgacagttgcattgcttcagagtttggagttcgaggttatccaacaattaagctattaaaaggggacttggcatataattatagaggaccacgaacaaaagatgatattattgagtttgctcacagagtatctggggctctaattcggccacttccaagtcaacaaatgtttgaacatatgcagaagagacaccgtgtatttttcgtttatgtaggtggagaatcacctttgaaatatgtgacactaaaagagatgccagctgtgcttgttttcaaagatgaaacttactttgtttatgatgagtatgaagatggtgatctgtcatcatggatcaacagggaaaggtttcagaattaccttgctatggatggcttcctcttgtatgaacttggagacacagatctgaatgccagttctttacgagaacgtaaactgatattaccagaagatatacctttgtatgtgggaaagcttgtggctcttgcagttattgatgagaaaaatacatcagttgaacataccagtgaattgacagtcccaactgtagttgtactgaatacttcaaaccagcaatatttcttgctagatagacagattaagaatgttgaagacatggtccagtttattaataacattttggatggcacagtagaagcccaaggaggtgatagcattttgcagagattgaaaagaatagtatttgatgccaaatctactattgtgtctatattcaagagctcaccactgatgggctgctttctctttggcctgccactgggtgtcatcagtatcatgtgctatggaatctacacagccgacacagatggaggttatatagaagaacgatatgaagtgtctaaaagtgaaaatgaaaaccaagaacagatagaagagagcaaagaacagcaggagcccagcagtggaggatctgtagtgcctacagtgcaggagcccaaggatgtattagaaaagaagaaagattga

SEQ ID NO: 22777 - DNA, 546 bp, Homo sapiens
  SIMILAR (173)..(205): 811254mologous to Homo sapiens ribosomal protein L31 (AA 1- 125),accession number X15940,Smith-Waterman Score=50.
atgagtaaagctgtaagaaaaacagtggagccgaaacgactccccaacttaactccccataagctcattgaggacacagactttgttctcttcaccactgtttccccagcacttcgaacactacctggcacttgtatcagttctccctttccaacttggacgcggcagaacggctcctgcaaagaagggtggcgagaagcaaagggtcattctgccatcaatgaggtggtgatccaagaatacaccatcaacattcacaagcgcatccatggagtgcgcttcaagaagcgtgcccctcgggcactcagagagattccgaaatttgccatcaaagaggtggaaactctaagtgtgcgcattgatagcaggttcaacaaagctctctgcgccaaaggaataaggaatgtcccgtaccgaatccgtgtgcagttgtccagaaaacgtaatgaggatgaagattcaccaaataagcgctatactttggttacctatgtacctgttagcactttcaaaaatgtgcagacagtccatgtgcatgagaactaa

SEQ ID NO: 22778 - DNA, 546 bp, Homo sapiens
  SIMILAR (147)..(488): 811254mologous to Homo sapiens ribosomal protein L31,accession number X69181,Smith-Waterman Score=469.
tgggattttttccaaataaatcaaaagaatacctaggatccaatgccaggcttacacttcgaacactacctggcacttggtaggagctcaacaaatatttactgaattggtaaaggaacaaatgaattaatgtatggcgagaagcaaagggtcattctgccatcaatgaggtggtgatccaagaatacaccatcaacattcacaagcgcatccatggagtgcgcttcaagaagcgtgcccctcgggcactcagagagattccgaaatttgccatcaaagaggtggaaactctaagtgtgcgcattgatagcaggttcaacaaagctctctgcgccaaaggaataaggaatgtcccgtaccgaatccgtgtgcagttgtccagaaaacgtaatgaggatgaagattcaccaaataagcgctatactttggttacctatgtacctgttagcactttcaaaaatgtgcagacagtccatgtgcatgagaactaattgctgatcctcaaatacatcaaataaaggtataaaactgcaaaaaaaaaagtct

SEQ ID NO: 22779 - DNA, 324 bp, Homo sapiens
  SIMILAR (181)..(321): 1001254mologous to Homo sapiens ribosomal protein L31,accession number AB007180,Smith-Waterman Score=243.
atggagctctgcctagacgcgtttgcccaaaagggtggagtcccctacccctcgctatggatcggcctcccgtccatgttaatgtccctccctgggttcctcgacgactacaccagtctctacgcttgtgtgcagggcacggtgatttcagtatttggatgcgccttcggcccctccgggaatgtgccataccgaatccgtgtgcggctgtccagaaaacgtaatgaggatgaagattcaccaaataagctatatactttggttacctatgtacctgttaccactttcaaaaatctacagacagtcaatgtggatgagaactaa

SEQ ID NO: 22780 - DNA, 402 bp, Homo sapiens
  SIMILAR (25)..(63): 611254mologous to Homo sapiens ribosomal protein L31 (AA 1- 125),accession number X15940,Smith-Waterman Score=39.
cccacgcgtccgggacgctgcagaatggctcccgcaaagatagggtggcgagaagaaaaagggccgttctgccatcaacgaagtggtaacccgagaatacaccatcaacattcacaagcgcatccatggagtgggcttcaagaagcgtgcacctcgggcactcaaagagattcggaaatttgccatgaaggagatgggaactccagatgtgcgcattgacaccaggctcaacaaagctgtctgggccaaaggaataaggaatgtgccataccgaatccgtgtgcggctgtccagaaaacgtaatgaggatgaagattcaccaaataagctatatactttggttacctatgtacctgttaccactttcaaaaatctacagacagtcaatgtggatgagaacta

SEQ ID NO: 22781 - DNA, 3804 bp, Homo sapiens
  SIMILAR (175)..(543): 991254mologous to Homo sapiens R32611_2,accession number AC005757,Smith-Waterman Score=621.
atggaggcagctgggcccgcaggctgcaagaagccttcctcggacacgctctccaggctgggagacccgctccagggctggagccaagcagagaattcgcatccccattcggatggctgcgctgatggtgcagccctggagggaggaggcggtagctgccattcccaagggaagggacagaagatgagcctgtcggtcctggagggtatggggttccgtgtgggccaggctctaggcgagaggctgccccgggagacgctggccttcagggaggagctggatgtcctcaagttcttgtgcaaagacctgtgggtggcggtgttccagaagcagatggacagcctgcgcaccaatcaccaggggacctacgtcctgcaagacaacagcttccccctcctcctcccgatggcctctggcctgcagtatctggaggaagcacccaagttcctggccttcacctgcggcctcctgcgcggcgccctctataccctgggcattgagagcgtggtcaccgcctccgtggcagccctgcccgtctgtgagtcatggggggaccgagcaatgcataccacagaagcccgtgccgggcgcttccctggggccacatccgtggccctcatgctcctggttactcacacagctcagggatgcggccccgtgggcgggaggaaacagcccaacctagccactggggtgtcagtgcaggacgggggtgagcgcctaagagccgtccagagggatgctggcctccggcatgggcggccttactggcacctctgccaagtcaacaagtctggggctgccctctgcccggcgatgtgcacagaacggagcgtcttcctggggagcagggctgggagtgcccggagtgtaggccagagtggcccttatgctgccccctcccaccccgctcgcatctgtagcatctggggactcctgggcttcgccgcccgctgcctgacatggtgctgcccgcctggcccactccccaaacgcctgctccccctagtgtccagcagcctcctggccactgtgctcccagcccggggcaatctcgtcctgcggagacggctcatttacattgggccacgcttcatgatcgggccggggtccgggctggtgtggcagctgctcgtggggcaggcagctggggccgtgaggccaccgtcagaggctacgccaagcctgtgtgctccctcctgcctcaggagcaggcccccagcacccagctgcccggctgccatgcacaaacattacaaagtccacttcgccaaggatgcccagagccccaacgggcactacttctgggacccagagttggggcaccgaaaaggatgctgtcatcagtggcgccaggactcagcggccctccgagcccatgggccctgtcggccttccccccaatcacactggcagctggcctaccacagccaccaagtgggtggcagtggctggcgccggggcctcctgccctccgtcctgcagcagcagcggcagccccagtcccagccctcacctcccagccccctgcggcagcggctctgccccattcacgaagcccagaaggggctgcctgcaacctccactgtccccaaggaacctgccagcgcccctcaggcgcccaccttacccaccacggcaccagccatggccaggagtggcccagctctaccctccgcggctggcgtcctcctgaagcccagcgagcccactgatgcccggcccctgcccgccccagcggcctgtggctccttcactgcctacagctccgacatcctgacagaggatgacgtctactgcagctgcctggccaagacactctgccacgtgccggtccctgtgaccgtgggtttctatgcccctttcggctgccgcctgcacatgatgctggacaagatcacggcgctgatgcagcaggaggccgcgcagcgcgagagcgaggagctgcagcacgtgcagtggcggccgcgtgccgtgagcggctggggcgtcccgcagctactgtggtacctggtgttcctgcagcccatcatcaccgaggtgcacctgcggcgcaggaacgtgcagttccttttcatccgctttagcgcctggcagtacgcgggcaccgacaagctgtgggccggcctggtgaccacgttgtgcgagggcatccgccgccactatggcgcactgcccttcagcgtgtactcggtgctgggcaacaagccggccaccaggcaggactgctgccagagcgagtggcattgtcggcgccgcgtgtgcctggggctgctggcgctgctggcggcgctgggcctgggtgtggggctgctctacttgtcactgggcggccacgcgctgggccacggcagcccgagcggcagcctgctcaaggtgtttggcggcgcggccaccacactgtcgggctcggggctgctcatggccgtgtactcggtgggcaagcacctgttcgtaagccagcgcaagaagatcgagcggctggtgtcgcgtgaaaagttcggcagccagctgggtttcatgtgcgaggtgaagaaggaggtggagctgctcaccgacttcctgtgcttcctggagatctaccagcggcgcaggctgcgcgtggtgctggaggtcaccgggctggacacgtgctacccggagcgcgtggtgggcgtgctcaacgccatcaacacgctgctgtccgacagccacgcgcccttcatcttcatcctggtcgtggaccccagcatcctggccgcgtgcctagagagcgcgggcaacatgaagggcacggccgataacggctacctcttcctcaaccgcactgtcacgctgcccttctctgtgcccattatgggccgccgcaccaagctgcagttcctgcacgatgcggtgcagagccgcgacgacctgttgtaccgcgagatgacgcgcaagccgtggctgccgggggacgccgggggcgagagcgcgcagctgctggcggtgcaggcgcaggcggggacggagcgcgggcagggccgcatcgacgacgaggcggcgcggcgaatccaggaggcgctcttctgccttcacgacgagcgcgactgcctctacgagtacgtgcccgacaacgtggtgtccatgcggcgcatcgtcaacaccgtgcccatcaccgtgcgcctgctgcagcagcagcagcagcagggggactttgggggccccacgccgcgccaggcggtggcgtgggtggtgctcgccaaccagtggccgtgccgcctgagctgggcgctgcagtgcctggaggaccggcagcagaccgggggcgcgcccgagggccgcgcgcgcctctgggacgttttccgcgacaacagccgcgagctgcacaccatgaccaaggcgttgcagaacgtgctcgacctggacggcgaccccgagctcttcgagcgcttcctgggcgccgacttccccttcaccgtggccgaggcgcagagcctgctgcgctgcacggtcaacctggaccactccatccgccggcgcatgggtctcatccgagccgtcagcgcgctcaagccgcccagcccgcccaagtcccctacccgcgataccccccacgctgcccaccgggccaacagcgcctccagggcgcccccgtcgggccgtgcctcagggcaagccggcgaaggccaccacactggggacttggcccacaggggcaagctatggccggtggcctgtgcgctcttccgtccagggcaatccagcccagggtacctgccttacgagtcactccagggccactggttagtcactgacactgaagccactgcatcagccccctga

SEQ ID NO: 22782 - DNA, 843 bp, Homo sapiens
  SIMILAR (2)..(532): 801254mologous to Homo sapiens HSPC289,accession number AF161407,Smith-Waterman Score=695.
aggagggggcatggcggatactgtgttgtttgagtttcttcacacggagatggtggctgagctgtgggctcacgaccccgaccccggcccgggggtgagcgccgggctccgtggggaggaagcgggggccaccaagggacagaagatgagcctgtcggtcctggagggtatggggttccgtgtgggccaggctctaggcgagaggctgccccgggagacgctggccttcagggaggagctggatgtcctcaagttcttgtgcaaagacctgtgggtggcggtgttccagaagcagatggacagcctgcgcaccaatcaccaggggacctacgtccttgcaagacaacagcttccccctcctcctcccgatgggctctggcttgcaagtatcttggaggaagcacccaagttcctggccttcacatgcggcctcctgcgcagcgccctctataccctgggcattgagagcgtggtcaccgcctccgtggcagccctgcccgtctgtaagttccaggtggtgattccgaaatcctaaagcctgcctcgcacctgctgaaccgcactgatgcccctggccttcaccggcctcaggagacggtggggccgctgcatttcggggtggtcattttgggaatcccaggccctaggggtcacatttgctcaggaagtgggtatcaaattgaggtgggggtgtcagaggaggcaaaggggtcccagctgcggtcaggactgtggtgggattcccgcctcggcagcgtcactgcccaatagctgctcaataaaggctgtttttttggaaaaaaaaaaaaaaaaaaaaaaaaaaaaagttttgccttaaaggtc

SEQ ID NO: 22783 - DNA, 201 bp, Homo sapiens
  SIMILAR (4)..(99): 871254mologous to Homo sapiens calbindin D28K,accession number S46006,Smith-Waterman Score=155.
ggggacctcccctgggagatcaatcccctgtcctcctgctctttgctccatgagaaagatccacctacgacctcaggtcctcagaccaccagcccaagaaacatcacaccaatttcaaatccggaccccactggaaatcggactgtccaactcacctggcagccactcccagagcccctggaactctggcccaaggctctc

SEQ ID NO: 22784 - DNA, 522 bp, Homo sapiens; identical to SEQ ID NO: 638
  SIMILAR (337)..(468): 461254mologous to Human T-cell lymphotropic virus type 1 Gag,accession number S74562,Smith-Waterman Score=136.

SEQ ID NO: 22785 - DNA, 705 bp, Homo sapiens
  SIMILAR (292)..(627): 381254mologous to Human T-cell lymphotropic virus type 1 Gag,accession number S74562,Smith-Waterman Score=186.
atgactgatacacaagtaaacgagcagacaatagaaactgccaatccatctgaccttgcccctcctccccaggctgctcctcaccaggccaagccaggtcccaattcttcctcaacctccactctcccaccctataatgcttctatcacctcacctcttcacacccagtctggcttacagtttctttctacccagagggaccagaaggccatcttattctcaatatgtattttattacccaatccactcccaacattagaaaaagctccaaaaattagattccgccctcaaaccccacaacaggacttaattaaccttgccttcaaggtgtacaataatagagaagaggcagccaagcggcaatgtatttctggattgcaattacttgcctccgctctgagagaaaccccagccacatctccagcacacaagaacttcaaaacgcctaaaccacagtggccaggcattcctccaggacctcctcccccaggatcttgcttcaagtgccggaaatctggccactgggccaaggaatgcccgcagcccaggattcctcctaagccgtgtcctatctgtgcaggtccccactcgaaatcggactgtccagcttgcccaaaagccactcccagagcccctggaactctgccccaaggctctctgactgactccttcccagatcttcttggcttagtggctgaagactga

SEQ ID NO: 22786 - DNA, 462 bp, Homo sapiens; identical to SEQ ID NO: 10181
  SIMILAR (1)..(81): 811254mologous to Homo sapiens Human secreted protein, SEQ ID NO: 5576,accession number G01495,Smith-Waterman Score=99.

SEQ ID NO: 22787 - DNA, 505 bp, Homo sapiens
  SIMILAR (217)..(327): 831254mologous to Homo sapiens Human secreted protein, SEQ ID NO: 5576,accession number G01495,Smith-Waterman Score=154.
atggccttgggtgaacatagtcagaagtcagggagtggtgacaacagaccttgggcaagggccagcactgtgctggcttcaggtctgacccagcacagtgatagtggtggaggccacagggctgcttgtgtcactccatccccagctgtaggtggctcaggagagagagagagagagagagagagagagagatatgctcgatatgtttgggaaaaagcttccgaggcgatcgggcagtgtcactcttcagctgctaagccaagaagatctgggaaggagtcagagagccttgggccagagttccaggggctctgggagtggctgccgggcgagttggacagttcgatttccagtgggaaaatgaaaggaattgaaattaagagaatggagagattgaagtgtggcgccaagattgaaaggagaaagaggttgagggatagtgaggagaggttgagggatagtggagaagagaataaaaagaggccacttacgggatttaaaattg

SEQ ID NO: 22788 - DNA, 1156 bp, Homo sapiens
  SIMILAR (328)..(459): 881254mologous to Homo sapiens calbindin D28K,accession number S46006,Smith-Waterman Score=211.
atgtggaaaggccccaaaggattagacatgtatggaaagagctcagtgagccctaagacatcagatatactggggagagacactctcctgctggccttgaaggtgcaaacagtggtgttgcaaactgcctgtggagagggccatgtggcaggaaactgtgggaggcctctagaaactgaaggcagtctccagctgacagctactaagaagctaagggactcagtcctgcaaccaaaaagtcctgaattctgccaacaatttacaagagcttggaataggacccaagttccagatgagactgaagccccagctggcacctatgcagcccaatcgggggacctcccttgggagatcaatcccctgtcctcctgttctttgctccatgagaaagatccacctacggcctcaggtcctcagaccgaccagcccaaggaacatctcaccaattttaaatcgggtttcagaggtgtcagaccacgcagggacgcctgccttggtccttcacccttagcggcaagtcccgcttttctggggaaggggcaagtaccccaaccccttctctctgtgtctctaccccttctccgcctttctggggggcaagaaacacccaaccccttctccttcaccctgagtggcaagtccgcttttctagaggagcaagtaccccaacctcgtatctctgtgccccagtcccttatttccacgccccgacctcttatctctgtggcccaatcccttatttctgcaccccaacctcttatatctctgtgccccaatcccttatttccatgccccgacctcttatctctgcaccccaaccccttatttccacgacccaacccctttcccgcttttctggaaggagcttgctacaagtgccagaaatctggccaccaggccaaggaatgcctgcagcccgggattcctcctaagctgcgtcccatctgtgcgggaccccactggaaatcggactgtccaactcacctggcagccactcccagagcccctggaactctggcccaaggctctctgactgcttcccagatcttcttggcttagcagctgaagactgacactgcccgatcgcctcggaagccccctacaagaccatcacggacgctgagcttcaggtacacatccagatggccggttcctg

SEQ ID NO: 22789 - DNA, 411 bp, Homo sapiens; identical to SEQ ID NO: 447
  SIMILAR (109)..(222): 861254mologous to Homo sapiens Human secreted protein, SEQ ID NO: 5576,accession number G01495,Smith-Waterman Score=172.

SEQ ID NO: 22790 - DNA, 679 bp, Homo sapiens; identical to SEQ ID NO: 15048
  SIMILAR (235)..(2): 751254mologous to Homo sapiens Npw38-binding protein NpwBP,accession number AB029309,Smith-Waterman Score=308.

SEQ ID NO: 22791 - DNA, 1021 bp, Homo sapiens
  SIMILAR (151)..(783): 791254mologous to Cloning vector pZC320 SopA,accession number U26464,Smith-Waterman Score=871.
atgaaactcatggaaacacttaaccagtgcataaacgctggtcatgaaatgacgaaggctatcgccattgcacagtttaatgatgacagcccggaagcgaggaaaataacccggcgctggagaataggtgaagcagcggatttagttggggtttctctcaggctatcagagatgccgagaaagcagggcgactaccgcacccggatatggaaattcgaggacgggttgagcaacgtgttggttatacaattgaacaaattaatcatatgcgtgatgtgtttggatctggctctgaaggggctacgtgttttgctcgtggaaggtaacgacccccagggaacagcctcaatgtatcacggatgggtaccagatcttcatattcatgcagaagacactctcctgcctttctatcttggggaaaaggacgatgtcacttatgcaatatatttcacttgctggccggggcttgacattattccttcctgtctggctctgcaccgtattgaaactgagttaatgggcaaatttgatgaaggtaaactgcccaccgatccacacctgatgctccgactggccattgaaactgttgctcatgactatgatgtcatagttattgacagcgcgcctaacctgggtatcggcacgattaatgtcgtatgtgctgctgatgtgctgattgttcccacgcctgctgagttgtttgactacacctccgcactgcagtttttcgatatgcttcgtgatctgctcaagaacgttgatcttaaagggttcgagcctgatgaccccactggaaatcggactgttcaactcacctggcagccacttccacagcccctggaactctggcccaaggctctctgattgactccttcccagatcttcttggcttagcggctgaagactgatgttgccggatcgcctcggaagctgttgcaaggacagcaccaagccatgggggatctgctcccattacccaaacacctcccacaggccccacctgcagcactggggaccacat

SEQ ID NO: 22792 - DNA, 1124 bp, Homo sapiens
  SIMILAR (752)..(621): 531254mologous to Human T-cell lymphotropic virus type 1 Gag,accession number S74562,Smith-Waterman Score=158.
atgatacagctgctcaactggggcctgctctgttgccatttatcagcaaatcctcttggtaaaaagtggttgtatgcagcacaaatttcagaggtaaaatggattggattttcggatgcactgtatgggaaatatgagagaaagagacaaggaaaagttattgccaaggattttgatatagtgaagccaatagatcaggagacaattgcatttaaacgagagttaattattcacagttcccaagaggaggggaaaatgccataccatgcagagccacaatacagagaatactcaggtcagttgcaggcaggacatcagaacttcaggttctcagaccttcagactcagggatttacaccagtgcccccaactccaccttgcccccattctcaggtctttggccttggactgagagttacaccattggttcccttcagactgaattacaatactagctctccagtttctccagctttcagatggcagattgtgggactccttggcttccataattatggggcttccgaggcgatcgggcagcatcagtcttcagtcactaagccaagaagatctgggaaggagtcagtcagagagccttgggccagagttccaggggctctgggagtggctgcctggtgagttggacagtccgatttccagtgaagtcccacacagatggggcacagcttaggaggaatcctgggctgcaggcattccttggcccagtggccagatttctggcacttaaagcaagatcctgggaactgcctatagtcattgggatctatagagaactgctctaatgccttcctggagggatggctcttgaagcaggcagttatcagcgtgagattgggctgcagcaaaaactctttcccattcatcctgactatgccttcagttccagccaccgctctaagaggaaattgttgggcaggtgggggagggctagtctcagaatgaaactgtaagctgaaccaggtgtgcacaggggaggtgatagaaggattatagggtggaggagcagaggccaaggaagaatcggagcctgatttagcttggcggggagcgacctgaagaggagcagtcagatgcagatgcctagccttgatctttccagccat

SEQ ID NO: 22793 - DNA, 1290 bp, Homo sapiens
  SIMILAR (1)..(459): 1001254mologous to Salmonella typhi RcsB,accession number AB000683,Smith-Waterman Score=749.
atgcctggcgataagtacggcgatggcattaccttaatcaagtacatcaagcgccatttcccaagcctgtcgatcattgttctgactatgaacaacaacccggcgattcttagtgcggtattggatctggatatcgaagggatcgtgctgaaacaaggtgcaccgaccgatctgccgaaagctctcgccgcgctgcagaaagggaagaaatttaccccggaaagcgtttctcgcctgttggaaaaaatcagtgctggtggttacggtgacaagcgtctctcgccaaaagagagtgaagttctgcgcctgtttgcggaaggcttcctggtgaccgagatcgctaaaaagctgaaccgcagtattaaaaccatcagtagccagaagaaatctgcgatgatgaagctgggtgtcgagaacgatatcgccctgctgaattatctctcttcagtgaccttaagccagataagacgcgttagtgtcttatctggcatttgcaccgattgccggatgcggcgtaaacgccttatccggcctacgattcccattatttcaacaaattacattaaagtaggccagataagacgcgtcagcgtcgcatctggcatttgcgctgaatgccggatgcggggtaaacgctttatcgtcctaggaattccgggatttctggacctctcggggtataacgcagcgtctgggaagcgccaaagcttgcatgcctgcagccgcgtaacctggcaaaatcggttacggttgaaacgttttccttcaattcatgggccttttaatgaagcttcacaagaagcggcgcgtcgtaagtcgattgagaaagagctggaatgggtacgtcaaggtactaaaggccgtcagtcgaaaggtaaagcacgtctggcgcgctttgaagaactgaacagcaccgaatatcagatcactgtattacacacaggaggaaaatcagagttaggaagggggcttccgaggcgatcgggcagtgtcagtcttcagccgctaagccgagaagatctgggaaggagtcagtcagagagccttgggccagagttccaggggctctgggagtggctgccagatgaatcctctgtctggccggccccaggttgtctgcttctttactgcacacatgttgacaaagaaaagggaagaaggagcctccatgttgaacatgccttgcttccagtgaaaggaagagatgatccaagcaaatttaggaccaatagcagactcttcacactgcctggggatagagggaccaccctgggctcctcttactcctgg

SEQ ID NO: 22794 - DNA, 726 bp, Homo sapiens
  SIMILAR (289)..(516): 841254mologous to Mus musculus Similar to ribosomal protein S12,accession number BC002079,Smith-Waterman Score=341.
atgccttctgtccgcactggagacccaatcattctacatgctcatacactcaacccagcagtgtggctcgcatgggctgtggagggagagggttccctgacactcaacatctggatctgcccatggcagatcgagccactacggcatcttgcctataccccaggctctgatgccacctcactgactgtgccaacccgagtgattagccctctttgtgtggactcatggttgttcactgatcctcttatgaaaactcatgcaccagaaagaacatttctctctttccctgctgccgccaagcgccaagcccacctttgtgtgcttgcatccaactgtgataagcctatgtatgtcaagttggtgaaggcccattgtgctgaacaccaaatcaacctaatcaagggtgatgacaacaagaaactaggggaatgggaaggcccctgtacaattgacagagaggggaaaccctgtaaagtggttggttgcagttgtgcagtagttaaggactatggaaggagtctcaggccaaggatgtcatcgaacagtacttcaaatgcaagaaatgaagaactaaatctttgcctcacacatggaaagaaaagaaaaaagaaaaagagagagagaaagaaggaaagaaagaaaagaaagaaagaaagaagaaagaaagaaagaagaaagaaagaaagaaagaaagagaaagaaagaagaaagtcaacgtgtttctga

SEQ ID NO: 22795 - DNA, 869 bp, Homo sapiens
  SIMILAR (321)..(476): 921254mologous to Mus musculus Similar to ribosomal protein S12,accession number BC002079,Smith-Waterman Score=255.
  misc_feature (1)...(869): n = a,t,c or g
cgccgagtcgcgcggaggcggaggcttgggtgcgttcaagattcaacttcacccgtaacccaccgccatggtcgaggaaggcattgctgctggaggtgtaatggacgtgaatactgctgtacaagaggttctgaagactgccctcatccacgatggcctagcacgtggaattcgcgaagctgccaaagccttagacaagtacgtgtatcagtctcaatactgtgggttcttgcaaccggaacaaaactgccacccaagggaagaaggcatggagttcatggtgttagcgcaaaagttctgaatggcatccgtcctaccggaaacctaggaaaaggcgccaagcccatctttgtgtgcttgcatccaactgtgatgagcctatgtatgtcaagttggtggaggccctttgtgctgaacaccaaatcaacctaattaaggttgatgacaacaagaaactaggagaatgggtaggccttttgtaaaattgacagagaggggaaaccccgtaaagtggttggttgcagttgtgtagtagttaaggactatggcaaggagtctcaggccaaggatgtcattgaagagtatttcaaatgcaagaaatgaagaaataaatctttggctcacnnnnnnnnnnnnnnnnnnnnggggggcccgtttaaaagaacccttggggggcccaaattttacccggcattgcaaggcataacttttttccttatggggggccattttaaaccttacttgggaattttggaaaagaacctttttttttggggggggacaaattgggacaacctccctccaaaatttaaaggttctagggaaaataaaaaattttaaggggaaaagggggtaaacctaccgccttt

SEQ ID NO: 22796 - DNA, 613 bp, Homo sapiens
  SIMILAR (172)..(528): 441254mologous to Xenopus laevis ribosomal protein S12,accession number L32600,Smith-Waterman Score=145.
  misc_feature (1)...(613): n = a,t,c or g
cgcgctgcaggaattcggcacgagccgagtcgcgcggaggcggaggcttgcggtgcgttcaagatttcaacttcaccccgtaacccccaccggcccatggcccgaggaagggcattgcctgcctggagggtgtaatgggaccgttaaatacctgcttttaccaggaggttcctgaagactggccccctcatccccacgatgggcctagccacgtgggaattccgcgaagcctgcccaaagcccttagacaaggcgccaagcccatcctttgtgtgcttgcatccaacctgtgatgagcctatgtatgtcaagttggtggaggccctttgtgctgaacacccaaatcagacctaattaaggttgatgacaacaaggaaactaggagtaatggttaggcctttgtttatattgacagagaggggaaacccccgtaaaagtggttggttgcaagttgtgtagtagttaaggactatggcaaggagtcttcaggccaaggatgtcattgttagagtatttcaaatggcaagaaatgaaagaaataaatctttggttcacnnnnnnnnnnnnnnnnnnnnngggggggctctttaaaggaacccaattatactaccct

SEQ ID NO: 22797 - DNA, 552 bp, Homo sapiens
  SIMILAR (20)..(367): 991254mologous to Homo sapiens TIP3,accession number AB000734,Smith-Waterman Score=613.
ggctggccccttctgtaggatggtagcacacaaccaggtggcagccgacaatgcagtctccacagcagcagagccccgacggcggccagaaccttcctcctcttcctcctcctcgcccgcggcccccgcgcgcccgcggccgtgccccgcggtcccggccccggcccccggcgacacgcacttccgcacattccgttcgcacgccgattaccggcgcatcacgcgcgccagcgcgctcctggacgcctgcggattctactgggggcccctgagcgtgcacggggcgcacgagcggctgcgcgccgagcccgtgggcaccttcctggtgcgcgacagccgccagcggaactgctttttcgcccttaactgtatctggagccaggacctgaactcgcacctcctacctcttcatgtttacatatacccagtatctttgcacaaaccaggggttgggggagggtctctggctttatttttctgctgtgcagaatcctattttatattttttaaagtcagtttaggtaataaactttattatgaaagttttttttt

SEQ ID NO: 22798 - DNA, 1702 bp, Homo sapiens
  SIMILAR (1580)..(846): 1001254mologous to Homo sapiens C protein,accession number M16342,Smith-Waterman Score=1235.
ttttttttttttttctccaaattcctggggtaataaggacttgtttattttgaggaaaaaaggtcccaaacatcaggctgttcacaaaaataacccacagtatcaactttagaaaacaaatcttaagactataacactaattatttttctagaggatgcatttgacatgccaactctcattcacaaaaatacattgttacatttgtgttgaactgccccacacagcacactaatgtgagggtgtaacacacatacttctaactcaaagctgctttcaagagctactcaactaaatgagattgcctttgcagttagggaagcaactactgaacttatgtatgaatgaaaagaactgtactccctgcataacaagagattattttggagacagttgataaaaaccatacatcctttttattgttaagtcataaagaggtatcaaaattaaaagcaaaaattacagggtaagacttaacaaaactacgtaggagcgtcaaaggaagtgaaaattgggacttaggcgcggggccaatatgaatttaatgaacatgggaaggacaaggatggggagaacaagtgaagcatgtgctgaagatactaggggagaggatctggtgaaaaatttgaatcttagacaagcgcctaggtaaaggaaataatgggataagatttctaaaccccaactatgtgcttaaggagtcatcccctcccattggcgctggtctctgtcatcctctcctttcctcagccttctttttcatcatccttgatcaactccagctggtcatccccccgatcttcattatcatcatcatccagtaggtccccctcctcaggcagagtcaatctgcacccccctcagactccatcttcacattagtctcatctttcttcacggagctgctgctctgctcctcttctgacttatcattcttcatctctactgcttgtttgctctgttccttttccattttttccaggttttccaggagagaatccactttttgttttatctgggtcagctccttcttaatggcctgaaggtcatctcctttcaactttccagacttggaagatccccgctgtccactcttagaattgaagccacttttgccccttcgtgaagtgtttcctgatacacgctgacgtttcgagggcactacagcccgagcaataggaggaggaggaggtacacgtgctgggtaactgtacatcctatcataatagtcccgttgaaagtcatagtccaagtcaaaagaggagccgtacatctccgctgcagatcgtttcacacctgcttttcctcggttcacttttggctctgcagccaggttaatatctaaaacctggccagcaatcattctgccatcctctcctgctacagcagcccgggcatttctctcattaacatactgaacgaaggcaaagcccttatgaacagagcagcccacaattttgccatacttcgaaaagattgcctccacatcagatttcttgaccacaagagtgttgagattcccaatgaatacacgggagttcatggagcgaggatctgtcttgttggtaacgttgctggccatcgtgtttgatggtaaggtttctcacaaagccgaaaatgtagctgaagatcaaaaaaatctcacaagaaggggagggagaagagattcgattctgagtctcctactcccgggtttggaattcc

SEQ ID NO: 22799 - DNA, 1473 bp, Homo sapiens
  SIMILAR (474)..(1001): 401254mologous to Homo sapiens TIP3,accession number AB000734,Smith-Waterman Score=211.
  misc_feature (1)...(1473): n = a,t,c or g
atgtgcttaagagtcatcttcaccattggtgctgtctctgtcatcctctccttcctcagcctctttttcatcatccttgatcaactccagctggtcatcccccaatcttcattatcctcatcatccaacttggaagatccctatagtgagtcgtattatgcggccgcgcggaggccggactccgcctccaccgagcccccacccgccgggaagagctccgcggagtacagagcccattttctagctgtgtccactgaggctgaacggatccgcgcggacttggtgctccgtgctcgccccctagggccggcgcacccccggacgctatggcccacccctccggctggccccttctgtaggatggtagcacacaaccaggtggccagccgacaatgcagtctccacagcagcagagccccgacggcggccagaacctttccctcctcttcctcctcctcgcccgcggccaccgcgcgcccgcggccgtgccccgcggtcaccggccccggcccccggcgacacgcacttccgcacattccgttcgcacgccgattaccggcgcatcacgcgcgccagcgcgctcctggacgcccntcggattctactgggggcccctgagcgtgcacgggggcgcacgaaccgctgcgcgccgagcccgtgggcacctttccggtgcgcgacagcccgccagcggaactgctttttcgcccttagcgtgaagatggcctcgggacccacgagcatccgcgtgcactttcaggccggccgctttcacctggatgggcagccgcgagagcttcgactgcctcttcgagctgctggagcactaccgtggcggaagccgcgccgacctgctgggggcaacagctgcgccagcgccgcgtgcggccgctgcaagagctgtgccgccagcgcattcgtcggccacccgtgggcccgcgagaaccctggctcgcatccccctcaaccccgtcctccgcgactacactgagctccttccccttccagatttgaccggcagcgcccgccgtgcaccgcagcattaacctgggatgccgtgttattttgttattaccttgccttggaaaccatgttgggtacccctccccggcctgggttggagggagcggatggggtgtaggggccgagggcgcctcccgccctcggctggaagacgaggccgcagaccccttctcacctcttggagggggtccttccccctcctggttgcttcctctggggtcccccctggtttgtttgtaagcaagcttaactgtatctggagccaggacctgaactcgcacctcctacctcttcatgtttacatatacccagtatcttttgcacaaaccaggggtttgggggagggtctctggcttttaattttctgctgtgcaaaatcccattttataattttttaaagtcagtttagggaataaactttattatgaaagtttttttttttaaaaaaaa

SEQ ID NO: 22800 - DNA, 1552 bp, Homo sapiens
  SIMILAR (180)..(1136): 661254mologous to Oryctolagus cuniculus heterogeneous nuclear ribonucleoprotein C,accession number AF061582,Smith-Waterman Score =898.
  misc_feature (1)...(1552): n = a,t,c or g
tcgaagactgagcggttgtggccgcgttgccgacctccagcagcagtcggcattctctaacgcagaaacccgggagtaggagactcagaatcgaatctcttctccctccccttcttgtgagatttttttgatcttcagctacattttcggctttgtgagaaaccttaccatcaaacacgatggccagcaacgttaccaacaagacagatcctcgctccatgaactcccgtgtattcattgggaatctcaacactcttgtggtcaagaaatctgatgtggaggcaatcttttcgaagtatggcaaaattgtgggctgctctgttcataagggctttgccttcgttcagtatgttaatgagagaaatgcccgggctgctgtagcaggagaggatggcagaatgattgctggccaggttttagatattaacctggctgcagagccaaaagtgaaccgaggaaaagcaggtgtgaaacgatctgcagcggagatgtacgggtcagtaacagaacacccttctccgtcccctctactcagctcctcttttgacttggactatgactttcaacgggactattatgataggatgtacagttacccagcacgtgtacctcctcctcctcctattgctcgggctgtagtgccctcgaaacgtcagcgtgtatcaggaaacacttccacgtagtggcccacgtggcttcaattctaaggagtggaacagcggggtatcttccaagttctggaaaaggtgaaagggagatgaccttcagggccattaagaaggagcatgacccagataaatcaaaaaggtggattctctcctggaaaacctggaaaaaattgaaaaagcgaccggggcaaacaagcagttagagatgaaggaatgattaagtcagaagaggagccagagcaccagctcccgtgaagaaagaatgagactaaatttgaagatggagtctgaaggggggtgcaaaagaactctgcctgaggaggggggaccctactgggatgatgatgatgaataatgaaagatcgggggggatgacccagctgggagttgatcaaaggatgatgaaaaaagaggcttgaggaaggagaggatgacagaggacagcgcccaatggcgagggatgactcttaaggcacatagtcgggcttaagaaatcctaatcccatttatttcttttaccttaggcgcttgtcctaagattcaaatttttcacccagatcctctcccctaagtatctttcagcacatgcttcactgttctccccatcccttgtccttccccatgttcattacattcatatttgccccgnggcctaagtcccattttcactcctttgggaggctccctagtagttttggttaagtcttaccctgtaattttctgcttttaattttgatacttctttatgacttaacttattataaaggatgtatggtttttaaaaaaaaaaaaaaaaaagggcggccgctcgcgatctagaactagagcggttgtggccgcgttgccgacctccagcagcagtcggcttctctacgcagaacccg

SEQ ID NO: 22801 - DNA, 348 bp, Homo sapiens; identical to SEQ ID NO: 619
  SIMILAR (52)..(306): 871254mologous to Homo sapiens Human secreted protein, SEQ ID NO: 4696,accession number G00615,Smith-Waterman Score=402.

SEQ ID NO: 22802 - DNA, 3758 bp, Homo sapiens
  SIMILAR (2167)..(2469): 251254mologous to Homo sapiens FLJ00068 protein,accession number AK024475,Smith-Waterman Score=60.
atggtccaggatttcagaaggggcctgagcgccgtggtcagccaggctgagtgcagggagggagagctggccaggtggacccgctcgtccgagttgtgcgagacggtgagcagctggatggggcccctggacccggaggcttgtccctcctcacccgtggctgagtgtttgaggagctgtcaccaggaggctacctcggtggctgcagaggccttccccggggcaggggcaggggccaccacggcccacctggaggacagctctgcctgttcctctgagcccacccagaccctggccagccgccccaggaaacatccccagaagaaaatgataaagaaaacgcaaagtttcgagatacctcagcccgacagtggccccagggactcctgccagccagaccatactagtgtcttcagcaagggcctggaggtaaccagcactgtagccacagagaagaagctcccgctgtggcagcatgccaggagccccccggtcactcagagccggagtctgtcctccccctcggggctccaccctgctgaggaggatgggaggcagcaggtgggcagcagccgactgaggcacatcatggccgagatgatcgccacagagagggagtacattcggtgcttaggatacgtcattgacaactattttccagaaatggaaagaatggacttgccccagggccttcgagggaagcaccacgttattttcggcaacttggagaagctccacgacttccaccagcagcacttcctccgggagctggagcgctgccagcactgccccttggccgtgggccgcagtttcctgagacacctgataggccagaagcagttcccagaatcaccttccggggagaggccaggcctcacctcttcacacgccccctgcccctggatgccccattacctgccagagggaccagcctgtcccgttctgagaattccctgtgaggctttcaactggaagcacgttgaatgtacagacccagtggtctctcctcccaagcagtcgcctctgcttttccaggaagagcagtttgggatgtacgtgatctacagcaaaaacaagccgcagtcggatgccctgctcagcagccatggcaacgccttcttcaaggtcatccccctcggcccgccccccacagcctgcccggccctcagccaggccggagctgaccctctcacccggcccttgcaggacaagcagcgggagctaggtgacaaaatggacctggcctcctacctgctgcggcccgtgcagcgtgtggccaagtacgcgctgctactccaggacctgctcaaggaggccagctgtggcctggcccaggggcaggagctgggcgagctccgagccgccgaggtcgtggtctgcttccagctgcgtcacggcaatgacctgctggccatggacgccatccgcggctgtgacgtaagtgcctcagacgctggcagctcaggcaagctgggggaatttgaggctgctgctaacattaaggcggatttgccagattttatggcagtttggctgctgttccgtcttgtcacgaagctaacacatttagacggagacagtgacctgtgccaccacagacgccggattttcttggatgaaatccacctgtgtgttcctctgcaggtgaatttgaaggaacaggggcagctgagatgccgggatgagtttatcgtttgctgcgggaggaagaagtatctgaggcatgtgttcctctttgaagacctcatcctgtttagcaagacccagaaggtggagggcagccacgacgtctacctgtacaagcagtccttcaagcctggcggctgcgaacaccaccttcacagcaaccaccccccaccccagaccttctcccacactgagctccaactccagagtttgttgtctgtggaaggtatccgagtgaccggcggcaaatctgtacaggtctgcagcaacctcagttcttacctcctccgaagaaagaatttgactgagggatgttggacacgccgtttccaaggcctcatggcttcctttttcttggttactgcctcgggctccctgggagagatctctttggtgccgaaaaccggaatgggaagcctcagcaccctggccccccatgcccctcgtggggcaggaactcagaatccaagaaatggcatcatgggtataggcaaccagccattcatggatgtcaagcccagagaccggacccctgactgtgcagtgataagcgaccgggctcccaaatgtgcagtgatgagcgaccgagtccccgacagcatcgtcaagggcacagagtcacaaatgagagggtccacagcggtgtcctcctctgaccacgccgcccccttcaagcgaccacactccaccatctcagacagcagcacctcctcttctagcagccagtcctcctccatcctggggtcgctgggcctgcttgtgtcctccagcccagcccacccgggcctatggagccctgcccacagcccctggtcatctgatatcagagcctgcgtcgaggaagatgagccagagccagaactagagacgggcacccaggctgcagagccccctgccaggtgctctgaccacaggaaacaggagccctcagggccactgccagaggacggattctgctgccaaccagaggtcctggggctggcggcgctggtgtgcctgccctgggccttcagcagcccccataaggagaaagctccagcctcccgttcagagaaggctccatcctggggacacgcctctcccaagcctctgtctcatggccgtgaccctccaaagcccatggacacgtggtgccctgtagtgatgtgtgcagtgatgtgtgcagcgatgtgtgctgaccctgccctgagtggcagtgtcacggggagagaagctctggtgtcccacccccaggtggcccggcagagcctggacagcgtggcccacaacctctacccactcctgttcaaagccagctacctgctggagcaggcggaggtgacgcgcgcggtgctggggcgctggcccctggaggagttccggctgggagcgctgctgggtcctggtgccgaccacccccaggacctgcgcgacagaacctgcagggcctgcctggaggcgctggtgcgcggcctcgcggaccacgtgctgcaggaccggagccgccggcggctgcgggtggctgacctcacgggcatccgagatgtgcaggtgcagcggtgcccgtgcgggagggcgctgggcaggtggggccgcacccagctgctggccaggacctgctgtgagctgcaggcagagcccctcgcagccgggcgccccgtcgaggtcctcgccgacctcttcgtcactgagggcaacttcgaggcggtggtgcaggctctgaggccagcgggcccggcccctctgcgggtgcactgcccctcgttccgggcggacagcctgagccccagccagctcctgcacgtgctgcgtctggctggcccgggtgccctgcgcaagctggaggtggtgcacaacgtgcggctgcatgcgggccacgtgcagcagcttctggcccaggtgggcttcccccggctggcctcgctcaccctgcccaccaaggcctttgatgcaccccccacctacgcctccactcccgacggcgaggaccccctcctcgcctccatcgcccgggagctcagcaagatggcgcagctcactgagctcagtgtggccttctccacgctgaccgggaagatcccgacgctgcttgg

SEQ ID NO: 22803 - DNA, 574 bp, Homo sapiens
  SIMILAR (98)..(262): 431254mologous to Gallus gallus succinate dehydrogenase Fp subunit,accession number AF095939,Smith-Waterman Score=102.
  misc_feature (1)...(574): n = a,t,c or g
ctgaagctgcagaacttgatgctatgtgcactgcaacccgtcaatggagcagagctgggcaaggagtcacggggcgcccatgccagggaagacttccaaggtgcggattgaggagtacgattactcccaagcccattccagggggccaccggaagaagccccttttaggagcactggaggaagcacaccctgtcctatgtggaacgttggcactgggaaggtcactctggaatatagacccgtgatcgacaaaactttgaacggaggctgactgtgccaccatcccgccagccattcgctcctactgatgagacaagatgtggtgatgacagaatcagcttttgtaattatgtataatagctcatgcatgtgtccatgtcataactgtcttcatacgcttctgcactctgggggaagaaggagtacattgaagggagattgggcacctagtgggctggggagcttgccaggggacccagtgggccagggagcgtnggcacttacctttgtcccttgcttcattcttgtgagatgataaaactgggcacagctcttaaataaaatataaatgaac

SEQ ID NO: 22804 - DNA, 5769 bp, Homo sapiens
  SIMILAR (2034)..(2348): 521254mologous to Homo sapiens FLJ00068 protein,accession number AK024475,Smith-Waterman Score=278.
ctgtgcaggcaagcacatagttaaaactgaaggaaaaatttcttgaataaaagtagttaacgtttttattctttacttcaaggtatatctccatggaataacctaaatgatcccccaaattgggaatatccgggcctaattccggggcggatgggtgggtgatgggaagcaggtgggaattatggccctgttgggttccaatgctggggattgggctgcttttcgttggatttggtctaggggagtcccagaaagaagtagaaaaagagagagaagcctaccgtcgggagaactgctgcttttcaacaggatctggtaagccaagttaccacggccatgattcttaagaaaatcggcgtgctgtcgctcagttgtccttggaactcgaaaaggaacaaaacagaactgctagttaccgaggaagcccttatctctcagggacgcaagttggtagaagaaaagaagcttctggaacaggaacgggcccaggacaagtgtaccttgagagctgctgccgccgcctggatgtttgctgggtgagctccagattcacgggagccctttgtgccagcatggccgccccaaccccatggggaaagcagatctccctcacctgggaatctggcagagacctcaggcagtgccccatctttcatgacctgcctggtccagacgccggatgtgtggccacagacgccatgcgacccaggactggagtcacaagattgggcgaggacaaagacccagcgaatggtgaacggccatgcaggatggggccgatcagttcagtaggagcaaggcaacagaagaagccctttgaggagcactggaggaagcacaccctgtcctatgtggacgttggcactgggaaggtcagtgtggagctcgttctcaccacagcccagcacccacacggccccgcccaggcctgcgggctggccttgctgatggtgaacggggaagagcaggccagatttaaatcaactcccgacagattcgaggcaccgctgaaaaaggcactccgacagcagtcgggcttcgggctggaaacagaatccagttcctgcagcattactgtgagctccgcctcccgacagcattaccgtgtgagctccgcccccgttagagcattactgtgtgagctccaccccctgccagagcattactggatggtggtctctgctgtagctttgtcccctggtgacgggactcaggcagcaacccccatcattggcaatacccccacctctgagaatgtggagaggacttgtgaagacaatgttgtcccaagcagcacagcccagggcagggcggttggactccggagcatgggcccagggcccggagcggtttctaagcgggtcgcgccgtttggcataggccaagtaactgggcctattttccgggtaaaggcccggttgctgggcctcgtgactccaagggccttctgcctgtgccctgcttctcggtggaagccacagactttcctgtcgtcctcggggctctggaatctgagggttgcccagcaatcctgccagaaaggactacagctggcgaaggagaacccgcaacgtacagaggaaatggtccaggatttcagaaggggcctgagcgccgtggtcagccaggctgagtgcagggagggagagctggccaggtggacccgctcgtccgagttgtgcgagacggtgagcagctggatggggcccctggacccggaggcttgtccctcctcacccgtggctgagtgtttgaggagctgtcaccaggaggctacctcggtggctgcagaggccttccccggggcagacctggccagccgccccaggaaacatccccagaagaaaatgataaagaaaacgcaaagtttcgagatacctcagcccgacagtggccccagggactcctgccagccagaccatactagtgtcttcagcaagggcctggaggtaaccagcactgtagccacagagaagaagctcccgctgtggcagcatgccaggagccccccggtcactcagagccggagtctgtcctccccctcggggctccaccctgctgaggaggatgggaggcagcaggtgggcagcagccgactgaggcacatcatggccgagatgatcgccacagagagggagtacattcggtgcttaggatacgtcattgacaactattttccagaaatggaaagaatggacttgccccagggccttcgagggaagcaccacgttattttcggcaacttggagaagctccacgacttccaccagcagcacttcctccgggagctggagcgctgccagcactgccccttggccgtgggccgcagtttcctgagacacctgataggccagaagcagttcccagaatcaccttccggggagaggccaggcctcacctcttcacacgccccctgcccctggatgccccattacctgccagagggaccagcctgtcccgttctgagaattccctgtgaggctttcaactggaagcacgttgaatgtacagacccagtggtctctcctcccaagcagtcgcctctgcttttccaggaagagcagtttgggatgtacgtgatctacagcaaaaacaagccgcagtcggatgccctgctcagcagccatggcaacgccttcttcaaggacaagcagcgggagctaggtgacaaaatggacctggcctcctacctgctgcggcccgtgcagcgtgtggccaagtacgcgctgctactccaggacctgctcaaggaggccagctgtggcctggcccaggggcaggagctgggcgagctccgagccgccgaggctcgtgctaacattaaggcggatttgccagattttatggcagtttggctgctgttccgtcttgtcacgaagctaacacatttagacggagacagtgacctgtgccaccacagacgccggattttcttggatgaaatccacctgtgtgttcctctgcaggtgaatttgaaggaacaggggcagctgagatgccgggatgagtttatcgtttgctgcgggaggaagaagtatctgaggcatgtgttcctctttgaagacctcatcctgtttagcaagacccagaaggtggagggcagccacgacgtctacctgtacaagcagtccttcaagagtttgttgtctgtggaaggtatccgagtgaccggcggcaaatctgtacaggtctgcagcaacctcagttcttacctcctccgaagaaagaatttgactgagggatgttggacacgccgtttccaaggcctcatggcttcctttttcttggttactgcctcgggctccctgggagagatctctttggtgccgaaaaccggaatgggaagcctcagcaccctggccccccatgcccctcgtggggcaggagtgcaccaggcctgtcgtcaaggacacgggtacggtggcctcggccccgccctcactcatcctgcagagggcactgggccagtggccgacatggagccccctgccaggtgctctgaccacaggaaacaggagccctcagggccactgccagaggacggattctgctgccaaccagaggtcctggggctggcggcgctggtgtgcctgccctgggccttcagcagcccccataaggagaaagctccagcctcccgttcagagaaggctccatcctggggacacgcctctcccaagcctctgtctcatggccgtgaccctccaaagcccatggacacgtggtgccctgtagtgatgtgtgcagtgatgtgtgcagcgatgtgtgctgaccctgccctgagtggcagtgtcacggggagagaagctctggtgtcccacccccaggtggcccggcagagcctggacagcgtggcccacaacctctacccactcctgttcaaagccagctacctgctggagcaggcggaggtgacgcgcgcggtgctggggcgctggcccctggaggagttccggctgggagcgctgctgggtcctggtgccgaccacccccaggacctgcgcgacagaacctgcagggcctgcctggaggcgctggtgcgcggcctcgcggaccacgtgctgcaggaccggagccgccggcggctgcgggtggctgacctcacgggcatccgagatgtgcaggtgcagcggtgcccgtgcgggagggcgctgggcaggtggggccgcacccagctgctggccaggacctgctgtgagctgcaggcagagcccctcgcagccgggcgccccgtcgaggtcctcgccgacctcttcgtcactgagggcaacttcgaggcggtggtgcaggctctgaggccagcgggcccggcccctctgcgggtgcactgcccctcgttccgggcggacagcctgagccccagccagctcctgcacgtgctgcgtctggctggcccgggtgccctgcgcaagctggaggtggtgcacaacgtgcggctgcatgcgggccacgtgcagcagcttctggcccaggtgggcttcccccggctggcctcgctcaccctgcccaccaaggcctttgatgcaccccccacctacgcctccactcccgacggcgaggaccccctcctcgcctccatcgcccgggagctcagcaagatggcgcagctcactgagctcagtgtggccttctccacgctgaccgggaagatcccgacgctgcttggccccctacagaccccgctgcgagtactggacctggccaactgtgccctgaaccacacggacatggccttcttggcagactgtgcccacgctgcccacctggaggtgctggacctcagtggacacaacctggtcagcctgtacccctcgaccttcttcaggctgctcagccaggcttcccggacgctgaggatcctgacactggaggagtgtggcatcgtagacagccacgttggcatgctgatcctgggcctgagcccctgccaccggctgcgccagctcaagttcctcgggaacccgctgtcggcccgcgccctccggcgcctcttcaccgcactctgtgagctccccgagctgcgctgcattgagttcccggtgcccaaggactgctaccccgagggtgccgcctacccacaggacgagctggccatgtccaagttcaaccagcagaaatacgacgagatcgccgaggagctgcgtgccgtgctgctgcgggctgaccgagaggacatccaagtctccacacctctctttggaagttttgacccagacattcaagaaacaagcaatgagcttggtgctttcttgctgcaagctttcaaaactgctctagaaaacttctccagagcactcaaacaaatagagtagttcctccactcgcaccagtgacaggtcttgcatttcagcctgcaggtgccccgggctttagtcctggatctgaggcttgggcccggcattcatccccaccaccaccaccaccaaaagcagttcttagtgaaaattgtaggcgagcctgttaagcgttgtagaagaggaagccttccaggagaggtgccatgcggtgccctttagtggcagcacggcaaggttctggagggcggggaagccaccaagagacagtgacagggtcagcgggggcagacgccacatggcaaagagcagagaagcccgggaggtgtgaggagtggccgacctggcctcagcgcatctgggcactgggcgcaagatgaagcttcagggggcagatgtgactgggctccacagcagggagggggaggggaagagagaacacatcacagaaactgcacaaaataagcagcccatg

SEQ ID NO: 22805 - DNA, 508 bp, Homo sapiens
  SIMILAR (9)..(248): 911254mologous to Homo sapiens thyroid receptor interactor,accession number L40357,Smith-Waterman Score=367.
ggcacgagaaagtaactaaacaggagcccacaagacggtctgccagattgtcagcgaaacctgctccaccaaaacctgaacccaaaccaagaaaaacatctgctaagaaagaacctggagcaaagattagcagaggtgctaaagggaagaaggaggaaaagcaggaagctggaaaggaaggtactgcaccatctgaaaatggtgaaactaaagctgaagagatccacatctctcgctcaactgttaatgtctcaacctccagaggcaccccacccagcacactgcacagaaaactgaatctgtagataacgagggagaatgaattgtcatgaaaaattggggttgattttatggatctcttgggaccaccttttaaaagctatttttaccaagtattttgtaaatgctaattttttaggactctactagttggcatacgaaaatatataaggatggacattttatcgtctcatagtcatgctttttggaaattacatcatcctcaagt

SEQ ID NO: 22806 - DNA, 631 bp, Homo sapiens
  SIMILAR (39)..(335): 981254mologous to Homo sapiens Human TR-interacting protein S239a,accession number W92388,Smith-Waterman Score=515.
agctgcagcggcagaggcagcatccagcggcggcgccagcagttccagtccgttgctttactttttgcttcaccgacatagtcattatgccgaagagaaagtctccagagaatacagagggcaaagatggatccaaagtaactaaacaggagcccacaagacggtctgccagattgtcagcgaaacctgctccaccaaaacctgaacccaaaccaagaaaaacatctgctaagaaagaacctggagcaaagattagcagaggtgctaaagggaagaaggaggaaaagcaggaagctggaaaggaaggtactgcaccatctgaaaatggtgaaacttaaagctgaagagatccacatctctcgctcaactgttaatgtctcaacctccagaggcaccccacccagcacactgtcagtaaaggggcagattgaaacagtgagagttaagggcacagaaaactgaatctgtagataacgagggagaatgaattgtcatgaaaaattggggttgattttatgtatctcttgggacaacttttaaaagctatttttaccaagtattttgtaaatgctaattttttaggactctactagttggcatatgaaaatatataaggatggacatttaaaaa

SEQ ID NO: 22807 - DNA, 473 bp, Homo sapiens
  SIMILAR (63)..(206): 1001254mologous to Homo sapiens thyroid receptor interactor,accession number L40357,Smith-Waterman Score=250.
cttcgtcgtgccctgcgcgtgagcagctgcagcggcagaggcagcatccagcggcggcgccagcagttccagtccgttgctttactttttgcttcaccgacatagtcattatgccgaagagaaagtctccagagaatacagagggcaaagatggatccaaagtaactaaacaggagcccacaagacggtctgccagattgtcagcgtatttgtgtaatttaaattatctttgcagaaacctgctccaccaaaacctgaacccaaaccaagaaaaacatctgcttaaggtaaggaagtgctgtttcccacttttggctttttaaacaatgaataaattattaattcccttaccttcaggaattcattccaaaggaaagggccgtatttaatgatccaaactgaaaccattaccactgttacgggcttgcttaaaggcataaagcacagttttctgcgttaataggagtgtgttt

SEQ ID NO: 22808 - DNA, 671 bp, Homo sapiens
  SIMILAR (31)..(339): 991254mologous to Homo sapiens thyroid receptor interactor,accession number L40357,Smith-Waterman Score=530.
gcgcccacgcgtccgccagcggcggcgccagcagttccagtcctttgctttactttttgcttcaccgacatagtcattatgccgaagagaaagtctccagagaatacagagggcaaagatggatccaaagtaactaaacaggagcccacaagacggtctgccagattgtcagcgaaacctgctccaccaaaacctgaacccaaaccaagaaaaacatctgctaagaaagaacctggagcaaagattagcagaggtgctaaagggaagaaggaggaaaagcaggaagctggaaaggaaggtactgcaccatctgaaaatggtgaaactaaagctgaagaggtactttccataaatacctcccacttgattgaatcagtgtctttaaagaaatttctcaaatccttcagccggtgatagcacgttcttaatgtctctttttattgcctgtaatgttattgcagatccacatctctcgctcaactggtaatgtctcaacctccagaggcaccccacccagcacactgtcagtaaaggggcagaatgaaacagtgacagttaagggtacagtaaaacaatctgcatgtttgccgcgactcgaatcacaaactaactggggccgctctttctctcctctcctcttcacacatccgagacctctccacgggcggacc

SEQ ID NO: 22809 - DNA, 894 bp, Homo sapiens
  SIMILAR (92)..(568): 561254mologous to Homo sapiens Human TR-interacting protein S239a,accession number W92388,Smith-Waterman Score=413.
cgcggaggtgcaggtcgaagaggccgggctacgtcgtgccctgcgcgtgagcagctgcagcggcagaggcagcatccagcggcggttttatgcagttccagtccgttgctttactttttgcttcaccgacatagtcattatgccgaagagaaagtctccagagaatacagagggcatagatggatcccaaagtaactaaacaggagcccacaagacggtctgccagattgtcagcgaaacctgctccaccaaaccctgaaccccaaccaagaaaaacatctgctaagaaagaacctgggagcaaagattagcagaggtgctaaagggaagaaggaggaaaagcaggaagctggaaagggaaggtactgcaccagctgaaaatgatgaaactaaagctgaagaggcacagaaaactgaatctgtagataacgaggggagaatgaattgtccatgaaaaatttggggttgattttatgtatctcttgggacaacttttaaaagctatttttaccaagtattttggtaaatggctaatttttttaggactctactagttgggcatacgaaaatatataagggtgggacttttatcgtctcatagtcatgctttttggaaatttacatcatcctcaagtaaaataaatattcagtaaaatatgggaagctgtgtgtaagattgattcagcattccatgcacttgctttaaaatttagtcctgtgcatactgtggtgtttttactgtgcatatttgaatttttcatgcagtttttctagagcaataatcagtggtgcttttgtacctaggttttatgtgattttaatgaaacatggatagttgtggccacctgctgactatttgtggtttaaaataaaaggtaaaaatgtctgcagaaa

SEQ ID NO: 22810 - DNA, 232 bp, Homo sapiens
  SIMILAR (189)..(230): 1001254mologous to Homo sapiens cop9 complex subunit 7a,accession number AB033603,Smith-Waterman Score=65.
gaccttgtgattgaggctgtgtatgctgacgtgcttcgtggctccctggaccagcgcaaccagcggctcgaggttgactacagcatcgggcgggacagtcagcgccaggacctcagtgccattgcccgaaccctgcaggaatggtgtgtgggctgtgaggtcgtgctgtcaggcattgaggagcaggtgaggttgccaaccttaaaaaaaccattaaagttacgacggcagc

SEQ ID NO: 22811 - DNA, 397 bp, Homo sapiens
  SIMILAR (119)..(397): 1001254mologous to Homo sapiens cop9 complex subunit 7a,accession number AB033603,Smith-Waterman Score=460.
ggggagagctgtgggagcgtcgtcagggtggacaccatgcgacacccatttctcctttgcatcctgtgtcttgggctctggacatcctgagcccaagtcccccacactcagtgcagtgatgagtgcggaagtgaaggtgacagggcaaaaccaggagcaatttctgctcctagccaagtcggccaagggggcagcgctggccacactcatccatcaggtgctggaggcccctggtgtctacgtgtttggagaactgctggacatgcccaatgttagagagctggctgagagtgactttgcctctacctttcggctgctcacagtgtttgcttatgggacatacgctgactacttagctgaagcccggaatcttcctccactaacagaggctcagaaa

SEQ ID NO: 22812 - DNA, 555 bp, Homo sapiens
  SIMILAR (315)..(524): 811254mologous to Homo sapiens cop9 complex subunit 7a,accession number AB033603,Smith-Waterman Score=286.
  misc_feature (1)...(555): n = a,t,c or g
tccacctgtttgttctggtggaggagacgttagtactagaaagaggaacaaaagtacaagagaaaaaggcgtagaacaaaagaagaggtgaaatgaggacacagcggacctggctgagagtgactttgcctctaccttccggcgtgctcacagtgtttgcttatgggacatacgctgactacttagcatgaagcccggaatcttcctccactaacagaggctcagnagaataagcttcgacacctctcagttgtcaccctggctgctaaagtaaagctggaagaccttgtgattgaggctgtgtatgcttgaccgtgcttcgtggctccctggaccagcgcaaccagcggctcgaggttgactacagcatcgggcgggacatccagcgccaggacctcagtgccattgcccgaaccctgcaggaatggtgtgtgggctgtgaagtcgtgctgtcaggcattgaggagcaggtnagccgtgcaaccaacacaaggagcagcagctgggccttgaacagcagattgagantaagtttncacctttaaaaaaacccct

SEQ ID NO: 22813 - DNA, 496 bp, Homo sapiens
  SIMILAR (1)..(138): 1001254mologous to Homo sapiens cop9 complex subunit 7a,accession number AB033603,Smith-Waterman Score=240.
gccacatctcaggaccctgagcaacacctgactgagctgagggaaccagctcctggcaccaaccagcgccagcccagcaagaaagcctcaaagggcaaggggctccgagggagcgccaagatttggtccaagtcgaattgaaagaactgtcgtttcctccctggggatgtggggtcccagctgcctgcctgcctcttaggagtcctcagagagccttctgtgccccttgggtcctgggaatgctgctgcttcaaccccagagcctaagaatggcagccgtttcttaacatgttgagagatgattctttcttggccctggccatctcgggaagcttgatggcaatcctggaagggtttaatctccttttgtgagtttggtggggaagggaagggtatatagattgtattaaaaaaaaaaaggtatatatgcatagtatctatatataatataacgcaaccataaaccaatgagaaatctatcttccacttccctgaa

SEQ ID NO: 22814 - DNA, 510 bp, Homo sapiens
  SIMILAR (109)..(315): 951254mologous to Mus musculus COP9 complex subunit 7a,accession number AF071316,Smith-Waterman Score=330.
atgcctttgctgtaccacctgtcacgctgtgcctatgtccaacaatgcaattttgctaatcctgttgtatcggctttgtgcacctgtctggtcaagccagtggtggaaaaatgtaccccatatgcagtgttgctggaggctcttgccctgcgtaatgtgcggcagctggaagaccttgtgattgaggctgtgtatgctgacgtgcttcgtggatccatggaccagcgcaaccagcggctcgaggttgactacagcatcgggcgggacatccagcgccaggacctcagtgccattgcccgaaccctgcaggaatggggattcatcagcacttactctcacttcgcagtgccgcaagccaaaggcaacaatgtggttatcacaagctacatgacaaacagaggcttcttcgaggataaaaaggcaacatttgcgccaagcttcttaatgaacatcaaaggcaataaaacatccgttgtcaaaaacagcatcctggagcaaggacagctgaca

SEQ ID NO: 22815 - DNA, 571 bp, Homo sapiens
  SIMILAR (381)..(560): 931254mologous to Mus musculus COP9 complex subunit 7a,accession number AF071316,Smith-Waterman Score=269.
accatgcttacgccatgcttggcacgagggcagagctgagggagcgtctgcagggtggacaccatgttacacttttttctcctttgcatcctggggcttggggttcggtggggtgcacgtgatggggcttggagttaggcccacgggagggggtgggtgtggcagccttgccaagaggctgactttaggattcctagatcacaattttagaccgctccatgtctgattcctcaccgcagaaccgacttagtgcctttacaatccagtccctcaggcttgggcttcccatccgaccagccatcggggacctctagcttcacatcctctttccttgcagctctggacatcctgagcccaagtcccccacactcaatgcattgatgagtgcggaagtgaaggtgacagggcagaaccaggagcaatttctgctcctagccaagtcggccaagggggcagcgctggccacactcatccatcaggtgctggaggcccctggtgtctacgtgtttggagaactgctggacatgcccaatgttagagagctgaagcccggaatcttcctccactaaca

SEQ ID NO: 22816 - DNA, 2837 bp, Homo sapiens
  SIMILAR (1275)..(1826): 491254mologous to Homo sapiens cop9 complex subunit 7a,accession number AB033603,Smith-Waterman Score=276.
tttttttttagttgtttttgtttttattaaagtatcatattgaagtagaaagatggttttgagtttgaaaagctccagataaatccttggatttttatgagcctcaatttccttttctgtaaaatgagaaccacatagggttttttcctccccaagaaattaagagtccatgtactgaaagcatcattctacaagtattaatacatatgtagtaatcatggtagagggtgtcctgaagtcacaggggaatatttgtgaggattcaacggaataaaattttaaaagatgtctgaccaatagtaagcactcaatacatgttagctttattctctcttttatttttctcgcttcttttctcctgctcttcaaaaaagtgagtggttgaaccacctaggtgatctctgctgctaaacttctattattgatttttgtttgcttcctctctgccccttgtttcctcatcccgtttttttccctcttcttcactccttccgttacagcttttctcttgcctcaggtacccagtgcagtcctgatctccagctctccagcggcttagaacagacacagaatgggccgggaccagggacccaccagagacgtctgtagttaatagctggcgctcttccactaataaagttttattgaaataaagcatttaaaaaggcgcccgtcattcttcccccagcgaccaatcgaagagtagaatgcctgcgtccctcactggagcttcagcggtcggaacgcgggggtggggcatgtcctgccgaaatttgcgtccttagagcggaagtacggccggaagcccgccatagagtttagtggccagagcgactcttcagggaggtggcaggaaaggcttggaacatgctgccggaggtgacggagcggcgggcccgcccggtgcgctggaggtcgaagcttccaggtagcggcccgcagagcctgacccaggctctggacatcctgagcccaagtcccccacactcagtgcagtgatgagtgcggaagtgaaggtgacagggcggaaccaggagcaatttctgctcctagccaagtcggctcaagggggcagtgctggccacactcatccatcaggtgctggagggcgcctggggtctacgtgtttggagaactgctggacatgcccaatgttagagagctggctgagagtgactttgcctctaccttccggctgctcacagtgtttgcttatgggacatacgctgactacttagctgaagcccggaatcttcctccactaacagaggcttcagaagaataagctttcggacaccttttcagttgttcaccctggctgctaaagtaaagtgtatcccatatgcagtgttgctggaggctcttgcccttgcgtatatgtgcggcagctggaagaccttgtgattgaggctgtgtatgctgacgtgcttcgtggctccctggaccagcgcaacaagcggcttcgaggtttgactacagcatcgggcgggacatccagcgccaggacctcagtgccattgcccgaaccctgcaggaatggtgtgtgggctgtgaggtcgtgctgtcaggcattgaggagcaggtgagccgtgccaaccaacacaaggagcagcagctgtggcctgaagcatcagattgagagtgaggttgccaaccttaaaaaaaccattaaagttacgacggcagcagcaggccgcagccacatctcaagaccctgagcaacacctgactgagctgagggaaccagctcctgggcaccaaccagcgccagcccaggcaagaaagcctcaaagggcaaggggctccgagggagcgccaagatttgggtccaagtcgaattgaaaggacttgtcgtttcctccctggggcatgtggggtcccagctgcctgcctgcctcttaggagtcctcaagagagccttcttgtgccccctggccagttgataatcctaggttcaatgaccctttcacctcccctaaccccaaacatagatcacaccttctctagggaggagtcaaatgtaggtcatgttttttgtttggtactttctgtttttttgtgacttcaatgtgttccattgctccccgcttgccatgcttctctcccttgtttccttaagagctcagcatcttgtccctgtttcattacatgtcatttgagtaggtgggtagccccgatgggggtcgctctgtctgggagcataacccacaggcgtttttttctgccacccgattccgtgccatgcctgaatccccagttcctatacccctaccccctgaccctattgagcagccctctgaaagagccatagggcccccccacctttactcacaccctgaggaattctgggagcccagtctggcccatgccccaggagtcactgggacatgttccatccctagaatccctgtcacacctacagtcatttccttttccctctctctgggcccttggggtcctggggaatgctgctgcttcaacccccagagcctaagaatggcagccgtttcttaaacatgttgaagagaatgaattctttcttgggccctggcaatctcgggaagcttgatggcaacccctggaagggtttaatctccttttgtgagtttggtggggaagggaagggtatatagattgtattaaaaaaaaaaaaggtatatatcgcatatatctatatataatatgaaagcagaaataaatctatgagaaatctaaaaaaaaaaaaaaagggggggcccttttaaagaacccagttttatgtccgcgggctgggaaggtaaaattttttttttggggccccctaaattaaatcccggggcgggggtttaacacggggg

SEQ ID NO: 22817 - DNA, 1319 bp, Homo sapiens
  SIMILAR (1)..(672): 1001254mologous to Escherichia coli No definition line found,accession number U00039,Smith-Waterman Score=1151.
atgaagccgtccgttatcctctacaaagccttacctgatgatttactgcaacgcctgcaagagcatttcaccgttcaccaggtggcaaacctcagcccacaaaccgtcgaacaaaatgcagcaatttttgccgaagctgaaggtttactgggttcaaacgagaatgtaaatgccgcattgctggaaaaaatgccgaaactgcgtgccacatcaacgatctccgtcggctatgacaattttgatgtcgatgcgcttaccgcccgaaaaattctgctgatgcacacgccaaccgtattaacagaaaccgtcgccgatacgctgatggcgctggtgttgtctaccgctcgtcgggttgtggaggtagcagaacgggtaaaagcaggcgaatggaccgcgagcataggcccggactggtacggcactgacgttcaccataaaacactgggcattgtcgggatgggacggatcggcatggcgctggcacaacgtgcgcactttggcttcaacatgcccatcctctataacgcgcgccgccaccataaagaagcagaagaacgcttcaacgcccgctactgcgatttggatactctgttacaagagtcagatttcgtttgcctgatcctgccgttaactgatgagacgcatcatctgtttggcgcagaacaattcgcggaccgagtcttggtctgtctccaggctggaacacgcgtgtgtcgttgtgcgctttttttgggtgaaaggagtaagaaaatggcgacaggaaagtcctgctctcgctggtttgcgcctcttgcggcgttattaatggtagttagcctgagtgggtgttttgataaagaaggcgatcagcgtaaagcgtttatcgacttcctgcagaatacagtgatgcgtagcggtgaacgtctaccaaccctgactgccgatcagaaaaaacagtttggtccttttgtctctgattacgcgattctgtatggttattctcagcaggtgaatcaggcgatggattccggtctgcgcccggttgtagacagcgttaacgcaattcgcgtaccgcaggattacgttacgcaaagcggtccgctgcgtgaaatgaacggttcgctgggtgtgctggcgcaacaactgcaaaatgcgaagttgcaggccgatgctgcgcactctgcgctaaaacagagcgatgatttgaaaccggtctttgatcaggcattcaccaaagtggtaacgacgccagctgatgcattgcaaacgttgattccgggcgggccaaattttccgccacacttttggtggctggcgctcctttgtctgccagggctcgg

SEQ ID NO: 22818 - DNA, 1728 bp, Homo sapiens
  SIMILAR (1333)..(1395): 381254mologous to Homo sapiens zinc finger protein ZNF135,accession number U09413,Smith-Waterman Score=63.
atgggggagagggattgtgctgttgtggaagaaataagcattgggggcaggctcctggcaaagcctgtccgtaagcagggaccgcaggagaccagccatcatggtggaggagaccacatgagtgatcttctgaccgctggaacggacaccctttgcttggatttccatagtgatccattgtctgctataaatgcctgcttcgaaggtgacactgttattgtttgtcctggccattatgtggtacatggcactttctccattgctgactccattgagttggaaagacccccatctactgggcccggcgagcaaagggtgagtcaggaccgctgtgggggaaggccaagccctacggatggtttgaagagctgggggcggagccccttggagattcacaggaaccttcgccacagtggccccggagacagcggctgatttatctttgcatcgacatctgctttccaggacaacatctgcctgggggactgcgtgtataaccgtcccgattgagcccccgacctggcccacctgggccgtgccaattcaatggggtggtagtgcaacctgcatccaggaagacaaattacggcaggggattctgtatggttattctcagcaggtgaatcaggcgatggattccggtctgcgccccggttgtagacagcgttaacgcaattcgcgtaccgcaggattacgttacgcaaagcgtcccgctgcgtgaaatgaacggttcgctgggtgtgctggcgcaacaactgcaaaatgcgaagttgcaggccgatgctgcgcactctgcgctaaaacagagcgatgatttgaaaccggtctttgatcaggcattcaccaaagtggtaacgacgccagctgatgcattgcaaccgttgattccggcggcacaaactttcacgcaacaactggtgatggttggagactacattgctcagcaaggtactcaggaatgtggaaagacttttagtcgagcctcgtaccttgtacaacatagcagaatccatattggtaagaagccctatgagtgtaaggagtgtggcaaggccttcagttctggctcataccttgttcagcatcaaagaattcatactggggagaaaccctatgaatgtaacaaatgtgggaaagcctttactgtttatggacaacttattggacatcagagtgttcacactggtgagaaaccttttgaatgtaaggaatgcgggaaggcctttagacttaattcattccttactgaacatcagcgggtacacactggtgagaaaccctttaaatgcaaaaaatgtgggaagacctttagatacagttcagccccttaaagtgcacctgagaaaacatatgcagtgttatacccctaagagtcctgaggagtgtgggaagtgccttcgtgtgtggctcaaacattgttgaacatcggggaatttatgctggtaggaaactttcaaatgtgaagaatattggcaggtctattctcatcttataattcataatataactcagaaaacataagaatattcctttgtcatttataggtttgtaataccaatatttatactggtgggccattcagaaaaagtgggaaacattattacttaatggttacagcactgacagcatgaacttttatatgatgcattttttttaatgtgattgtatgaccaagtgaataaaaacccttggccctcctaaaaaaaaaaaaaaaaaaaaaagaaaaaa

SEQ ID NO: 22819 - DNA, 657 bp, Homo sapiens
  SIMILAR (73)..(465): 751254mologous to Homo sapiens 60S ribosomal protein L12,accession number AF037643,Smith-Waterman Score=458.
cggaggaggccaaggtgcaacttccttcggtcgtcccgaatccgggttcatccgacaccagccgcctccaccatgccgccgaagttcgaccccaacgagatcaaagttgtataccttgaggtgcacccgagtaaaggtcggtgcccacttctgcccctggcccccaagatcggccccctgggtctgtctccaaaaaaagttggtgatgacattgcaaaggcaaccggggtgacttgaaagggcctgaggattacagtgaaactgcccattcagaacaaacaggcccaaattgaggtggtgccttttgcctttgccctgatcatcaaagccctcaaggaacccccaagagacagaaagaaacagaaaaacctttaacccagtgggaatatcccttttgatgaaattgtcaacattggtcgacaaatgcggccccgatcccttaccagaggaactctttggaaccattaaaaagatcctggggactgcccagtcagtgggctgtaatgttgatggcccccatcctcatgacatcatcgatgacatcaacagtggtgctgtggaatgcccacccagttaagcccaaaggaaaacatttcaataaaggatcatttgacaactggtggaaaaaaaaaaaaaaaaaaaaaaaaaaaaaaaaaa

SEQ ID NO: 22820 - DNA, 1102 bp, Homo sapiens
  SIMILAR (1020)..(922): 501254mologous to Neurospora crassa probable ribosomal protein L12,accession number AL513464,Smith-Waterman Score=69.
  misc_feature (1)...(1102): n = a,t,c or g
ttttttccaaaaaccaaaagagggtatttatagccccccataagagnnnnnnnnnntttttcccctccgcgggagattggggcccccccagggaattattaaaaagggcccccccttaaaatataattttttattttannnnnnnnnnattatatttaaaaattttatttttttgtcaaatgatccctttattgaaaatgttttccttttgtgcttaactggcgtgggcatttccacagcacccactgttgaatgtcatcgatgaatgtcatgaggaatggcggcccatcaaacattaccagcccaactgacttgggcagtcccccaggaatctctttaagtggggttccaagagagtttctctgggctaagggatcggtgcccgcatctgtcgaagcaatgttgaacaaatctcattcaaaaaagtgaatattcccaactggtgtttaaatgttttttcctgtttcctttcctgtcctcttgggtggttcccttaagggcctttgaatgaatcaggggcagaaggcagaaaggcaaccacctcaaatctggggcctgtcctgttcttgaatggggtcagtttcacttggtaatcctcaaggccctttccagttcacccggttgcctttggcaaatgtcattcacccaacttttttttgggagacaggacccaggggggccgattctttgggggccaagggcagaaagtggcaaccgactttcacctcccggtgcaacctcaaggtatacctagggcgtgcgggctcccaagccgccacaggtggtccaagtccttccctcccaaacctacacgtgaagaagctaaggcccagaaaggctgaggcttggccggggcggcgcaacaccgggaaggtctctgggaggcagcggctttaagagccccatacggggaaagctttgcacgcgcggcagggccgagggatgctccatcccgcagccccggccacaaccagagcacgcaccgactttgatctcgttggggtcgaacttcggcggcatggtggaggagagctggtgtcggatgaacccggattcgggacgaccgaaggaagttgcaccttggcctcctccgagcacgaaa

SEQ ID NO: 22821 - DNA, 607 bp, Homo sapiens
  SIMILAR (308)..(409): 481254mologous to Homo sapiens bA271B5.1 (similar to ribosomal protein S7),accession number AL139378,Smith-Waterman Score=66.
atgggcccacattggaaagacttcaaggaaattgatgtgaaaaagtacattgacgctctcagcatccacacatacacacacacgcacacgcacacgcacgctgacatcacagatggagaccatgggggtggggctcttctggagctggagattaactcacacctcaaggttcagttcagggagctgaatattacagcagccaaggaaactgaagatggtggtggtgggaaagctatcataatttttgttccctttcctcaactgaaatctttccagaaaatccaagtctggctaaggagaattctgcctaagccaacccgaaaaagctgtacatcagaatatgcattggcctccaaggagccgtaccctgaaagccatgcgtgactcaatccccgaggacttggtcttcgccaagtgaaattatgtgcatgcgaatccacgtgaaactggatggcagccgtctcataaaggctcatttggacaaagcgcagcaataccatgtggaacgcaacgctgaaactttttctggtgtctacatgaagctcacaggcaaggatataaatgttgaattcccagagtttcaactctaaactgaaatgactaatta

SEQ ID NO: 22822 - DNA, 508 bp, Homo sapiens
  SIMILAR (390)..(506): 761254mologous to Homo sapiens ribosomal protein S7,accession number Z25749,Smith-Waterman Score=141.
cgcccccccctttgaattgccccgcgctgcaggaattcggcacgagggcaagttctcccaggagaaagccatgttcagttcgagcgccaagatcgtgaagcccaatggcgagaagccggacgagttcgagtccggcatctcccaggctcttctggagctggagatgaactcggacctcaaggctcagctcagggagctgaatattacggcagctaaggaaattgaagttggtggtggtcggaaagctatcataatctttgttcccgttcctcaactgaaatctttccagaaaatccaagtccggctagtacgcgaattggagaaaaagttcagcgggaagcatgtcgtctttatcgctcacaggagaattctgcctaagccaactcgaaaaagccgcacaaaaaataagcaaaagccgtcccaggagccgtactctgacagctgtgcacgatgccatccctgaggacttggtcttcccaagcgaaattgtgggcaagagaaatcgcgt

SEQ ID NO: 22823 - DNA, 416 bp, Homo sapiens
  SIMILAR (6)..(221): 971254mologous to Homo sapiens Human gene 53-encoded protein fragment, SEQ ID NO:395,accession number Y86480,Smith-Waterman Score=379.
  misc_feature (1)...(416): n = a,t,c or g
cctgagagagacctgaggaggggacagagcccagcccctctcctgtggctgagcaggcctctgtgtccatgacacctgtcttccgggcctgggggctgtgggtgtatgtcctccntactggcttccccggcccctgctgcatgatgctcttggaactcttctccaaggagtcagtcccccaggcctatcaggggatccttttgtatctgcactttgggttttagtttcaaagctccactagctcagcactgcatttcccgagatgattcccaagacagctggtgcctcctggctttcctgtgccaggccaaggggcaccacagaggaccctggatcctttgcctcttcttggttgaaggatctctatgtatgtgtgtatataaatatagtttttnatctaaaaaaaaaaaaaaaaa

SEQ ID NO: 22824 - DNA, 755 bp, Homo sapiens; identical to SEQ ID NO: 16375
  SIMILAR (113)..(238): 331254mologous to Homo sapiens Human bladder tumour EST encoded protein 50,accession number Y66192,Smith-Waterman Score=64.

SEQ ID NO: 22825 - DNA, 732 bp, Homo sapiens
  SIMILAR (30)..(485): 311254mologous to Homo sapiens Synthetic human type III collagen SYN-C3,accession number W54966,Smith-Waterman Score=110.
ctagaggaagcagagcactttgccatgatggtgatcagcctcggagaggaagccggggagttcctccccaagggctacctggctctgggtctcacctatagcctgcaggccaccgacgccaccctgaagtccaagcaagatgaattgcaccggaaggcactgcagacgctggagagggctcagcagctggcgcccagtgacccccaggtcatcctctatgtctcgctgcagctggccctcgtccgacagacctggtcacagcctttctacagggtgcagaacctcaagctaagggcactgctcagtgaagcagcagtgtgtgggggagaggattccctgcatcctggggaatcaggccagatctccagtgccatggagcagctgcaggaggccctgaaggtacgcaaggatgatgcccacgccctccacctgctggcactgctcttctctgcccagaagcaccaccagcatgccctggatgttgtcaacatggccatcaccgagcaccctgagaacttcaaacgacagcacatagttctgcttgtggcctttgccagcgtgccgagcactgctgttgatggcttccttctccccaaagctaaagaaaggcttgcaaggagcttcctggagagcagtgtctgcaggcaggaacctctgccgtgggaacaactcacccatgcagacatcgcagagcgactgcaagggcttcaggagctgtggaggggagggtaa

SEQ ID NO: 22826 - DNA, 1161 bp, Homo sapiens
  SIMILAR (211)..(525): 761254mologous to Homo sapiens Unknown (protein for IMAGE:3461487),accession number BC001978,Smith-Waterman Score=389.
atggagagtttcaggaacgccctgcagcttcacttccttggagctgcttggatcctgggaatacccacagtgttccaggccttggatcctggagtgaaagatcagaccagagtgactggtggagcacttgccccagcccagaaaggatgtggtcgggttgagaaaatccgctctgggccactcatgctaatggaatgtcagcagctgcaaagcctgatgttcaccaaggtgaagctggagcaggtgctgaaaggcccagaggaagccctcgtgacctgcagacaagtgctgaggctgtggcagaccctgtacagcttctcccagctgggtgatgttggtgacttcagctctgtctttgggcctgaacccacagccccagagcctgcctggagctcccggcgggcttcgtccatcgccgcctcccggctggaggaggccatgtcagagctgactatgccctcttcggtcctgaagcagggccccatgcagctgtggaccacgctggaacagatctggctgcaggctgggggggagttggagaagaaaccgaaagttgatgatctcttactgggacatggggatttgcctccttccaattccagtccagtgcgagaagctgatgaatggtacccacttgagagacggctgcagggcaatgcctcttgggcagcggctgagctgttcatggagcagcagcacctcaaggaagcaggtttctgcatccaggaggcggcgggcctcttccccacttctcactcagtactctatatgcggggccggctggctgaggtgaagggcaacctggaggaggccaagcagctgtacaaggaggcgctcacggtgaacccagatggcgtgcgcatcatgcatagcctgttgccttcagctcaaaacaatccttacgcccaagtgacatattttggggtggcatgttctgctatccttcagcagcccctgaagaaggtcctagccctggccacagagccacccactctccctgccctcagcttggctaaggagagtgtggacactttggtgcagcttgtctgcactgcaagagacaacttggacaccctcaagcatgagtggacaagcgaggttctcacccatgaagatgatgcaatggcaattgcccaaaggcttattactacagagttttaa

SEQ ID NO: 22827 - DNA, 4551 bp, Homo sapiens
  SIMILAR (2777)..(2866): 561254mologous to Homo sapiens KIAA1140 protein,accession number AB032966,Smith-Waterman Score=52.
  misc_feature (1)...(4551): n = a,t,c or g
atggcccatcttcggtcatgctgcagttccctctatcaacctggacaccttctacctcctcacaaccccattcaggaccaccctcttacagcaccatccctaactcatctcaccaggagagcctattttacagatgagaagactaagggaggccagtcagcctacgctgtgtccctgctgcgggagtgtgtgaagttgcggccctcggaccccaccgtgcccctgatggccgcgaaggtctgcatcgggtcccttcgctggatggcggccaagcacctggcgggggtcctgctgcactccctgagtgaggagtgctactggagccccctgtcccaccctctgcctgagttcatgggcaaggaggagagttctttcgccactcaggccctgcggaaacctcacctctatgaaggagacaacctctactgccccaaggacaacatcgaggaagccctcctgctcctcctcatcagcgaatccatgctggcgaacaagttgctgctgttagaaatggaaagggtacagagccctggtgttgagagtggggtggataggcagctgagtccctatagtgacacaaatgtaaatgctcaaaatgcccaaatcgtgccagtagcggccaagtctgcacagaatgaagtcccaggatacccagaagagacagaaaaaagtcgggtacagtccaacttgctcacccagtttcaagacctccgcctcctcctggctgcaccagagtgtctgccccctcggatgagcccaccttcggcccatggggagggcctggagtcagggggcccgagcaggacaggcctctctctggaacgcctacccaactccatcgcctcccgcttccgcctgacagagagggaggaggaagtgatcacctgttttgagagggcctcctggatcgctcaggtgttcctgcaggaattggagaagaccacaaataacagcacgtcgaggcatctgaaaggctgtcacccgcttgactatgagctcacctacttcctggaagctgccctccagagcgcctatgtgaaaaacctgaagaaggggaacatcgtgaagggcatgagagagctccgggaagtgctgcggactgtggagaccaaagcaactcagaacttcaaagtgatggcggccaagcacctggcgggggtcctgctgcactccctgagtgaggagtgctactggagccccctgtcccaccctctgcctgagttcatgggcaaggaggagagttctttcgccactcaggccctgcggaaacctcacctctatgaaggagacaacctctactgccccaaggacaacatcgaggaagccctcctgctcctcctcatcagcgaatccatggcaactcgagatgtggtgctgagccgggtgccggagcaggaggaggaccggacagtgagcttgcagaatgccgcagccatctatgacctcctgagcatcacgttgggcagaaggggacagtacgtcatgctctcggagtgcctggagcgagccatgaagtttgcgtttggagaatttcacctttggtaccaggtggccctctccatggtggcttgtgggaagtcagcctacgctgtgtccctgctgcgggagtgtgtgaagttgcggccctcggaccccaccgtgcccctgatggccgcgaaggtctgcatcgggtcccttcgctggctagaggaagcagagcactttgccatgatggtgatcagcctcggagaggaagccggggagttcctccccaagggctacctggctctgggtctcacctatagcctgcaggccaccgacgccaccctgaagtccaagcaagatgaattgcaccggaaggcactgcagacgctggagagggctcagcagctggcgcccagtgacccccaggtcatcctctatgtctcgctgcagctggccctcgtccgacagatctccagtgccatggagcagctgcaggaggccctgaaggtacgcaaggatgatgcccacgccctccacctgctggcactgctcttctctgcccagaagcaccaccagcatgccctggatgttgtcaacatggccatcaccgagcaccctgagaacttcaacctgatcttcaccaaggtgaagctggagcaggtgctgaaaggcccagaggaagccctcgtgacctgcagacaagtgctgaggctgtggcagaccctgtacagcttctcccagctgggaggcctagaaaaggatggcagcttcggtgagggcctcaccatgaagaagcagagtggcatgcacctgactttgcctgatgcccatgatgcagactctggctcccggcgggcttcgtccatcgccgcctcccggctggaggaggccatgtcagagctgactatgccctcttcggtcctgaagcagggccccatgcagctgtggaccacgctggaacagatctggctgcaggctgctgagctgttcatggagcagcagcacctcaaggaagcaggtttctgcatccaggaggcggcgggcctcttccccacttctcactcagtactctatatgcggggccggctggctgaggtgaagggcaacctggaggaggccaagcagctgtacaaggaggcgctcacggtgaacccagatggcgtgcgcatcatgcatagcctgggtctgatgctgagtcggctgggccacaagagcttggcccagaaggtgcttcgtgatgccgtggagaggcagagtacgtgccacgaggcgtggcagggcctgggcgaggtgctgcaggcccagggccagaacgaggctgccgttgactgcttcctcaccgcccttgagctggaggccagcagccctgttctggcccttttccatcatccccagagagctctgacgacgctgcagccgcagggagggaggggctggccagagggagaggcagcagggaacgtgggtcagggtggggcaacagtggcatcaggtgcggggcctcagggaaatacatctttagtgaacgcctctgcagctgcagccctcgttctcttggctgggccaagagggccttcctggatttctttgttggtgccttgggaaacagtctgacttgaaccctaagtgcctttggagagttttgtggtgaccagacttgctccccaagagctgggcagcggggagcctcacagctgtccttcaccctcacccatgcctctggcttggggtctgggtggggggttctcactccccactctcagcacagtacatgacttctggatatctctcaggtcttgcccagggcggtcacaatgtgaagaaactgcgggcaagtgggaagactatgagatttctgggttcccttctcagacttggagttagtagatgattcctgcattgcccctgcttgccctctgagaccagctgggccccaccttgctctttccccctgctaccaagtgcctttggggcctctggggtctgaccaggggtactaaataaaccggccctaacacttccatctcctacccaccccatctccctggcgatgtgctccagcccaagcagcctccgtaggctttagatcctgtggttgccagatccagtcctttctaataccctgagtcaacacattactcctgcaggtcttaggctacaatgcaggtcccttgagggccaccaacatggaggtaggcagtttctaggactgtccccagtacatctcaccacccacagccctttttttgccttgattcgagcctcaccctggccttttggcttcccctgcctgagagagacctgaaggaggggacagagcccagcccctctcctgtggctgagcaggcctctgtgtccaatgnacacctgtccttccgggccctgggggctgtgggtgtatgtcctccctactggcttccccggcccctgctgcatgaatgctctttggaactcttccccaagtgagtcagtcccccaggcctatcaggggatccttttgtatctgcactttgggttttagtttcaaagctccatcaggtacagcttgcatttcaagaatggggggaaagctcggttaaaggctgccctggttcatcatagctccaaccttcctcggaaggagtgggctgttggagaccccccatccatggcacactagctcagcactgcatttcccgagatgattcccaagacagctggtgcctcctgggttttcctgtgcccaggccaaggggcacccacagaggaccctgggatccttttgcctcttcttgggttgaaggatctctatgtattgtgtgtatataaatatagttttttatctatatatataaaatagagatctattttttttctggaattctgttagaaaagtaaagaaaaagccaaatgctgttggtttagtctcagggtgcccaaagtggttatagtcaatttttggtactaggaaaggtacccaatgcatttcctgacttttaagcatttccttgttggaagcagcagagggccaggccaagttgctgacagtgactttgcaggttgaataaagaaacccttggaggggaagcaggcttgtttgaaaaaaaa

SEQ ID NO: 22828 - DNA, 606 bp, Homo sapiens
  SIMILAR (405)..(139): 981254mologous to Homo sapiens 30-SEP-1997 Human glutathione- S-transferase cDNA sequence,accession number A59869_cd1,Smith- Waterman Score=491.
  misc_feature (1)...(606): n = a,t,c or g
tttttacatttcctgttttcattttattgggaacttcaaagaaaagaaagagagacggattggttcccaagacaagccgtgacgtagactcccaacaagctggggaattctggacagcgaaggggtggacagtgagactcagcacagcccaaagtcaaaggcattagggttgttctgaaaatagagattcaagaagccctggaaaatgctcttatccatgagaagagcacagactgtggggtcccacttcatggctgatatccagagccgcagggctggcgtgtggctcacacagtccagtatcccatacacatccagccgctcaaaccagggccagaggaggtaatcaatcatggatatacaggttccaccaaagaaggtggtgttctgatactcaagaatcttacaaaatagctccaataacatcttttggcgagctcgttcataagggtcatatggaaacagcttccttcctggataagcatcatccaggtactcacaagcaataacagattcatagatcagttgacattggctggtctccaggacaggaatgtggccaaaagggtgctttgtatagtaccattcangcttgtttctcaggtt

SEQ ID NO: 22829 - DNA, 973 bp, Homo sapiens
  SIMILAR (277)..(699): 481254mologous to Homo sapiens Human secreted protein fragment encoded from gene 26,accession number Y45369,Smith- Waterman Score=294.
cccacgcgtccgcccacgcgtccggggcaagtgagcgagctccttcctcaccgggctgactagcctctcctttccctgtccccctccatcgctgctctgcaggaagccagcccccagggccagtcccggaggggctgatccgcatctacagcatgaggttctgcccctattctcacaggacccgcctcgtcctcaaggccaaagacatcagacatgaagtggtcaacattaacctgagaaacaagcctgaatggtactatacaaagcacccttttgggccacatccctgtcttgaagacaagcaaatgtcaactgatctatgaatctgtaattgcttgtgagtacctggatgatgcttatcccaggaaggaagctgttcccatatgacccttatgaacgagttcgccaaaagatgttattggagctatttggtaaggtcccacatttgcccaaggaattccctggtagcgttgaagatgtgggagagaatgcacctaatctgaaggcagccctgcgtccaggaattcagcaacctggaagagattcttgagtatcagaacaccaccttctttgggtggaacctgtatatccatgattgattacctccctctgggccctggtttgagcgggctggatgtgtatgggatactggaactgtgtgagccacacgcacagccctgcggctctggatatcagccatgaagtgggatcccacagtctgtggctcttctcatggataaggagcattttccagggcttcttgaatccctattttcagaacaaccctaatgcctttgactttgggctgtgctgagtctcactgtccaccccttcgctgtccagaattccccagcttgttgggagtctacgtcacggcttgtcttgggaaccaatccgtctctctttcttttctttgaagttcccaataaaatgaaaacaggaaatgtaaaaaaaaaaaaaaaaaaaaaagggc

SEQ ID NO: 22830 - DNA, 313 bp, Homo sapiens
  SIMILAR (2)..(250): 911254mologous to Homo sapiens human elongation factor-1- delta,accession number Z21507,Smith-Waterman Score=375.
catcctgctggatttcaagccttgggacgatgagactgacatggcccagctggaggcctgtgtgtgctccatccagctggaagagctggtctagggggcctccaagctggtgcccatgggctacggtatccggaagctacagattcagtgtgtggtggaggacgacaaggtggggacagacttgctggaggagatcaccaagtttgaggagcacgtgcagagtgtcgatatcgcagctttcaacaagatctgaatcctgagtgtgtgtgtgtgcgcccgtgaatccctgccaggattaaagactgagaccggc

SEQ ID NO: 22831 - DNA, 1074 bp, Homo sapiens
  SIMILAR (371)..(433): 711254mologous to Homo sapiens human elongation factor-1- delta,accession number Z21507,Smith-Waterman Score=81.
atgaaacacagctgccatttgtgtcgtgtgcctgacgctgccttcatggtcctctcctcagaagctgatttcaccttctaccgtcttacagacccaggcacaggggcacttgcagaagtaaagctcttccacatgagagagaagggcctaagtgaaccctctctgcagggaagcagatctgaaaatcgggcacagactgctaacgtagaggagcttcaccccattgccaccaccaccccaggccacaaggagtactgccagactatctccaatattcccttaaaacccaagggctctaagtcagcttgtggtgaatgctgccttgcctgggacttatccttcagggcagtgagcacctctgtggcccagggcagaaaggaaattctacaagcagatgaatgggcctgtggccagcgcctcccgccagagctcggccccagggaagaccacagcgagctcgtcctccagatcgccagcctggaagtggagaaccagagcctgcgcggcgtggtgcaggagctgcagcaggcggtctccaacctggaggcctggctgaacatgccggagaagagagaagagctcgcctggccatggtccacagtcccgcagacacagcacgtgtctcccatgcgccaagtggagcgcccctcccctcgccccccttactacgaccccggccaagaagcagaggataacgaggacgatgacattgatctcgacaataaggaggaagacaaggaggcaaggcggctgcgggaggagcggctgcggctgtacgccaagaaggccaagaatccctcgctggtggccaagtcctccatcctgctggacatcaagccttgggacaataagacggacatgacccagctggaggcatgtgtgcgctctatccagctggatgggctagtgagcggggcctccaagctggcgtccgtgggctatggtatccggaagatgcagattcagtgtgtggtggaggacgacaaagtggggacagacttgctggaggaggagatcaccaagtttgaggagcatgtgcagagtgtcgacatcgcagctttgaacaagatctga

SEQ ID NO: 22832 - DNA, 598 bp, Homo sapiens
  SIMILAR (10)..(426): 331254mologous to Homo sapiens human elongation factor-1- delta,accession number Z21507,Smith-Waterman Score=93.
tcccatgggcaaatgaggccccagccaagaaacagccacaccagcagagggaatgcgagggatgatgacattgacctgttttggcagtgacaatgaggagggaggacaagcaggcgggccacagctgcggggaggagcggcctacggtcattacgcgggagaagaaggcccaagaaagcctgcacttggtggcccaagtccctcccatccttgctggatgtcaaagccttgggatgatgacgacggaccatggcccagcttggaggcctgtgtgcgcttctatccagctggacgggctggtctgggggggctttccaagcttggtgcccgtgggctaacggtatccggaaagctacaagattcagtgtgtggttggaggacgacaaggtggggacagactttccttggaggagggagatcacccaagtttgaggaagcacgtgcaagaagtgtcgatatcgcaagcttttcaacaagatcctgaagccttgaagtgtgtgtacgttgcgcacgtgcgtgaaggcccgtgcacacgatctaaagacttgagaccggcaaaaaaaaaaaaagtcgagcggccgcgaatttagtagtagta

SEQ ID NO: 22833 - DNA, 2838 bp, Homo sapiens; identical to SEQ ID NO: 19813
  SIMILAR (274)..(699): 821254mologous to Homo sapiens A human proliferation and apoptosis related protein,accession number Y84901,Smith-Waterman Score=643.

SEQ ID NO: 22834 - DNA, 1760 bp, Homo sapiens
  SIMILAR (1445)..(1338): 941254mologous to Homo sapiens rpL32 (aa 1-135),accession number X03342,Smith-Waterman Score=171.
tttcttcgctgcctacggaggtggcagccatctccttctcggtaagtgttaatccgtggcaatccgcattcctgcgggattcatctggccccgtcgcccagtggtgcggaggcctccccttcagcgcggtagtgtctgtgggtattgttattgtcagcttactggagcgtgtacaggaacagaacgaagccgccgagttgatagggctttgcgtcccagagcctcctgccctccgcctgtattcagagctgcgggctgcttgtttgttccttggcggtggagggtgctagttgaggccagacttcggggtcttctggtggccgtgggacgaccatgtgtggtccaccttgacagctttcagctgggatctgtggatcccagcgctcaccaatgtcggcccacgtgtattcgttcatgccatggccggcttcttccgctgcagtctctggcccgagggctgctgctgcgggaccgccaaggaaagacgagctgtaggtcggctggtccagctgcaggcagaaattctggtagtatctctgggaatatgaagatgcaactgcccccaccttgccttcgaggatatcatgggccagaaggcagagtcgttttgaatacgtggttcattgagtacccactctgggccagttgatggctgcgaagagagcagaaggggtgctgcttgaagaaatcaatggctcggaagaccacactgaggaaggtgtgagttgatactggaagatctccagggttgaggcatcttcagaggcatcatggcccgcccttcagacccccttgtgaagccccaaagatcgttcaaaaaggagaacccaagaagcttcatcccggcacccagtcagaccgaatatgtcaaaatttaagcgttaactgggcggaaaaccccagagggcatttgaccaaccagggtttcgtagaagattccaagggccaagaatcttgatgcccaaccattggtttatggaagcccacaaacacacaacagcacactgcctgcccaagtggcttccgggaagttccctgggtccacaaacgtgcaagggagctgggaagtgcttgcttgatgttgcaacaaacaaattctttacttgttgccgagattcgcttcacaatgttttccttcccaaggaaccggcaaagcccatccgtgggaaagaagcttgcccaacttggccattcaggagttcaccaaccccaattgccagggttgcgcagttgaaagaaaattgagttagggcagcttcatgtgcagtatttacatttatttaaacagaaaaacgggcccatgggagctgcctactcatttttcttcactgcgcacgctgggcattggggttggtgactctgatggccagttgggcagctctttccacgatggctttgcggttcttggaggaaacattgtgagcgatctcggcacagtaagatctgcaagagaatcaagtagggtaagggagcaaggacagcccttcaacacacttgggaaaattccattgggagagggcaatgaggtccaccaccaacctaaaagagggctgcttggttaaatggctgtggaatgacacctacatgcccccaaatcctgactatgggttccctgggtgggtgacaagaatgctttcattaaaaagtaccctcattgtcccctctcatccttatagcagccttgtaatccaggggattacctccatttttacagataaaggaaacccaaggcccacagcaagcaatggacagggatccgg

SEQ ID NO: 22835 - DNA, 492 bp, Homo sapiens
  SIMILAR (1)..(471): 681254mologous to Homo sapiens DEC-205,accession number AF011333,Smith-Waterman Score=558.
atgtgttctcaaagtggaggtcacttggcaagcgttcacaaccaaaatggccagctctttctggaagatattgtaaaacgtgatggatttccactatgggttgggctctcaagtcatgatggaagtgaatcaagttttgaatggtctgatggtagtacatttgactatatcccatggaaaggccaaacatctcctggaaattgtgttctcttggatccaaaaggaacttggaaacatgaaaaatgcaactctgttaaggatggtgctatttgttataaacctacaaaatataaccacattttaatatcagcattggtgattgctagcacggtaattttgacagttttgggagcaatcatttggttcctgtacaaaaaacattctgattctcgtttcaccacagttttttcaaccgcaccccaatcaccttataatgaagactgtgttttggtagttggagaagaaaatgaatatcctgttcaatttgactaa

SEQ ID NO: 22836 - DNA, 621 bp, Homo sapiens
  SIMILAR (46)..(288): 741254mologous to Homo sapiens DEC-205,accession number AF011333,Smith-Waterman Score=336.
atgagatgggtggtcaggaccttggcagggtgtaaaggcagacgttcacagacctctagcacacaacagaatctagtgaatgaagaagcttctctccccaacaagtgtgaaaacagtgatgatgaactcaactttggttggtcagatgggaaacgtcttcattttagtcgctgggctgaaactaatgggcaactcgaagactgtgtagtattagacactgatggattctggaaaacagttgattgcaatgacaatcaaccaggtgctatttgctactattcaggaaatccaaaatcacatattctgagtattcgagatgaaaaggagaataactttgttcttgagcaactgctgtacttcaattatatggcttcatgggtcatgttaggaataacttatagaagctttacagaaagcatggctgggcagcctcaggaaacttacaatcatgtcagaggcgaatgggaaacaagcaggttttactatggtggagcaggagagagagtgaaggaggaggtgctacacacttttgaacaaccagaactcattagaactcactcactatcacgagaacagcaagggggaaaatcacctcccaccaggcccctcctccaagactga

SEQ ID NO: 22837 - DNA, 5228 bp, Homo sapiens
  SIMILAR (855)..(5225): 991254mologous to Homo sapiens Human dendritic cell receptor DEC-205,accession number W38429,Smith-Waterman Score=8050.
tttcgtggagccgcgtgcgcccgaggacccggccggaaggcttgcgccagctcaagatgaggacaggctgggcgacccctcgccgcccggcggggctcctcatgctgctcttctggttcttcgatctcgcggagccctctggccgcgcagttaatgagccccttgaccatcttccatggaaatacgggcaagtgcatcaagccggggtatggttggatagtagcagaccactgtgatgaaactgaggacaagttatggaagtgggtgccccagcatcggctctttcatttgcactcccaaaagtgccttggcctcgatattaccaaatcggtaaatgagctgagaatgttcagctgtgactccagtgccatgctgtggtggaaatgtgagcaccactctctgtacggagctgcccggtaccggctggctctgaaggatggacatggcacagcaatctcaaatgcatctgatgtctggaagaaaggaggctcagaggaaagcctttgtgaccagccttatcatgagatctataccagagatgggaactcttatgggagaccttgtgaatttccattcttaattgatgggacctggcatcatgattgcattcttgatgaagatcataacgggccatggtgtgccaccaccttaaattatgaatatgaccgaaagtggggcatctgcttaaagcctgaaaacggatgtgaagataattgggaaaagaacgagcagtttggacgatgctaccaatttaatactcagacggctctttctttggaagaagcctatgtttcatgtcagaatcaaggagctgatttactgagcaatcaacagtgctggtgaattaacttactttaagaaacaagaaaggacttgctaagattttctggattggtttaaatcagctatactctgctagaggctgggaatggtcagaccacaaaccattaaactttctcaactgggatccagacaggcccagtgcacctactataggtggctccagctgtgcaagaatggatgctgagtctggtctgtggcagagcttttcctgtgaagctcaactgccctatgtctgcaggaaaccattaaataatacagtggagttaacagatgtctggacatactcagatacccgctgtgatgcaggctggctgccaaataatggattttgctatctgctggtaaatgaaagtaattcctgggataaggcacatgcgaaatgcaaagccttcagtagtgacctaatcagcattcattctctagcagatgtggaggtggttgtcacaaaactccataatgaggatatcaaagaagaagtgtggataggccttaagaacataaacataccaactttatttcagtggtcagatggtactgaagttactctaacatattgggatgagaatgagccaaatgttccctacaataagacgcccaactgtgtttcctacttaggagagctaggtcagtggaaagtccaatcatgtgaggagaaactaaaatatgtatgcaagagaaagggagaaaaactgaatgacgcaagttctgataagatgtgtcctccagatgagggctggaagagacatggagaaacctgttacaagatttatgaggatgaggtcccttttggaacaaactgcaatctgactatcactagcagatttgagcaagaatacctaaatgatttgatgaaaaagtatgataaatctctaagaaaatacttctggactggcctgagagatgtagattcttgtggagagtataactgggcaactgttggtggaagaaggcgggctgtaaccttttccaactggaattttcttgagccagcttccccgggcggctgcgtggctatgtctactggaaagtctgttggaaagtgggaggtgaaggactgcagaagcttcaaagcactttcaatttgcaagaaaatgagtggaccccttgggcctgaagaagcatcccctaagcctgatgacccctgtcctgaaggctggcagagtttccccgcaagtctttcttgttataaggtattccatgcagaaagaattgtaagaaagaggaactgggaagaagctgaacgattctgccaagcccttggagcacacctttctagcttcagccatgtggatgaaataaaggaatttcttcactttttaacggaccagttcagtggccagcattggctgtggattggtttgaataaaaggagcccagatttacaaggatcctggcaatggagtgatcgtacaccagtgtctactattatcatgccaaatgagtttcagcaggattatgacatcagagactgtgctgctgtcaaggtatttcataggccatggcgaagaggctggcatttctatgatgatagagaatttatttatttgaggccttttgcttgtgatacaaaacttgaatgggtgtgccaaattccaaaaggccgtactccaaaaacaccagactggtacaatccagaccgtgctggaattcatggacctccacttataattgaaggaagtgaatattggtttgttgctgatcttcacctaaactatgaagaagccgtcctgtactgtgccagcaatcacagctttcttgcgactataacatcttttgtgggactaaaagccatcaaaaacaaaatagcaaatatatctggtgatggacagaagtggtggataagaattagcgagtggccaatagatgatcattttacatactcacgatatccatggcaccgctttcctgtgacatttggagaggaatgcttgtacatgtctgccaagacttggcttatcgacttaggtaaaccaacagactgtagtaccaagttgcccttcatctgtgaaaaatataatgtttcttcgttagagaaatacagcccagattctgcagctaaagtgcaatgttctgagcaatggattccttttcagaataagtgttttctaaagatcaaacccgtgtctctcacattttctcaagcaagcgatacctgtcactcctatggtggcacccttccttcagtgttgagccagattgaacaagactttattacatccttgcttccggatatggaagctactttatggattggtttgcgctggactgcctatgaaaagataaacaaatggacagataacagagagctgacgtacagtaactttcacccattattggttagtgggaggctgagaataccagaaaatttttttgaggaagagtctcgctaccactgtgccctaatactcaacctccaaaaatcaccgtttactgggacgtggaattttacatcctgcagtgaacgccactttgtgtctctctgtcagaaatattcagaagttaaaagcagacagacgttgcagaatgcttcagaaactgtaaagtatctaaataatctgtacaaaataatcccaaagactctgacttggcacagtgctaaaagggagtgtctgaaaagtaacatgcagctggtgagcatcacggacccttaccagcaggcattcctcagtgtgcaggcgctccttcacaactcttccttatggatcggactcttcagtcaagatgatgaactcaactttggttggtcagatgggaaacgtcttcattttagtcgctgggctgaaactaatgggcaactcgaagactgtgtagtattagacactgatggattctggaaaacagttgattgcaatgacaatcaaccaggtgctatttgctactattcaggaaatgagactgaaaaagaggtcaaaccagttgacagtgttaaatgtccatctcctgttctaaatactccgtggataccatttcagaactgttgctacaatttcataataacaaagaataggcatatggcaacaacacaggatgaagttcatactaaatgccagaaactgaatccaaaatcacatattctgagtattcgagatgaaaaggagaataactttgttcttgagcaactgctgtacttcaattatatggcttcatgggtcatgttaggaataacttatagaaataattctcttatgtggtttgataagaccccactgtcatatacacattggagagcaggaagaccaactataaaaaatgagaagtttttggctggtttaagtactgacggcttctgggatattcaaacctttaaagttattgaagaagcagtttattttcaccagcacagcattcttgcttgtaaaattgaaatggttgactacaaagaagaacataatactacactgccacagtttatgccatatgaagatggtatttacagtgttattcaaaaaaaggtaacatggtatgaagcattaaacatgtgttctcaaagtggaggtcacttggcaagcgttcacaaccaaaatggccagctctttctggaagatattgtaaaacgtgatggatttccactatgggttgggctctcaagtcatgatggaagtgaatcaagttttgaatggtctgatggtagtacatttgactatatcccatggaaaggccaaacatctcctggaaattgtgttctcttggatccaaaaggaacttggaaacatgaaaaatgcaactctgttaaggatggtgctatttgttataaacctacaaaatctaaaaagctgtcccgtcttacatattcatcaagatgtccagcagcaaaagagaatgggtcacggtggatccagtacaagggtcactgttacaagtctgatcaggcattgcacagtttttcagaggccaaaaaattgtgttcaaaacatgatcactctgcaactatcgtttccataaaagatgaagatgagaataaatttgtgagcagactgatgagggaaaataataacattaccatgagagtttggcttggattatctcaacattctgttgaccagtcttggagttggttagatggatcagaagtgacatttgtcaaatgggaaaataaaagtaagagtggtgttggaagatgtagcatgttgatagcttcaaatgaaacttggaaaaaagttgaatgtgaacatggttttggaagagttgtctgcaaagtgcctctgggccctgattacacagcaatagctatcatagttgccacactaagtatcttagttctcatgggcggactgatttggttcctcttccaaaggcaccgtttgcacctggcgggtttctcatcagttcgatatgcacaaggagtgaatgaagatgagattatgcttccttctttccatgactaa

SEQ ID NO: 22838 - DNA, 453 bp, Homo sapiens
  SIMILAR (3)..(452): 881254mologous to Homo sapiens immunoglobulin lambda light chain,accession number X57816,Smith-Waterman Score=685.
caggccagtcccctattttggtcatctatcatgaaaccaagcggccttcggggatctctgagcgattctctggctccacctctgggaacacagccactctgaccatcaccgggacccaggctatggatgaggctgactattactgtcaggcgggcagagacttcggcggggggaccaaactgaccgtcctaggtcagcccaaggctgccccctcggtcactctgttcccgccctcctctgaggagcttcaagccaacaaggccacactggtgtgtctcataagtgacttctacccgggagccgtgacagtggcctggaaggcacatagcaaccccgtcaaggcgggagtggagaccaccacaccctccaaacaaagcaacaacaagtacgcggccagcagctacctgagcctgacgcctgagcagtagaagtcccacagaagctacagctgcg

SEQ ID NO: 22839 - DNA, 354 bp, Homo sapiens
  SIMILAR (149)..(352): 971254mologous to synthetic construct immunoglobulin lambda light chain,accession number AF018265,Smith-Waterman Score=341.
tcggttctctgcttccagcgagggctcctccaactctggctccctcaccatctctggactgaagactgaggacgaggctgattactactggcagtcttatgatagcagcatttgggtgttcggcggagggaccaagctgaccgtcctaggagccgtgacagtggcctggaaggcagatagcagccccgtcaaggcgggagtggagaccaccacaccctccaaacaaagcaacaacaagtacgcggccagcagctgcctgagcctgacgcctgagcagtggaagtcccacaaaagctacagctgccaggtcacgcatgaagggagcaccgtggagaagacagtggcccctacaga

SEQ ID NO: 22840 - DNA, 315 bp, Homo sapiens
  SIMILAR (1)..(315): 1001254mologous to Homo sapiens V4-4,accession number D87018,Smith-Waterman Score=571.
cagcctgtgctgactcagccatcttcccattctgcatcttctggagcatcagtcagactcacctgcatgctgagcagtggcttcagtgttggggacttctggataaggtggtaccaacaaaagccagggaaccctccccggtatctcctgtactaccactcagactccaataagggccaaggctctggagttcccagccgcttctctggatccaacgatgcatcagccaatgcagggattctgcgtatctctgggctccagcctgaggatgaggctgactattactgtggtacatggcacagcaactctaagact

SEQ ID NO: 22841 - DNA, 866 bp, Homo sapiens
  SIMILAR (1)..(426): 991254mologous to Homo sapiens immunoglobulin lambda light chain,accession number X57824,Smith-Waterman Score=722.
atggcctggactctgctattcctcaccctcctcactcagggcacagggtcctgggcccagtctgccctgactcagcctgcctccgtgtctgggtctcctggacagtcgatcaccatctcctgcattggcaccagcagtgacattggtgcttattattttgtctcctggtaccagcaatatccaggcaaagcccccaaactcttgatttttgatgtcagtggtcggccctcagggatttctagtcgcttctctggctccaagtctggcaacacggcctccctgaccatctctgggctccaggctgaggacgaggctgattattattgcgcttcatatgcaagaagtagcacggtagtcttcggcggagggaccagcgtgaccgtccttggtcagcccaaggctgccccatcggtcactctggttcccgccctcctctgaggagcttcaagccaacaaggccacactggtgtgcctgatcagtgacttctacccgggagctgtgaaagtggcctggaaggcagatggcagccccgtcaacgcgggagtggagaccaccacaccctccaaacagagcaacaacaagtacgcggccagcagctagctacctgagcctgacgcctgagcagtggaagtcccacagaagctacagctgccaggtcacgcatgaagggagcaccgtggagaagacagtggcccctacagaatgttcataggttctcaaccctcaccccccaccacgggagactagagctgcaggttcccaggggagggggtctctctccccatcccaagtcatccagcccttcttcctacactcaataaaccctcaataaatatcctcagtcaaccagaaaaaaaaaaaaaaa

SEQ ID NO: 22842 - DNA, 1920 bp, Homo sapiens
  SIMILAR (1)..(381): 891254mologous to Homo sapiens immunoglobulin lambda light chain,accession number X57802,Smith-Waterman Score=601.
atggcatggatccctctcttcctcggcgtccttgcttactgcacaggttccgtggcctcctatgagctgactcagccaccctcagtgtccgtgtccccaggacagacagccagcatcacctgctctggagataaattgggggataaatatgcttgctggtatcagcagaagccaggccagtcccctgtgctggtcatctatcaagatagcaagcggccctcagggatccctgagcgattctctggctccaactctgggaacacagccactctgaccatcagcgggacccaggctatggatgaggctgactattactgtcaggcgtgggacagcagcactgcacacagtgacacaggcagatgcggaatagtgggaagaccccctgtcaggcagtgctggcccctgctgctgctgggtctggccatggtcgcccatggcctgctgcgcccaatggttgcaccgcaaagcggggacccagaccctggagcctcagttggaagcagccgatccagcctgcggagcctgtggggcaggctcctgctccagcccagcccccagagagcagaccccaggtgctggccccgggggttttggtctgagcctcagtcactgtgttatgtcttcggaactgggaccaaggtcaccgtcctaggtcagcccaaggccaaccccactgtcactctgttcccgccctcctctgaggagctccaagccaacaaggccacactagtgtgtctgatcagtgacttctacccgggagctgtgacagtggcctggaaggcagatggcagccccgtcaaggcgggagtggagaccaccaaaccctccaaacagagcaacaacaagtacgcggccagcagctacctgagcctgacgcccgagcagtggaagtcccacagaagctacagctgccagctgcagtgggggctggggctaggggcatcccagggagggtttttgtatgagcctgtgtcacagtgtgtggtattcggcggagggaccaagctgaccgtcctaggtcagcccaaggctgccccctcggtcactctgttcccgccctcctctgaggagcttcaagccaacaaggccacactggtgtgtctcataagtgacttctacccgggagccgtgacagtggcctggaaggcagatagcagccccgtcaaggcgggagtggagaccaccacaccctccaaacaaagcaacaacaagtacgcggccagcagctacctgagcctgacgcctgagcagtggaagtcccacagaagctacagctgccagaaacctaaccacgcatcacacggcacttctcgcatgccttctgtgtctgctccagtctctgggctaaagagttgctggtccgggacaggggataggtccgctcttggtcagatgccaggtccctgccatggcatccctgaccctatgcaacaagccagtgactctggtcagcccaaggctgccccctcggtcactctgttcccgccctcctctgaggagcttcaagccaacaaggccacactggtgtgtctcataagtgacttctacccgggagccgtgacagtggcctggaaggcagatagcagccccgtcaaggcgggagtggagaccaccacaccctccaaacaaagcaacaacaagtacgcggccagcagctacctgagcctgacgcctgagcagtggaagtcccacaaaagctacagctgccaggtcacgcatgaaggggagcaccgtggagaagacagtggcccctacagaatgttcataggttcccaactctaaccccacccacgggagcctggagctgcaggatcccaggggagggggtctctctccccatcccaagtcatgccggcccttctccctgcactcctgaaaccccaataaatatcctcattgacaaccaggtcgacgcggccg

SEQ ID NO: 22843 - DNA, 2004 bp, Homo sapiens
  SIMILAR (784)..(1464): 971254mologous to Homo sapiens S-adenosylmethionine synthetase,accession number X68836,Smith-Waterman Score=1161.
atggtgctggactcaaacggcatctgtatgcacctgggcctgtgcaaatcccggcagccagagccagagcaggagccagggatgtcagaccccctgcccaaacctctgcgggaccctctgccagaccctctgctggacaagctcgtcctccctgtgctgcccggggccctccaggcgaggcctgggcctcacacacaggatctctccgagcagcaattccccattcctctcccctattgctggctctgcagggctctgatcaagcgaatccaagccatgattcccaagggtgcgctagctgtggcagtggcccaggtgtgccgcgtggtacctctggtggcgggcggcatctgccagtgcctggctgagcgctactccgtcatcctgctcgacacgctgctgggccgcatgctgccccagctggtctgccgcctcgtcctccggtgctccatggatgacagcgctggcccaaggtcgccgacaggagaatggctgccgcgagactctgagtgccacctctgcatgtccgtgaccacccaggccgggaacagcagcgagcaggccataccacaggcaatgctccaggcctgtgttggctcctggctggacagggaaaaggaatgtgccctcctcgatgaacgcctcgtggaagccgttgagctgtccgttcatgttggtgtcggtgtgcggaagtggccttacgaaggagcagcggcgaggcggcagcggctgcgaaatgcgcaagctgcggacagcgttctactcgtagcaggcgggcggcgcggagcgaacgaagcagcgggcggttttgactacaagacttgtaacgtgctggtagccttggagcaacagtcaccagatattgctcaaggtgttcatcttgacagaaatgaagaagacattggtgctggagaccagggcttaatgtttggctatgccactgatgaaactgaggagtgtatgcctttaaccattgtcttggcacacaagctaaatgccaaactggcagaactacgccgtaatggcactttgccttggttacgccctgattctaaaactcaagttactgtgcagtatatgcaggatcgaggtgctgtgcttcccatcagagtccacacaattgttatatctgttcagcatgatgaagaggtttgtcttgatgaaatgagggatgccctaaaggagaaagtcatcaaagcagttgtgcctgcgaaataccttgatgaggatacaatctaccacctacagccaagtggcagatttgttattggtgggcctcagggtgatgctggtttgactggacgcaaaatcattgtggacacttatggcggttggggtgctcatggaggaggtgccttttcaggaaaggattataccaaggtcgaccgttcagctgcttatgctgctcgttgggtggcaaaatcccttgttaaaggaggtctgtgccggagggttcttgttcagtctgagcacttcaagacgacatcgcagaaggtggctcgaaaattctggtggaagaacgtgaagatgattgtccttatctgcgtgattggttttatcatcatcctcttcattgtgctctttgccactgagaatgctgctcggtcctcctacccctcttcccgaggccctgctgccatgttgtatgccccagaaggccggggtttgaagtctcacgcctacattcacagtgtccagtttagccaccatgttttcctcaacctccacaccctcaagttttactgccttccagacaactatgagatcatcgattcctcattggaggatatcacgagctcaaccttcaacaagactacacagaacctggcccagaagaagtgctgggagaacatccgttaccggatctgcgtggggctggtggtggttggtgtcctgctcatcatcctgattgtgctgctggtcgtctttctccctcagagcagtgacagcagtagtgccccacggacccaggatgcaggcattgcctcagggcctgggaactga

SEQ ID NO: 22844 - DNA, 1588 bp, Homo sapiens
  SIMILAR (1020)..(1493): 831254mologous to Homo sapiens S-adenosylmethionine synthetase,accession number X68836,Smith-Waterman Score=642.
  misc_feature (1)...(1588): n = a,t,c or g
gcggccgcgcagtgtggttcagcccggactccgcggggcgagctgcccttcctcccccgacccccgcgcaagtggtgcattggcgcgcggcgccgaggggcggggcccgagccgggcgcgcgcgggcgctgctctataaataccgggccgcaccgcccgctgcttcgttcgctccgcgccgcccgcctgctacgagtagaacgctgtccgcagcttgcgcatttcgcagccgctgccgcctcgccgcctgctccttcgtaaggccacttccgcacaccgacaccaacatgaaccggacagctcaacggcttccacgaggcgttcatcgaggagggcacattccttttcacctcagagtcggtcggggaaggccacccacgataagattttgtgaccaaatcagtggatgctgtccttgatgcccaccttcagcaggatcctgatgccaaagtagcttcgtgaaactgttgctaaaactggaatgatccttctttgctggggaaattacatccagagctgctgtttgacttacccagaaaagtggttcgtgaaagctgtttaaacacattggaatatgatgattcttccaaaggtttttgactacaaagacttgtaaacgtgctggtagccttggagcaacagtcaccagatattgctcaaggtgttcatcttgacagaaatgaagaagacattggtgctggagaccagggcttaatgtttggctatgccactgatgaaactgaggagtgtatgcctttaaccattgtcttggcacacaagctaaatgccaaactggcagaactacgccgtaatggcactttgccttggttacgccctgattctaaaactcaagttactgtgcagtatatgcaggatcgaggtgctgtgcttcccatcagagtccacacaattgttatatctgttcagcatgatgaagaggtttgtcttgatgaaatgagggatgccctaaaggagaaagtcatcaaagcagttgtgcctgcgaaataccttgatgaggatacaatctaccacctacagccaagtggcaganttttgttattggtgggcctcagggtgatgctggtttgacctggacggaaaatcatttgtggacacttatggcggttggggtgctcatggaggaaggtgccttttcaggaaaggattataccaaggtcgaccgttcagctgcttatgctgctcgttgggtggcaaaatcccttgttaaaggaggtctgtgccggagggttcttgttcaggtctcttatgctattggagtttctcatccattatctatctccattttccattatggtacctctcagaagagtgagagagagctattatagattgtgaagaagaatttcgatctccgccctggggtcattgtcagggatctggatctgaagaagccaatttatcagaggactgcagcctatggccactttggtagggacagcttcccatgggaagtgcccaaaaagcttatatattgaaagtgttagccttttttccccagacttgttggcgtaggctacagagaagccttcaagctctgagggaaagggccctccttcctaaattttcg

SEQ ID NO: 22845 - DNA, 1801 bp, Homo sapiens
  SIMILAR (852)..(974): 871254mologous to Homo sapiens S-adenosylmethionine synthetase,accession number X68836,Smith-Waterman Score=189.
gcctgctacgagtaaaacgctgtgcgcagtttgcgcatttctcaggcgctgtcgcctcgccgttgattcttcgtaaggtcactttcgcacaccgacaccaacatgaacggacagctcaacgggttccacgaggcgttgatcgaggagggcacattccttttcacctcaaaggccgacggggaaggccacccagataagatttgtgaccaaatcagtgaagctgtccttgatgcccaccttcatcaggatcctgatgccaaagtagcttgtgaaactgttgctaaaactggaatgatccttcttgctggggaaattacatccagagctgctgttgactaccagaaagtggttcgtgaagctgttaaacacattggatatgatgattcttccaaaggttttgacgtacaagacttgtaacgtgctggtagccttggagcaacagtcaccagatattgctcaaggtgttcatcttgacagaaatgaagaagacattggtgctggagaccagggcttaatgtttggctatgccactgatgaaactgaggagtgtatgcctttaaccattgtcttggcacacaagctaaatgccaaactggcagaactacgccgtaatggcactttgccttggttacgccctgattctaaaactcaagttactgtgcagtatatgcaggatcgaggtgctgtgcttcccatcagagtccacacaattgttatatctgttcagcatgatgaagaggtttgtcttgatgaaatgagggatgccctaaaggagaaagtcatcaaagcagttgtgcctgcgaaataccttgatgaggatacaatctaccacctacagccaagtggcagtatttgttattggtgggcctcagggtgatgctggtttgactggtcgcataatcattgtggacccttatgacggttggggtgctcatgaagaaggtgccttttcaggaaaggattataccaaggtcaggccgttcagctgcatatggtgctcgttgggtggcaagatcccttgttaaaggaggtctgtgccggagggttcttgttcaggtgccaggccctccaaagaaacctgatgaggacctctacttggaatgtgagccggatccagtcctggctttgactcagactctcagcttccaagtcctgatgccctcaggccctctgcccaggacatcagtggtgcccagggaacagcagatgctgcctctaaaggacagtgatctgctgactcagccttggtactcggggaactgtgaccgctatgctgttgagagtgccctgctccacttacaaaaggatggggcctataccgtgcgccccagctcagggcctcatggctcccagcccttcaccctggcagtgcttctccgaggccgggtcttcaacattcccatccggcggctggatggcggacgccactatgccctgggccgggagggcaggaaccgtgaggagctcttctcctccgtggcggccatggtccagcacttcatgtggcaccctctgccccttgtggacagacacagcggcagccgggaactcacctgcctgctcttccccaccaagccttgaggccacagcgaagaatgcaggtgtctgcccagttcactaggtcctggatgaaggaaccgtggtggcctagaccagtcaggggacagcacaggcactgctggaacagcaaaggatcctctcacatgtacttgtgggcctagggcaccctgagagggactggcctaccttgcacaagttcacagtcaataaacatttgttgattgaaaaaaaaaaaaaaaaa

SEQ ID NO: 22846 - DNA, 341 bp, Homo sapiens
  SIMILAR (3)..(212): 971254mologous to Homo sapiens Sequence of human FcR encoded by HFc3.1 cDNA,accession number P70447,Smith-Waterman Score=370.
tcatgctgaggtgccacagctggaaggacaagcctctggtcaaggtcacattcttccagaatggaaaatcccagaaattctcccgtttggatcccaccttctccatcccacaagcaaaccacagtcacagtggtgattaccactgcacaggaaacataggctacacgctgttctcatccaagcctgtgaccatcactgtccaagccaattccactgatcctgtgaaggctgcccaatttgagccacctggacgtcaaatgattgccatcagaaagagacaacttgaagaaaccaacaatgactatgaaacagctgacggcggctgaccatcggagcggccg

SEQ ID NO: 22847 - DNA, 1489 bp, Homo sapiens
  SIMILAR (81)..(1010): 991254mologous to Homo sapiens Fc-gamma-RIIb1,accession number U87560,Smith-Waterman Score=1659.
gccctctagggtagaatcgccaagctttgagagaaggctgtgactgctgtgctctgggcgccagctcgctccagggagtgatgggaatcctgtcattcttacctgtccttgccactgagagtgactgggctgactgcaagtccccccagccttggggtcatatgcttctgtggacagctgtgctattcctggctcctgttgctgggacacctgcagctcccccaaaggctgtgctgaaactcgagccccagtggatcaacgtgctccaggaggactctgtgactctgacatgccgggggactcacagccctgagagcgactccattcagtggttccacaatgggaatctcattcccacccacacgcagcccagctacaggttcaaggccaacaacaatgacagcggggagtacacgtgccagactggccagaccagcctcagcgaccctgtgcatctgactgtgctttctgagtggctggtgctccagacccctcacctggagttccaggagggagaaaccatcgtgctgaggtgccacagctggaaggacaagcctctggtcaaggtcacattcttccagaatggaaaatccaagaaattttcccgttcggatcccaacttctccatcccacaagcaaaccacagtcacagtggtgattaccactgcacaggaaacataggctacacgctgttctcatccaagcctgtgaccatcactgtccaagctcccagctcttcaccgatggggatcattgtggctgtggtcactgggattgctgtagcggccattgttgctgctgtagtggccttgatctactgcaggaaaaagcggatttcagctctcccaggataccctgagtgcagggaaatgggagagaccctccctgagaaaccagccaatcccactaatcctgatgaggctgacaaagttggggctgagaacacaatcacctattcacttctcatgcacccggatgctctggaagagcctgatgaccagaaccgtatttagtctccattgtcttgcattgggatttgagaagaaaatcagagagggaagatctggtatttcctggcctaaattccccttggggaggacagggagatgctcgagttccaaaagagaaggtttcttccagagtcatctacctgagtcctgaagctccctgtcctgaaagccacagacaatatggtcccaaataaccgactgcacctgctgtcttcagctcttcttgacatcaaggctcttccgttccacatccacacagccaatccaattaatcaaaccactgttattaacagataatagcaacttgggaaatgcttatgttacaggttaccgttgagaacaatcatctaaatctatatgatttcagaaatgttaaaatagactaacctctaccagcacattaaaagtgattgtttctgggtgatttattgatgatttttattttctttatttttctataaagatcatatattactttt

SEQ ID NO: 22848 - DNA, 2407 bp, Homo sapiens
  SIMILAR (136)..(441): 851254mologous to Homo sapiens 01-DEC-1992 Human CDw52 antigen cDNA,accession number V63447_cd1,Smith-Waterman Score=459.
ctgtgactgctgtgctctgggcgccactcgctccagggagtgatgggaatcctgtcattcttacctgtccttgccactgagagtgactgggctgactgcaagtccccccagccttggggtcatatgcttctgtggacagctgtgctatccctggctcctgttgctgggacacctgcagctcccccaaaggctgtgctgaaactcgagccccagtggatcaacgtgctccaggaggactctgtgactctgacatgccgggggactcacagccctgagagcgactccattcagtggttccacaatgggaatctcattcccacccacacgcagcccagctacaggttcaaggccaacaacaatgacagcggggagtacacgtgccagactggccagaccagcctcagcgaccctgtgcatctgactgtgctttctggtcagtggaggaaggccccagggtggacctgggagggccaggacggatgaaatctgctttcaggcagaggtttgcaggaaaggggggtggcctgcttactgggaagtatcgctgtgagttgcctcagcacatatcagtggttgtttttgcctcagttctgattgaacagaagaaggtttcaaggccaaaaacaggcagccaagtgtgagagaagcagaaggaaatccctactgcataaaacccatttccattttaatggcagaattgaaaagcacagaccacaactgaatcctagccctggaaatgactcactatacaacatgatgaattcatttaacccttgagtttccatttcttcacctgctccgtggggcactaacgcctccctcagaggcttctggtgagaatcagtgtttccctgcccccgccccgccctccatgccccttctccacgttctcactgtgctaggtgctcttctctgtctttctcttccaccagcctgtgggaaacctgagatgaaagtcgtgtcttacccatctttgtatttccagcatctgaaactgggcagagcttaataaatattttgctggagaggttgatgatcttacaaagctcccattgaaaggtggctctctgtaaagcaaagttacaatgagattgtgatgaacattgtccttgtggcttttcacttagtcccctcccttcacctgaagagcaaattttcctcaaaagtacacagcaaacgaatgacccactggtgacactgttgcctttagaccctgctggaaagaagctccacatttattaacattcccgaagtaaatttatcaggtagcattcatcaggtaacatttgttgcacattcatgacttttctactgtccacaaaggcatatgtccttatcatatgcggactcctcggtcacactggattcttccttccctcctcgacatggaagagatggcatcttagggtctcttgtgttcttcctgcagaggcctgtcgggcaggaaaaggctgcagctgccttcctgggagaaggaggagatgagtgtatcctgaacacctattatgtgctaggggctattgtagatacatgacactatcatgctcattttcacgaatgaggaaactgaggctcagaagacttaaattatttgcccaagagttataaatgacagagccagcattagagtccaggactgtctgatttcagacctaagctgttccctctgcacatcgtgtcccaccagtaaggaagatctgggtctcagagctgagccaagacctcccgggtcctctgcggttttttgtgtctttcagagtggctggtgctccagacccctcacctggagttccaggagggagaaaccatcgtgctgaggtgccacagctggaaggacaagcctctggtcaaggtcacattcttccagaatggaaaatccaagaaattttcccgttcggatcccaacttctccatcccacaagcaaaccacagtcacagtggtgattaccactgcacaggaaacataggctacacgctgtactcatccaagcctgtgaccatcactgtccaagtgcccagcatgggcagctcttcaccaatggggatcattgtggctgtggtcattgcgactgctgtagcagccattgttgctgctgtagtggccttgatctactgcaggaaaaagcggatttcagccaattccactgatcctgtgaaggctgcccaatttgagatgctttcctgcagccacctggacgtcaaatgattgccatcagaaagagacaacctgaagaaaccaacaatgactatgaaacagctgacggcggctacatgactctgaaccccagggcacctactgacgatgataaaaacatctacctgactcttcctcccaacgaccatgtcaacagtaataactaaagagtaacgttatgccatgtggtcatactctcagcttgctgagtgg

SEQ ID NO: 22849 - DNA, 1644 bp, Homo sapiens
  SIMILAR (83)..(613): 481254mologous to Homo sapiens IgG Fc receptor beta-Fc-gamma- RII,accession number M28696,Smith-Waterman Score=325.
  misc_feature (1)...(1644): n = a,t,c or g
ggcacgaggggtagaatccgccaagctttgagagaaggctgtgactgctgtgctctgggcgccagctcggctccagggagtgatgggaatcctgtcattcttacctgtccttgccactgagagtgactgggctgactgcaagtccccccagccttggggtcatatggcttctgtgggacagctgtgctattcctggctcctgttgctgggacacctgcagctcccccaaaggctgtgctgaaacttcgagccccagtgggatcaacggtggctccagggaggactctgtgactctggacatgccngggggactcacagccctggagagcgactccattcagtggttccacaatggggaatcttcattcccacccacacgcagcccagcttacaggtttcaagggccaacaacaatggacagcggggagttacacgtgccagactggccagaccagcctcagcgaccctgtgcatctgaactgtgctttctgagtggctggtgctccagacccctcacctggagttccaggagggagaaacacatcgtgctgaggtgccacagcctggagggacaagccctctggtcaaggtcacatttttttcacaatggaaaatccaagaaattttcccgttcggatcccaacttctccatcccacaagcaaaccacagtcacagtggtgattaccacttgcacagggaaacatagggttacacgctgttattcattccaaggctgttgaccatcactgtccaagctcccagctcttcaccgatggggatcattgtggctgtggtcactgggactgctgtagcggccattgttgctgctgtagtggccttgatctactgcaggaaaaagcggatttcagccaatcccactaatcctgatgaggctgacaaagttgggggctgaggaacacaatcacctatttcacttctcaatggcacccgggatggctctgggaagagcctgatgaccagaaccgtattttagtctccattgtcttggcattggggatttggagaagaaactcagagagggaagatctggtatttcctggcctaaaattcccccttggggaggacacggggagatgctgccagttcccaaaagagaaggttttccttccgggagtcatcctaccctgagtccctgaagctcccctgtccctgaaaaggcccacagacaatatgggtccccaaatgacccgacctggacccttcctgtgccttcagctccttccttgacatcaaggctccttcccgttcccacatcccacacagcccaatcccaattaatcaaaccacttgttattaacagataatagccaacctggggaaatgcttatgttacaggttaccgttgagaacaatcatctaaatctatatgatttcagaaatgttaaaatagactaacctctaccagcacattaaaagtgattgtttctgggtgataaaattattgatgatttttattttctttatttttctataaaggtcatatattacttttataattaaaacattataaaaacaacattctgtttaccttttcaaggctgtattggttggagtgtagactgaactgcctggggtctgtttctcttcagtgatgagactcttaggaaggcaggaatggatag

SEQ ID NO: 22850 - DNA, 474 bp, Homo sapiens
  SIMILAR (106)..(471): 661254mologous to Homo sapiens 60S RIBOSOMAL PROTEIN; match to P02433 (PID:g132886),accession number AC004453,Smith-Waterman Score=396.
atgaagtcttccttccaaggacataacaaagaaaaaagagaaaaaaaaggcccctctctcttcagtgctgcctacggaggtggcagctgtctcctcctcagcatcatggccgccctcagacccctcgtgaagcccaagatcgtcaaaaagagaaccaaggagttcatctggcaccagtcagaccaacatgtcaaaattaagtgtaactggaggaaacccagagggccagatcttgatgcccaacactggtcatgggagcaacaaaaaacaaagcacatgctgcccagtggcttccggaagttcctggtccccagcgtcaaggagctggaagtgctgatgtgcaacaaatctccctgtgctgagatcgctcacagtgtttcctccaagaaacaaaaccatcgtggaaagggccgcccagctgccgtcagagtcaccaaccccaatgccaggctgcgcagtgaagaaaatgagtag

SEQ ID NO: 22851 - DNA, 859 bp, Homo sapiens
  SIMILAR (288)..(560): 421254mologous to Homo sapiens rpL32 (aa 1-135),accession number X03342,Smith-Waterman Score=109.
gctgcgagaagacgaagaaggggtgctgctgtaggaaatcaatggctcggaagaccacactgaggaaggtgtgagttgatactggaagatctccaggtttgaggcatcttcagaggcatcatggccgccctcagaccccttgtgaagcccaagatcgtcaaaaagagaaccaagaagttcatccggcaccagtcagaccgatatgtcaaaattaagcgtaactggcggaaacccagaggcattgacaacagggttcgtagaagattcaagggccagatctttgatgcccaacattggttatgggaagcaacaaaaaaacaaaggcacatgctgcccaagtggctttccgggaagttcctggggtcccaccaacgttcaagggagctgggaagttgcttgcttgatgttgcaacaaattctttacttgttgcccgagattcgtttcacattgtttttccttccaaggaaccggcaaaggccttcgtggggaaaggagcttgcccaactgggccttcagagtcaccaaccccaatgccaggctgcgcagtgaagaaaatgagtaggcagctcatgtgcacgttttctgtttaaataaatgtaaaaactgccatctggcatcttccttccttgattttaagccttcagcttcttggccaacttagtttgccacagagattgttcttttgcttaagcccctttggaatctcccatttggaggggatttgtaaaggacactcagtccttgaacaggggaatgtggcctcaagtgcacagactagccttagtcatctccagttgaggctgggtatgaggggtacagacttggccctcacaccaggtaggttctgagacactggaa

SEQ ID NO: 22852 - DNA, 484 bp, Homo sapiens
  SIMILAR (94)..(213): 401254mologous to Homo sapiens H-chain C-region MAL protein mRNA,accession number M31607,Smith-Waterman Score=71.
gaaggggtgtggaattcctgggggggtctttaattctggctccttccttcctcagaatgcttagaaggttcccagacacagagcccagatgtcccccaccaccggtcaggacctccttgaggtgcacaagcacggtctcctctgagttcaccccagcccacccccgcacccactaattctgcttttcctgccccttgctccgtaaaagtatcaaatactttctccttggtatctcaaggaggtttctgagataggtagaagtcttgagacggaggctggccatccattcagccctgagcgtgctgagttctgtgtttctctgaatagaggtgtggaacctgaggggccagcaggcctctctgaaggcctccatggagcaaacggagccacctcgggaaagagtttaatggaatatttttgtacccgatgtttacagatgctgttgggaagttatcaataaaaagacaccattactaaaaaggga

SEQ ID NO: 22853 - DNA, 1517 bp, Homo sapiens
  SIMILAR (223)..(687): 421254mologous to Homo sapiens R26445_1,accession number AC005253,Smith-Waterman Score=232.
  misc_feature (1)...(1517): n = a,t,c or g
ggcacgaggacgcacgcaagcggctccagggtacgtccccgccacgcgcgctcgcaggatcggtgcgtggtgacgtttcgccggcgcgggcgccatcccggaagcgcgagcaaggccgccagatgtgcaggcagcggaggaggagaaagagatggacctcccggactcggcctcgagggtcttctgggggacgcatcctcgaacatgggtgaacaccgaatgaatgtcaacgccatcatcctgtgcccagaagaacatgctggaccagctttgagaagaccaaatgagatgctgctcaacttcaacaacctgtccagtgcccgccttgcaagcagattgagcgaacgcttcctgcaccacacgaggaccctagtagagatgaaacgggacctgggacagcatcttccgccgtatcaggacgctgaaagggaaactggccaggcagcacccagaggccttcagccatatcccagaggcatccttcctggaggaagaggattgaagaccccattcccacccaggcaccaacgaccaccattgccacctcagaacatgagcactgggctcatgttgacaccagccccgacaccgtcttcgccctcccttgagcccctggcttctgaggacctgtcccatgtccaagccttggcttccccagccattcaacgggccgcagccagatcagattgacgaggagatgacgggtcgaatagccctgcctgcccggtgcctttgagggggtctcagggcagcagcattacaaggtggcagcgggtaacccctgccttgttctgtcatccagggctcctttgctgccccgtactgtacacccagggctcctagggggacaaggctctctcccgaggggtgtggaattcctgggggggtctttaattctgggctccttccttcctcagaacatctctattctgcaagaccccttctgccatgccagggcacgcccacttccagctggagtcgtggggcttgggcacagggggaatttttccagcagcctgcagcctgacggtctgctctgcaagaatgcttagaaggtttccccagacacccagagcccagatgtcccccccaccaccgggtcaggaccttccttgaggttgcacaagccacggtctcctctggagtttcacccccagccccacccccgcacccacgtaattctgcttttcctgccccttgctcccgtaaaaagtactcaaatacgtttcttcctttggtatctcaaggaggtttctgagataggtagaagtcttgagacggaggctgggccatccgattcagccctgagcgtgctgagttctggtgtttctctgaataagaggtgtggaacctgaggggccagcagctcntctctgaaggcctccatggagcaaacggagccacctgccgggaaagagtttaatgggaatatttttttgtaccccgatgtttacagatgctgttgggaagttatcaataaaaagacaccgattactaaaaagggaaaagtacaccta

SEQ ID NO: 22854 - DNA, 461 bp, Homo sapiens
  SIMILAR (64)..(231): 1001254mologous to Homo sapiens C6.1A,accession number X64643,Smith-Waterman Score=296.
aaatgcgcacagttgctgaaaaggttgatgccgtcagaattgttcacattcattctgtcatacatcttacgacgttctgataagaggaaggaccgagtagaaatttctccagagcagctgtctgcagcttcaacagaggcagagaggttggctgaactgacaggccgccccatgagagttgtgggctggtatcattcccatcctcatataactgtttggccttcacatgttggtaagtatcatggggttgcaatgtttattgttttcagaaattaatatcatgtttccttttccattacatagggtatggttattttaaaccaaaatttgactgtcctttagcagatgtcattattttgatttattttattatgtattaaaagtaatgatttatgtcatattgattgtttttaataagtctgtcagttgatataaaaaaattaaactgttaactgaaaaaa

SEQ ID NO: 22855 - DNA, 1563 bp, Homo sapiens
  SIMILAR (1)..(555): 1001254mologous to Homo sapiens c6.1A,accession number S68015,Smith-Waterman Score=948.
  misc_feature (1)...(1563): n = a,t,c or g
gccaagatggcggtgcaggtggtgcaggcggtgcaggcggttcatctcgagtctgacgctttcctcgtttgtctcaaccacgctctgagcacagagaaggaggaagtaatggggctgtgcataggggagttgaacgatgatacaaggagtgactccaaatttgcatatactggaactgaaatgcgcacagttgctgaaaaggttgatgccgtcagaattgttcacattcattctgtcatcatcttacgacgttctgataagaggaaggaccgagtagaaatttctccagagcagctgtctgcagcttcaacagaggcagagaggttggctgaactgacaggccgccccatgagagttgtgggctggtatcattcccatcctcatataactgtttggccttcacatgttgatgttcgcacacaagccatgtaccagatgatggatcaaggctttgtaggacttattttttcctgtttcatagaagataagaacacaaagactggccgggtactctacacttgcttccaatccatacaggcccaaaagagttcagagtatgagagaatcgaaatccccaatccatattgtacctcatgtcactatcgggaaagtgtgccttgaatcagcagtagagctgcccaagatcctgtgcccanggaggagcaggatgcgtataggaggatccacagccttacacatctggactcagtaaccaagatccataatggctcagtgtttaccaagaatctgtgcagtcagatgtcggcagtcagcgggcctctcctacagtggttggaggacagactggagcaaaaccaacagcatttgcaggaattaccaccaggaaaaggaggagcttatgcaagaactttcttctctagaataaatcaggagacaaaatggggaaagatgaaaatatccagtgtaaagttacttaagctaaatcaatttcaaagaagaaaaacttggaggactcattttacctgacttcaagacttactataaagctatagtaatcaagatagatggtattggcagaggaacagacacatacgtcaatggaacagatgagagaacccagaaataaacccatataaatatgctcagctgattttgaaaaagtgaaaaagcaattcaatggaggaagaatagcctttctgacaaattatgctagagcaattagacacccatggcgaggagaaaaaagaacctctacttaaacctcacatcttatataaaatttaactcaaaatgtataacggacttaaatgtgatacataaaactagataactttgaaaaaagccacaggagaaaaatcttcaggatccttgggctaggtgacaagttcttggactttgccccgaaagcacatccataaaagacaaaatctgatatattggacttcttcaaaatttaaaaacttgtgatttaagaagaggaaaagataagctacagattgagatgaatttgcaaaccatatatctgatcaatttggaatatataaagtgtactaaaaactcaactgaagtcaggcatggtagctcatgcttggtaatctcacc

SEQ ID NO: 22856 - DNA, 1389 bp, Homo sapiens
  SIMILAR (19)..(276): 981254mologous to Homo sapiens c6.1A,accession number S68015,Smith-Waterman Score=417.
  misc_feature (1)...(1389): n = a,t,c or g
atttagtaattaaaagcaatgagctgggccaagatggcagtgcaggtggtgcaggcggtgcaggcggttcatctcgagtctgacgctttcctcgtttgtctcaaccacgctctgagcacagagaaggaggaagtaatggggctgtgcataggggagttgaacgatgatacaagtaggagtgactccaaatttgcatatactggaactgaaatgcgcacagttgctgaaaaggttgatgccgtcagaattgttcacattcattctgtcatcatcttaacgacgttctgataagaggaaggaccaagtagaaatttcaccagggcagctgtctgcagcttcaacagaggcagagaagttggctgaactgacaggccaccccatgagagttgtgggctggtatcattcccatcctcatataactgtttggccttcacatgttgatgttcgcacccaagccatgtaccagatgatggatcaaggctttgtaggacttattttttcctgtttcatagaagataagaacacaagggctggccgggtactctacacttgcttccaatccatacaggcccaaaagagttcagagtcccttcatggtccacaagacttctggagctccagccagcacatctccattgagggccagaaggaagaggaaaggtatgagagaatcgaaatcccaatccatattgtacctcatgtcactatcgggaaagcgtgccttgaatcagcagtagagctgcccaagatcctgtgccaggaggagcaggatgcatattggaggatccacagccttacacatctggactcagtaaccaagatccataatggctcagtgtttaccaagaatctgtgcagtcagatgtcggcagtcagcgggcctctcctacagtggttggaggacagactggagcaaaaccaacagcatttgcaggaattacaacaagaaaaggaagagcttatgcaagaactttcttctctagaataaatcaggagacaaaatggggaaagatgaaaatatccagtgtaaagttacttaagctaaatcaatttcaaagaagaaaaacttggaggactcatttnnnnnnnnnnnnnnnnnnnnnnnnnnnnnnnnnnnnnnnnnnnnnnnnnnnnnnnnnnnnnnnnnnnnnnnnnnnnnnnnnnnnnnnnnnnnnnnnnnnnnnnnnnnacccatataaatatgctcagctgattttgaaaaagtgaaaaagcaattcaatggaggaagaatagcctttctgacaaattatgctagagcaattagacacccatggcgaggagaaaaaagaacctctacttanacctcacatcttatataaaatttaactcanaatgtataacggacttaaatgtgatacataagactag

SEQ ID NO: 22857 - DNA, 1365 bp, Homo sapiens
  SIMILAR (874)..(1362): 991254mologous to Homo sapiens MJD1 protein,accession number S75313,Smith-Waterman Score=813.
atggagaagtcacttctctttccctcgctgaccacttctgccgggaacgaccgggacagtcgcagccgaagcggcgggggcgagtcctcgggggagaccgggtcggagtcggggccccgtgctcccggagggccaatgacgccgccttccccagcccgaggctcgctcctttctcccgccctcacttgcctccccttcccaacccctaggcgaatccaggttcaagacgtagaaaagccgatgctgggtcagcagcgccagggactaccggccggcagaagccccacagtggcagccgccattttggagctggagactagcggcggagacgaggaggaaccagggcgagaccatctccggggggtgggcacggtgctgtcggaaggcgacggcggtcacgcctgcacgcctcgtctgtctggagcgaaattttattcagaaattattgctatcatggtgaacttacttcagattgtgcgggaccactgggttcatgttcttgtccctatgggatttgtcattggatgttatttagacagaaagagtgatgaacggctaactgccttccggaacaagagtatgttatttaaaagagatggctcctctggcagcagagagttccagttagcaagacaggatgcctgccagtgggcatacagctgggtaggaggaagcctgaggggcaagagaactgagcagcatccacagtggcaagaaggctcactttgtgctcaacattgcctgaataacttattgcaaggagaatattttagccctgtggaattatcctcaattgcacatcagctggatgaggaggagaggatgagaatggcagaaggaggagttactagtgaagattatcgcacgtttttacagtggtttaacttgaattctctcttgacgggtccagaattaatatcagatacatatcttgcacttttcttggctcaattacaacaggaaggttattctatatttgtcgttaagggtgatctgccagattgcgaagctgaccaactcctgcagatgattagggtccaacagatgcatcgaccaaaacttattggagaagaattagcacaactaaaagagcaaagagtccataaaacagacctggaacgagtgttagaagcaaatgatggctcaggaatgttagacgaagatgaggaggatttgcagagggctctggcactaagtcgccaagaaattgacatggaagatgaggaagcagatctccgcagggctattcagctaagtatgcaaggtagttccagaaacatatctcaagatatgacacagacatcaggtacaaatcttacttcagaagagcttcggaagagacgagaagcctactttgaaaagtaa

SEQ ID NO: 22858 - DNA, 704 bp, Homo sapiens
  SIMILAR (397)..(540): 891254mologous to Homo sapiens CI-MNLL homolog gene,accession number AF054181,Smith-Waterman Score=214.
  misc_feature (1)...(704): n = a,t,c or g
tgcattgtgagaggttctaaatatgttttacacaagtaaaagtcctaaatgagagccaggtgcagtggtgtatgcctgtggtctcagcctctccagtagctgggataacagacgcgcaccaccacacccggctaatttttgtgcttttagtagaaatggggttttgccatgttgggcaggctggtccgaaattcctaatttcaaagttattggcccacctcagcatcccaaagtgctaggattacaggcatgaaccaccgcacctggcccagatgcaatttaaaagctatttcaaaaaaaaaacaaaaaaagcagttgtatttctgataattttttttttcttttagctatcatggtgaacttacttcagattgtgcgggaccactggggttcatgattcttgtccctatgggatttgtcattggatgttatttagacagaaagagtgatgaacggctaactgccttccggaacaagagtatgttatttaaaagctttccacacagggaattgcaacccagtgaagaagttacctggaagtaaagactggctagattatcgaatgttcacattttaaagttccgaagagaaataatatacatgaagaatctgnnnnnnnnnnnnnnnnnnnnggggggcccgttttaaagaatccttgggggggccaaattttacgcgggcttgcaaggttttatttttttcct

SEQ ID NO: 22859 - DNA, 5549 bp, Homo sapiens
  SIMILAR (298)..(1239): 1001254mologous to Homo sapiens The KIAA0127 gene product is novel,accession number D50917,Smith-Waterman Score=1620.
ctcctgcacggcgagtgctggagcacgagctaccgctcgctcggtcagggcgccccctccgcccgcctcctgcttcctcctccgctgcctgccgccgccgcctccaccattgtataatgctcggggcgcgcaggcagagaacggcggagtcttagcttcagcctcgcctgctgcccgctccccggcgccaccctcgggcccctggagcggggcactccgcatggagcgggagtagctgaggagtgggcggaaacccctcctgatgcgttagttcccaggtggagctgcatgtgatatatgttgggtaaaggaggaaaacggaagtttgatgagcatgaagatgggctggaaggcaaaatcgtgtctccctgtgacggtccatccaaggtgtcttacaccttacagcgccagactatcttcaacatttcccttatgaaactctataaccacaggcccctgacagagcccagcttgcaaaagaccgttttaattaacaacatgttgaggcggatccaggaggaactcaaacaggaaggcagcctgaggcccatgttcaccccctcctcccagcccaccaccgagcccagcgacagctaccgagaggccccgccggccttcagccacctggcgtccccgtcctcccacccctgcgacctcggaagcactacgcccctggaggcctgcctcaccccggcctcactgctcgaggacgacgatgacacgttttgcacctcccaggccatgcagcccacggctcccaccaaactgtcacctccagccctcttgccagaaaaggacagtttctcctctgccttggacgagatcgaggagctctgtcccacatctacctccacagaggcggccacggctgcgactgacagtgtgaaagggacctccagcgaggctggcacccagaaactcgacggtcctcaagagagccgcgcagatgactcaaaactgatggactctctgcctgggaattttgaaataacgacgtccacgggtttcctgacagacttgaccctggatgacatcctgtttgctgacattgatacgtccatgtatgattttgacccctgcacttcctcatcagggacagcctcaaaaatggcccctgtgtctgccgacgacctcctcaaaactctggctccttacagcagtcagcctgtcaccccaagtcagcctttcaaaatggacctcacagagctggaccacatcatggaggtgcttgttgggtcctaagacccagggacccagcgactatgcccacccagaccccagagcgttcccataaccctgacagttctccacactgtgcatgcacccttgcttgcctttttcagagaaaaagaaaattttacaacaggatcacactagtttttgctttgagcagagttggagtgccttcatccaagtatgaccacttttaatacacttttttgagtggttcctcagagacctactaccctggtataggaaagaatccatttgaagacaatgttgcaatgttgaatgacaaaaataaacagttcaagtgaagcacaaggattaagttggaaaagctgtaaattgcatgtgcatatttgtctattttttctataagttttattgcaagaggtaaagaagaaaactatatatatatatcttatttagataatctcagtaccttttctggcatttttgccctgtataggttgacttggcaattcggcctttttagaggcattaactactcctcgtaagtgttgcatttacatggctgtttagaaaactgctgcccaaatttattttatatttttgtacagattctgcagtttatgatattgtttttctaaaaacaaatgctgtttatacatatgagatagctattttgataggatttgctcacatagttcctgcaaacttcagatgtacaagttgcacttgtacttttatagagttgtaatgttttatatgtgtatggtgcaagagaaaattggatcaaatcaatctgcagttgatgtccccaaatgcaaacacaggcacacacatgcacacacccataaacacacacacagtgctttaagaaagggccaggtgatatcacacccaaatttcacaagcactgaccccctggcaccaacacccgccagtactgtgacttccaaagccagagccacatgtgctcatcaaacttgcattaagcagttggcgggagatggctgtggagctgggggtttaagtgatggttctcttttgctccctcttttgagggtaaagctactgtctttcttaagagtgtatttatgccaagtttgcgcttttaattgtttttattttgttttttaatgaaaacccagatctttcctttttggcataatttttatgatgacctgaaattttacatccgaacaaaattttacatccgaaaagcaaccaacttcttcatggaactcagccctgttgcaatgcttagggcccttaaagaagaaaatctccccagaaggcatccatcatgttgcttaattgtcttctgcagcttcctttccctagagctttccctgtgttgctaagagctgaaaatggcatcttcgtgatcaccacagtgagcttggctcgcctcggccggcccgggatgcactcttacaacatgtgtgactcttgaacctggagttcatcacattacgtcacagcttcccatctggttgctttcctgagtcagctacttcacacttgtcaaggctgttttaccccaaaactcagacaggactttctatgcatgttttccctcctccccccaattccccccccatcaccttatctcccaggacacacttgagaagtagctttttattcctagtggtgtacatttaattttaaaaaggttgcaatgtatcatgcttgttgccgaaactgtttatggccttcttgtttcagttttttcttttcttccaatggtactttagctgttgagtgcaggttacaacctatattgttatgcagatggcttctttaggaataacttttatatttatttaaaaatttttaaattatgggatgttttgttgttgttgttgtctttgttgttggtcatttgtcaatattcagtcaccaattctgctcacttcttgccatggataaaattgggtctttctggctaattaaaaaagacaactttataaaatggcactttaagcaagccatagttagttttatttttgtaatgcacatggcaaagcaaagacgtttgtgatgaaggaactgctcatctaagcaaaagatttgagtatgatatgataaaggctttctacattctaatttactttttccccccacttgaatgtgttttaaaggctaattatcagctcagtagagcagtgagaaactgatcaaattgcacttgttctcctacaagcaacctccacgcagacacctcgtactgctacaggtgtgtcatttcctttaatacggaccacgggaccatgtaactgacggtgagggttgtagtagatgcttccaatgtcagaatgcctggtaattttaaaaccttccctttcttgcaaaaaacaagtctgcccaaattccatgctttctataactgggaggacctggcaaacctggccgcatgctgcacacatctacctacgtacacatatacaatagtattgatgattctgaacaataacagggtaaaacagttggtttgccattgttaaaaactgatttacagtaacttacaacaactgtacttttgttggattagcaaatcatgtgtttaaacaaatcccatatgttgggcaacagttcaaataagcacggagaagtgttgcccaaacttggttctctgactcttatgtatttgtaaggctgggcttcaaaatcaaaacaaaaaccccaaaaacagcaggcaaatgctttttaactctgacaccgttgccataaatccctgatactcaaagtctaacaagaaagacatggaaaattagcagcccattttcagaaagatcaaaatgatctagggttctaattgcttttgcatcctattcttacaaagtgatgtcccaacagggaacagtaggagctggagtgggatctccaagtcccagtttgagtgtgggatgtgcttccagcagtgccttccctttatgaaagacatcacatggcatccagggccaggcaggcagcttgaggtgcctttacgagaaaaccgagctggggctgggagaggacagttattgacactgatgtgcaatgaagtgacaagatgagagcagaatcgtaagagctttgaatttgaagtgagtttttttccccccataagttatttattccttttttctgtgtaaatatatttattttactgtggagcgctaacatctggatcgtaacatgtgcagaatgtatggtaggaatgtattctcttgtaggaatgtaaatctgtattaaaagggggtccaagccaggcccccaggtcttctcattgtatgcacagtccgcattcatttttactcttctctaatatgggtctatttgaaatatgcaaaaggtatgaggaatgttttaatacctccaaatttttaagaaaagcatcaaagggttgatattttttaaagtttttttagtagcactttctctggatgacagaaggggcaaccacatgggcacccttgttcataccaaagggtgagcagtggccagagcctcctctgcacctctcgagtgtctttaccaattgagctttttatcgccatagccccttggagtgccccagctgccctgaggtcaatcaaggaaaatttcttaatgaaataagctccaaagagccaaagtatcaacttacagatcgtttttaaagcttaaatttatgaaccacctttgtggtaaacaatgaattatgaataccgcagggcagccttcttaaatgacaaatgtaaaaaaaaaaaaaaaagactctacttcgtgcagcaattgctactctatacgaattgtcttaatttgaaaaccttgctgttacaaattggacctttatacattttctgaaaacaatgaaaagagtatatttaaccttttctggctgtaaatggttaccttcctgtaactgccccgcacctggaggcatggagttgtgtgcatcctgcttatgtacaattgttttcagtgtttctaagaatgagtctgaatggttcttgaaaattagccaggatcaaatgctattgcagacaaagccaataaaaagttggacttcttttggggataacaagttttggaagagaaatgcaggccatatgtgcgcatgaccgagattttgaaaaaagatgtacatagtgacatgtttggtgcatggtttttgaggagggcttttgtcaaaaaggaggtataacctttcccccacagacctgagagctgtgccttttctatgcaatattacagacgttacatcggaacccagatggctgtattcacatgtaggtttgggctgtaatctaaacaattggacagattaaatgtacatggaaatgagcagtcttacttttgtagttttatattatacaataaacagttaaaagatg

SEQ ID NO: 22860 - DNA, 3237 bp, Homo sapiens
  SIMILAR (160)..(525): 341254mologous to Mus musculus proline-rich protein 13,accession number AF020191,Smith-Waterman Score=118.
atggagctcaagtgtgtgtgcctgaaaaaccgctccccgagtgctgaggagcagccaagcctccttccagagccctcagcccaggagagtcacgggggtcacccaaggagtgccttgtatggtagagagagattaacagggcagcctcccagcagtccccaccccaaccctgctccctgggccagctgtcccgctgtcattgacccggtccctatttacagttcagtagcagaggcctatgactcagggacagagggaattcccacggtgccaggcctcaggccatgtggagagtggctcattaagagccacggcacagcgattacctccagagaggcgtgtgagcagaggacaaccgccccgccgccccggcagcctccgaggcgccctctccgcgcttcactctcggccgctcccccggagccacgcgagccggtcgtggcggctggacccgagcctgggagcctgcagcggcccgcgcggactgcgctgccgaaccgcccggagccgcaagccgcatccccggggaccttggtagaaaaatatgcggctcctgtagccacccaagatcttctggatgagaacccctgcaccagcagactgggtgtcgtggacctccaagcggttttgacgctgcggaagcttgagaacctccgctctggagcccagaccccgctggagggtggacagagcgggagggtgggaccccacgccctgaggtggaacagaggtgaagaggaaggggagcggctcctgtgcattttaatagaaatgaattcaagtaagtgtgagaatgtcataaatccctcaagagggctagaggtggtggaggagcccctgtatccccaggtgcagagctctctggtcagcgcagcagtgggcctgccacccagacacacagaggtggctcagcaacagtcagaggccctcagacaacatcgggaacagaagtggctgtatgagcttctaaaaagccccatctggaagctggagaagctgggcccatttcctaactcagaggaggccacagtccctggggcaggaactggcccctcctattcttcccttgccctccagagtggggttgcctgggaccaggtcctcagaaactgtgatgggaggagggcacctttacaacagcaggtggagcacctcatctggagtgaaaggcaagctgagctgctgtcaggccctgagaaacaggtatttttattccggggagtggccccttttcgggactcagaccctgggaattcaggaggatggggaatgttcctggaggagctggggcttaatctgagctccaaaggatggacagaggggaaagaaggggacttctttgcagcgactccaggaggggtcagtggggcaggagagagcagggccttgaaggttgcctgtgccttggctcgggacaggatagggcaaggaggtcaggccactgatcccagggcagacaggggagccctgaagagctgtgggacagcaagcaggaggccaccctccaggtcctggggccctcttgtggtgactctgaggaccccagacctcaatgaacctgagccctggagctacccaaccccaccagacctgcctcaaagcccagaagttggagcccagcacgtcagacccagaaaacccagacctcaagagggcagggggctggccgtgttatccaggtcccaaggcccctcacgtccacgggagctctccaggcccagggagtgcattccactcagagcatgggctggactgacaggagcagcctctttcaaacgcacttggccacctggcactacttgcaggccatcagctgggaaggcaatgctgtgcacgtgccaggagaaatccacaccccatgaagaagagaggtccaaggttcagggaagttatagaggtaacgatcggattcgaacaccttgctcagcttcgaggctgaagacaagacatgtgctggaaggtgttctaagagtcagagaggcccaatcccagctctacccacttgccagctgtgtgacctttggcaagctgcttaacctctctgagccggctgccacttctgtaaagactcccctgacgcctgtaccgtattcatctttccaggggtgtgtgtccccagtctatgtagccctgagcctatcccatctatggtcagacgctgttctcagtattgggagagttgcaaagatcaggatttggcaaactttttctgtaaagggccaaatagcaaatagttcagactttgagggccatgtggtctttttgcaactactcaactctgccatcgtagtaagacagcagacagggcaacacacagatacacgagcgtggccaggttccagcaatgcttttcttacaaaagcaggcagtggacaggatctggcctataaacaacacagggttgctgctcttaaggatacagggagtacagagacaacaaactgcacagctaatccgaagacgcggcaggacttgctaagtgcatttgcggaggcatggagctctgggaaagcccagaagaggaaaaggctggttttgactccaggcatgcagaggtttcatggacaggcatttgagtttggccttggaatgatgggcagaatttccacaagcagaaggggcagggtgcaagggtgggcaactgagccaagcgtggagcagagtgctgaagacaacgagcccacagaagaatcagcccccaggggaaacgagagctctttagacgcgctgagagtgagggagcaaatcttggtagatactgaagtctggagctcaggagagaggcaggggctggagaccagttttgagagtcctgagtggattagatcaccttgggaaagcaagaggcagcaggaatggaggctcagtgaagtgcagtcatgggccaaaccctggaaaagacaatgttttaaagagagctggggcacagatgtgagaaaaaggaggtccagaagggtccaagaagcaggaggagaaccaggagagaagggtagatgtgtgcagcatgcggcaggtttgccaggtcctccagttatagaaagcatggaatctgggcagacttgttctctgcaagaaagggaagctcttaaaattaacaggcatactgacactggaagcatctactacaaccctcacctcagttacatggtccctggtcctattaaaggaaatgacacacctgtagcagtacgaggtgtctgcgtggaggttgcttgtaggagaacaagtgcaatttga

SEQ ID NO: 22861 - DNA, 2932 bp, Homo sapiens
  SIMILAR (310)..(1908): 1001254mologous to Homo sapiens 29-APR-1994 Human ALK-3 cDNA,accession number T06031_cd1,Smith-Waterman Score=2830.
gctccgcgccgagggctggaggatgcgttccctggggtccggacttatgaaaatatgcatcagtttaatactgtcttggaattcatgagatggaagcataggtcaaagctgtttggagaaaatcagaagtacagttttatctagccacatcttggaggagtcgtaagaaagcagtgggagttgaagtcattgtcaagtgcttgcgatcttttacaagaaaatctcactgaatgatagtcatttaaattggtgaagtagcaagaccaattattaaaggtgacagtacacaggaaacattacaattgaacaatgactcagctatacatttacatcagattattgggagcctatttgttcatcatttctcgtgttcaaggacagaatctggatagtatgcttcatggcactgggatgaaatcagactccgaccagaaaaagtcagaaaatggagtaaccttagcaccagaggataccttgccttttttaaagtgctattgctcagggcactgtccagatgatgctattaataacacatgcataactaatggacattgctttgccatcatagaagaagatgaccagggagaaaccacattagcttcagggtgtatgaaatatgaaggatctgattttcagtgcaaagattctccaaaagcccagctacgccggacaatagaatgttgtcggaccaatttatgtaaccagtatttgcaacccacactgccccctgttgtcataggtccgttttttgatggcagcattcgatggctggttttgctcatttctatggctgtctgcataattgctatgatcatcttctccagctgcttttgttacaaacattattgcaagagcatctcaagcagacgtcgttacaatcgtgatttggaacaggatgaagcatttattccagttggagaatcactaaaagaccttattgaccagtcacaaagttctggtagtgggtctggactacctttattggttcagcgaactattgccaaacagattcagatggtccggcaagttggtaaaggccgatatggagaagtatggatgggcaaatggcgtggcgaaaaagtggcggtgaaagtattctttaccactgaagaagccagctggtttcgagaaacagaaatctaccaaactgtgctaatgcgccatgaaaacatacttggtttcatagcggcagacattaaaggtacaggttcctggactcagctctatttgattactgattaccatgaaaatggatctctctatgacttcctgaaatgtgctacactggacaccagagccctgcttaaattggcttattcagctgcctgtggtctgtgccacctgcacacagaaatttatggcacccaaggaaagcccgcaattgctcatcgagacctaaagagcaaaaacatcctcatcaagaaaaatgggagttgctgcattgctgacctgggccttgctgttaaattcaacagtgacacaaatgaagttgatgtgcccttgaataccagggtgggcaccaaacgctacatggctcccgaagtgctggacgaaagcctgaacaaaaaccacttccagccctacatcatggctgacatctacagcttcggcctaatcatttgggagatggctcgtcgttgtatcacaggagggatcgtggaagaataccaattgccatattacaacatggtaccgagtgatccgtcatacgaagatatgcgtgaggttgtgtgtgtcaaacgtttgcggccaattgtgtctaatcggtggaacagtgatgaatgtctacgagcagttttgaagctaatgtcagaatgctgggcccacaatccagcctccagactcacagcattgagaattaagaagacgcttgccaagatggttgaatcccaagatgtaaaaatctgatggttaaaccatcggaggagaaactctagactgcaagaactgtttttacccatggcatgggtggaattagagtggaataaggatgttaacttggttctcagactctttcttcactacgtgttcacaggctgctaatattaaacctttcagtactcttattaggatacaagctgggaacttctaaacacttcattctttatatatggacagctttattttaaatgtggtttttgatgcctttttttaagtgggtttttatgaactgcatcaagacttcaatcctgattagtgtctccagtcaagctctgggtactgaattgcctgttcataaaacggtgctttctgtgaaagccttaagaagataaatgagcgcagcagagatggagaaatagactttgccttttacctgagacattcagttcgtttgtattctacctttgtaaaacagcctatagatgatgatgtgtttgggatactgcttattttatgatagtttgtcctgtgtccttagtgatgtgtgtgtgtctccatgcacatgcacgccgggattcctctgctgccatttgaattagaagaaaataatttatatgcatgcacaggaagatattggtggccggtggttttgtgctttaaaaatgcaatatctgaccaagattcgccaatctcatacaagccatttactttgcaagtgagatagcttccccaccagctttattttttaacatgaaagctgatgccaaggccaaaagaagtttaaagcatctgtaaatttggactgttttccttcaaccaccattttttttgtggttattatttttgtcacggaaagcatcctctccaaagttggagcttctattgccatgaaccatgcttacaaagaaagcacttcttattgaagtgaattcctgcatttgatagcaatgtaagtgcctataaccatgttctatattctttattctcagtaacttttaaaagggaagttatttatattttgtgtataatgtgctttatttgcaaatcaccc

SEQ ID NO: 22862 - DNA, 1755 bp, Homo sapiens; identical to SEQ ID NO: 5597
  SIMILAR (1)..(1752): 991254mologous to HERV-H/env62 envelope protein,accession number AJ289709,Smith-Waterman Score=3072.

SEQ ID NO: 22863 - DNA, 807 bp, Homo sapiens
  SIMILAR (633)..(31): 911254mologous to HERV-H/env62 envelope protein,accession number AJ289709,Smith-Waterman Score=931.
ttaagaatatacagagtcctcctttttcagcagtaagtcaaggcctcggcggttttggaggacaactgcagctaaagagtcaacttgggcctggaggactgataaagtttgtgatacgtctgtgatgctagcagagaagtcattagagaggctacggaaggtcgtgacagaggttgaaatgcctgctattccagtaccgagagcaatagtgaaggcagaaagtcttaaactgacaagcaagggaattagtggaataactcttttttgtcgtgtcggtgtcatgaggggaacagggagctcttcggtcctatttgcaaattgaattttgggagtaaggaaaactagtgtgcatgtgcctgtccaattagcaggtagacacatgtaggtagaggatacacagaggaagaagacaccttgtgcgaggcaaaactggagatgcaaagtaaaaagatgagaaggagtgctgaaaggggtgtcttgtacccagactcctagggatccagctagggccacagccatcagaggttgtaatggggactgatgaggtaactgcacagaggaggaggttcgattttcatggtgtatgagaaaacgttgagtatctacgagcaacctttcactgttatttacagggccccatccccacccctgggtccataaaatggccagagccttttgttcgggctcccgtacgtaggtggtgagataattccccgccccactcccccgtgtgcactgatacattggaccttcacccagtgcccttcgaccaagagcatttaagtgttcccttttctcctcatccat

SEQ ID NO: 22864 - DNA, 3504 bp, Homo sapiens; identical to SEQ ID NO: 12934
  SIMILAR (1716)..(4): 911254mologous to HERV-H/env62 envelope protein,accession number AJ289709,Smith-Waterman Score=2697.

SEQ ID NO: 22865 - DNA, 591 bp, Homo sapiens
  SIMILAR (193)..(567): 641254mologous to Coturnix coturnix bone morphogenetic protein receptor IA; BMP receptor IA,accession number AF189777,Smith-Waterman Score=378.
atgcagaaagtatgtcatcaggcaactgccgacccctcagaagaggaagaaaacagcagcctgcaggcaagattggaaagaaggccacttgtccaggacactgataaccccatctcttcatccccagccagagtgaaactaactgactcttggtctgccatggactccccttcacagagggattttgccgatttcggaaccaccatcaaacaggattttcgcctgctggggcaaaccagcgtggaccgcttgctgcaactctctcagggccaggcggtgaagggcaatcagctgttgcccgtctcactgcgaactattgccaaacagattcagatggtccggcaagttggtaaaggccgatatggagaagtatggatgggcaaatggcgtggcgaaaaagtggcggtgaaagtattctttaccactgaagaaaacagctggtttcgagaaacagaaatctaccaaactgtgctaatgcgccatgaaaacatacttggtttcatagcagcagacattaaagtcccgcaagccaaaggcaacattgtggttatcacaaagctacatgacaaacagaggttttttcgaggataa

SEQ ID NO: 22866 - DNA, 1103 bp, Homo sapiens
  SIMILAR (454)..(822): 931254mologous to HERV-H/env62 envelope protein,accession number AJ289709,Smith-Waterman Score=566.
atgctggcagcccttgcagcccttgcttgctctcagcgcctcttcggccttggcgcccactctggccgagcccttcagcctgccactgcactgtgggagcccctttctgggctggccaaggccgaagctggctccctcagcttgcggggaggtgtggagggagaggcgcagacaggaacggggctgcatatggcgcttgtgggccagcatgagttctgggtgggcgtgggcttggtggaccccaccctcagagcagccggccagctccaccagccctgggcagtggctgaagctaaagtcatagtcaaggttaatgctcctctttctttatctgacctctcccaaaatcagttagcatttaggctctttttcatcgaatataaaaacccagcccagttcatggtttgtttggcagcaaccctgacacgatttacagccctagaccctgaaagatcctctacctacatgtgtctacctgctaattggacaggcacatgcacactagttttccttactcccaaaattcaaattgcaaataggaccgaagagctccctgttcccctcatgacaccgacacgacaaaaaagagttattccactaattcccttgcttgtcggtttaggactttctgcctccactattgctctcagtactggaatagcaggcatttcgacttctgtcacgaccttccgtagcctttctaatgacttctctgctagcatcacagacatatcacaaactttatcagtcctccaggcccaagttgactctttagctgcagttgtcctccaaaaccgccgagaccttgacttactcactgctgtctggtctgcagatctcgaagcacaaaggtccttattacttatatttcttcttgtgccattattcacttttagatctccagtgtcctcatactgagtggcatttgaacaacttcctttttggcattttagcaatactccctgagaaaccaacaggatcaaggagatcaaagtcaaagtgagaataccattcacggttccagatattcccagtaagattttataccagtgcaacgtcactgaataatcctccaccttcaagtaggctccggtgtctgtcat

SEQ ID NO: 22867 - DNA, 1695 bp, Homo sapiens
  SIMILAR (541)..(1482): 1001254mologous to Homo sapiens 29-APR-1994 Human ALK-3 cDNA,accession number T06031_cd1,Smith-Waterman Score=1662.
atggaggccctcaacgacgcagacaaaaatggcctgaggaatgcaaactgtggtggacaagagaataagaatcaggcaagggattctccaaaagcccagctacgccggacaatagaatgttgtcggaccaatttatgtaaccagtatttgcaacccacactgccccctgttgtcataggtccgttttttgatggcagcattcgatggctggttttgctcatttctatggctgtctgcataattgctatgatcatcttctccagctgcttttgttacaaaggtcatctgctgttgcgtgttattcacattagaggacagttggaaagtgaggggggcgtgcctgttgtccttaggatcctatgcccacaaggagagaggaaggtgtcatcttctcctcttcctcagcatcagaggatcttagcctggtcagagcacagggagcatttcctctacatccccaagaggcagagggactttgctgcttctcctccctccaaagtaatggatctttgcctgtgctctggggcagggggaagaggacattattgcaagagcatctcaagcagacgtcgttacaatcgtgatttggaacaggatgaagcatttattccagttggagaatcactaaaagaccttattgaccagtcacaaagttctggtagtgggtctggactacctttattggttcagcgaactattgccaaacagattcagatggtccggcaagttggtaaaggccgatatggagaagtatggatgggcaaatggcgtggcgaaaaagtggcggtgaaagtattctttaccactgaagaagccagctggtttcgagaaacagaaatctaccaaactgtgctaatgcgccatgaaaacatacttggtttcatagcggcagacattaaaggtacaggttcctggactcagctctatttgattactgattaccatgaaaatggatctctctatgacttcctgaaatgtgctacactggacaccagagccctgcttaaattggcttattcagctgcctgtggtctgtgccacctgcacacagaaatttatggcacccaaggaaagcccgcaattgctcatcgagacctaaagagcaaaaacatcctcatcaagaaaaatgggagttgctgcattgctgacctgggccttgctgttaaattcaacagtgacacaaatgaagttgatgtgcccttgaataccagggtgggcaccaaacgctacatggctcccgaagtgctggacgaaagcctgaacaaaaaccacttccagccctacatcatggctgacatctacagcttcggcctaatcatttgggagatggctcgtcgttgtatcacaggagggatcgtggaagaataccaattgccatattacaacatggtaccgagtgatccgtcatacgaagatatgcgtgaggttgtgtgtgtcaaacgtttgcggccaattgtgtctaatcggtggaacagtgatgaagtgagtggaactcagtcccctgaagaagtgattcgtaaatgccaccaaatatattctctgctcactgaacatctctttacttttcagtgtctacgagcagttttgaagctaatgtcagaatgctgggcccacaatccagcctccagactcacagcattgagaattaagaagacgcttgccaagatggttgaatcccaagatgtaaaaatctga

SEQ ID NO: 22868 - DNA, 2730 bp, Homo sapiens
  SIMILAR (1055)..(2266): 871254mologous to Homo sapiens 29-APR-1994 Human ALK-3 cDNA,accession number T06031_cd1,Smith-Waterman Score=1814.
  misc_feature (1)...(2730): n = a,t,c or g
atgaaaaggataagagactactatgaacgatcacatgccaacaatttagacaacctagaagaaatggatgaattattagaaacacacaacctgccaggactgaatcacgaagaaacagaaaatcttaacaaacctataactacttctcttagtccattggctggggtctccagcactaaaaagaacactaaaaatgaacttagtattgttcttcctttcacgggaagtattttacccgttgggtttgctacacgccccagaggcttggctagctcaaaccccatccttctacacatggtggcctttctgtttgcaaatgggaccgaagagctccctgttcccctcatgacaccgacacgacaaaaaaaagttattccactaattcccttgatggtcggtttaggagtttctgcctccactattgctctcggtactggaataacaggcatttcaacctctgtcacgaccttccgtagcctgtctaatgacttctctgctagcatcacagacatatcacaaactttatcagtcctccaggccctagttgactcttcagctgcagttgtcctccaaggacaactccgaggccttgacttactcactgctgaaaaaggaggactctgtatattcttaaatgaagagtgttgtttttacctaaatcaatctggcctagtgtatgacaacataaaaaaactcaaggatagagcccaaaaacttgccaaccaagcaagacagaatctggatagtatgcttcatggcactgggatgaaatcagactccgaccagaaaaagtcagaaaatggagtaaccttagcaccagaggataccttgccttttttaaagtgctattgctcagggcactgtccagatgatgctattaataacacatgcataactaatggacattgctttgccatcatagaagaagatgaccagggagaaaccacattagcttcagggtgtatgaaatatgaaggatctgattttcagtgcaaagattctccaaaagcccacgtacgccggacaatagaatgttgtcggaccaatttatgtaaccagtatttgcaacccacactgccccctgttgtcataggtccgttttttgatggcagcattcgatggctggttttgctcatttctatggctgtctgcataattgctgatgatcatctcctccagctgcttttgttacaaacattattgcaagagcatctcaagcagacgtcgttacaatcgtgatttggaacaggatgaagcatttattccagttggagaatcactaaaagaccttattgaccagtcacaaagttctggtagtgggtctggactacctttattggttcagcgaactattgccaaacagattcagatggtccggcaagttggtaaaggccgatatggagaagtatggatgggcaaatggcgtggcgaaaaagtggcggtgaaagtattctttaccactgaagaagccagctggtttcgagaaacagaaatctaccaaactgtgctaatgcgccatgaaaacatacttggtttcatagcggcagacattaaaggtacaggttcctggactcagctctatttgattactgattaccatgaaaatggatctctctatgacttcctgaaatgtgctacactggacaccagagccctgcttaaattggcttattcagctgcctgtggtctgtgccacctgcacacagaaatttatggcacccaaggaaagcccgcaattgctcatcgagacctaaagagcaaaaacatcctcatcaagaaaaatgggagttgctgcattgctgacctgggccttgctgttaaattcaacaagtgacacaaatgaagttgatgtgccctttgaataccagggtgggcaccaaaccgctacatggctcccgaagtgctggacgaaagcctgaacaaaaaccacttccagccctacatcatggctgacatctacagcttcggcctaatcatttgggagatggctcgtcgttgtatcacaggagggattgtggaagagtaccaattgccatattacaacatggtaccgagtgatccgtcatacgaagatatgcgtgaggttgtgtgtgtcaaacgtttgcggccaattgtgtctaatcggtggaacagtgatgaatgtctacgagcagttttgaagctaatgtcagaatgctgggcccacaatccagcctccagactcacagcgttgagaattaagaagatgcttgccaagatggttgaatcccaagatgtaaaaatctgatggttaaaccatcggaggagaaactctagactgcaagaactgtttttacccatggcatgggtggaattagagtggaataaggatgttaacttggttctcaccactctttcttcactacgtgcctcacaggctgctaatattaaacctttcagtactcttattaggatacaagctgggaacttctaaacacttcattctttatatatggacagctttattttaaatgtggtttttgatgcctttttttaagtgggtttttatgaactgcatcaagacttcaatcctgattagtgtctccagtcaagctctgggtactgaattgcctgtttcataaaacggtgctttctgttgaaagccttaaagaagataaatggagcgcanagtagatgggagaaatagactttggccttttacctggagacattgcagttncgttttgtaattctacctttngttaaaacagc

SEQ ID NO: 22869 - DNA, 1056 bp, Homo sapiens
  SIMILAR (317)..(571): 651254mologous to Homo sapiens prepro cortistatin like peptide,accession number AB000263,Smith-Waterman Score=244.
ttttttttttttttttttttttttttttttttttttttcacaggaaaagacctgaagctttaattaaggggttacatccaaccccaaagcgcttttgggggcactgattgctccagcttttgcgtcactgcccgagggaagagggaagaggatccaggcgttaaacatgtttagacccaaaaacagttggagattgggcttaaaatacccaccaagctccaaagaaaagacccaagtccccaaaacattgatttcagggctgccagaaaggaaaagcaccaccagggtgggagagaagctccagtcagcccacaaaatgccattgtcccccggcctcctgttgttgttgttttccggggccacggccaccgctggcccttgcccttggagggtggccccaccggcccgagacagcgagcatatgcaggaagcggcaggaataaggaaaagcagcctcctgactttcctcgcttggtggtttgagtggacctccccaggccagtgccgggcccctcataggaaaggaagctcgggaggtggccaggcggcaggaaggggcacccccccacgcaatccgcgcgccgggacagaatgccctgcaggaacttcttctggaagaccttctcctcctgcaaataaaacctcacccatgaatgctcacgcaagtgtaatgacagacctgaataaaatgtattaagcagcagtgatctttcctctcctccttcccaagtcatttgaaaagtgtttgttatttaaattccaataatgcccaatactgacgtgtcttgagtaatttggaacccaaaagtgaagatctttgataaagattttttttgtggttcgactggactgtgctgagtgcgggcactgggcttttcttctgatgttcattatggtgctgggaagctctgtctttgatttaaaataaaatagctaaaggctacacaattaagagttcagaataacatcttatttcagtttatgaattgatatgaattgtctaatttaaaaaatatttccctcacattaaaagcccatttttaacatcaaaaaaaa

SEQ ID NO: 22870 - DNA, 500 bp, Homo sapiens
  SIMILAR (369)..(407): 921254mologous to Homo sapiens Human wild type pKe83 protein,accession number Y51415,Smith-Waterman Score=62.
ggaattcgcctcccgtcttctgcagactggcagaagaccgaggcccagaagcgacgcgaacagcttgctgctagatgagctggtggccctggtgaacaagcgcgatgcgctcgtcagggacctggacgcgcaggagaagcagtgagtgggcagtggggtcgggtcgaggctgggccacctgccgaggggccgagaagtgtgcggaaagttcaatccaaaggtcgcgggagggccggggcagcctcccactggcctggtgctccccattcccgctggggatccaaatactgggcgacgggggagtgctgctctgccctccacgaaaaaaaataattttgtttcctgtttgtcctgtttgtctgacatccagggccgaagaagaagatgagcatttggagcgaactcttggagcaaaacaaaggcaagatggccaagaaagaggagaaatgtgttcttcagtagccatcagatcagaaagaatctctcccaacattttagag

SEQ ID NO: 22871 - DNA, 667 bp, Homo sapiens
  SIMILAR (369)..(665): 1001254mologous to Homo sapiens Human wild type pKe83 protein,accession number Y51415,Smith-Waterman Score=485.
gcggtggaattcgtctgatccagatgctgatagaaccactttaaatcatgcagatcattcatcaaaaatagtccagcatcgattgttatctagacaagaagaacttaaggaaagagcaagagttctgcttgagcaagcaagaagagatgcagccttaaaggcggggaataagcacaataccaacacagccaccccattctgcaacaggcagctaagtgatcagcaagatgaagagcgacgtcggcagctgagagagagagctcgtcagctaatagcagaagctcgatctggagtgaagatgtcagaacttcccccgctatggtgaaatggctgcagaaaagttgaaagaaaggtcaaaggcatctggagaacaaaacagtaagttggtggacttgaagctgaagaagctcctagaagttcagccacaggtggcaaattcaccctccagtgctgcccagaaagctgtaactgagagctcagagcaggacatgaaaagtggcacagaagatctccggactgaacgattacaaaaaacaacagaacgttttagaaatcctgttgtgttcagcaaagattctacagtcagaaaaactcaacttcagtctttcagccaatatattgagaatagaccagagatgaaaaggcagagatcaatacaggaagatac

SEQ ID NO: 22872 - DNA, 1440 bp, Homo sapiens
  SIMILAR (1222)..(1434): 421254mologous to Homo sapiens lamin-like protein,accession number M24732,Smith-Waterman Score=126.
atgtggacaggccacttggagagagagagagatgctgggccatctgcgagttgttctagccttttcagccaagatcaaacggagcaggcaggagccgtaaccccccagcacagcttgcccaaacggcggctgcagacccagacatccctgcattcttgtgggcctgggaaggcttcccctgccctctcagcctcagaagtgcctgcttctgctgtctggcttctccctgctattggcacctgctccaatcttggaacaaagttggagctgagctcgggtgctgtcacagcccggccagaaattgtaaaccagttgaatgctctgagcagcttagatgaagatcaagatgactgcataaagcaagcaaatatgcgttcagctaaatcagccagttcctctgaagagcttatcaacaaacttaactttttggatgaagcagaaaaggacttggccaccgtgaattcaaatccatttgatgatcctgatgctgcagaattaaatccatttggagatcctgactcagaagaacctatcactgaaacagcttcacctagaaaaacagaagactctttttataataacagctataatccctttaaagaggtgcagactccacagtatttgaacccattcgatgagccagaagcatttgtgaccataaaggattctcctccccagtctacaaaaagaaaaaatataagacctgtggatatgagcaagtacctctatgctgatagttctaaaactgaagaagaagaattggatgaatcaaatcctttttatgaacctaaatcaactcctcctccaaataatttggtaaatcctgttcaagaactagaaactgaaaggcgagtgaaaagaaaggccccggctccaccagtcctctcaccaaaaacaggagtattaaatgaaaacacagtttctgcaggaaaagatctctctacttctcctaagtgcacacatgtgtgcaccctgccaccccgccattgctggtgtaagcatatgcacacagaccctgccaccctgcccctgccagcatgtaggcactgctgccccatccctgctggtgtatgtgcaccccacctcattgccgccaccagtgcaagtgcacatgcacagtccccactgccccatcagtatgggcatgaacctcactgctgccaccccgatgaaatgcttttgccagcaccccacatcagagtgatcttgccagcagactgggaacatctcaggccctcgagcacagcagctaaagcagtattaagaggacagcttgtaacaccaagtgcccacattaaaaagttagaaaggtctcaaattaacaacgttataccacacctagaggaactagggaatcaagaacaaaccaaccgaaagctagcagaagatgacaaatcttcagccaaaatcagagctgaagtctatgaaatcgaggcttga

SEQ ID NO: 22873 - DNA, 2011 bp, Homo sapiens
  SIMILAR (1217)..(1966): 981254mologous to Homo sapiens Human wild type pKe83 protein,accession number Y51415,Smith-Waterman Score=1226.
atggcaaaaccctatctctacaaaaaatatggaaatcagcagggcgtggcagcgattcctgacgtcccagctgcttgggaggctgagccaagccctataccaagtcctgttttggggcgaaagccaaatgctagtcagtctttgcttgtatggtgtaaagaagttacaaagaactaccgaggagtaaaaatcaccaattttactacatcgtggagaaatggtttatctttttgtgcaatattacaccactttagaccagatttaattgactacaagtctctgaatcctcaagatattaaagagaacaacaaaaaggcatacgatggatttgccagcataggaatttcccgattattggaaccttctgatatggtattattagcaattcctgataaactgactgttatgacttatctctatcaaataagggcacatttcagtggccaagaactaaatgtcgttcagatagaggaaaacagcagtaaaagcacatataaagttggaaactatgaaacagatacaaacagttctgttgatcaagaaaaattctatgcagagcttagtgatctgaagcgggagcctgaactacaacagcctatcagcggagcagtagacttcttatcacaggatgactctgtatttgtaaatgatagcggggttggagagtcagaaagtgagcatcaaactcctgatgatcaccttagtccaagcacagcctccccttactgtcgcaggactaaaagtgacacagaaccccagaagtctcagcagagctctggaaggacttcaggatctgatgaccctggaatatgttccaatacagattcaacccaagcacaggttttgttaggcaaaaagagactattgaaagctgagactttagaattgagtgacttatatgttagtgataagaagaaggatatgtctccaccctttatttgtgaggagacagatgaacaaaagcttcaaactctagacatcggtagtaacttggagaaagaaaaattagagaattccagatccttagaatgcagatcagatccagaatctcctatcaaaaaaacaagtttatctcctacttctaaacttggatactcatatagtagagatctagaccttgctaagaaaaaacatgcttccctgaggcagacggagtctgatccagatgctgatagaaccactttaaatcatgcagatcatttcatcaaaaatagtccagcaagatgaagagcgacgtcggcagctgagagagagagctcgtcagctaatagcagaagctcgatctggagtgaagatgtcagaacttcccagctatggtgaaatggctgcagaaaagttgaaagaaaggtcaaaggcatctggagatgaaaatgataatattgagatagatactaacgaggagatccctgaaggctttgttgtaggaggtggagatgaacttactaacttagaaaatgaccttgatactcccgaacaaaacagtaagttggtggacttgaagctgaagaagctcctagaagttcagccacaggtggcaaattcaccctccagtgctgcccagaaagctgtaactgagagctcagagcaggacatgaaaagtggcacagaagatctccggactgaacgattacaaaaaacaacagaacgttttagaaatcctgttgtgttcagcaaagattctacagtcagaaaaactcaacttcagtctttcagccaatatattgagaatagaccagagatgaaaaggcagagatcaatacaggaagatacaaagaaaggaaatgaggagaaggcagcgataactgaaactcagaggaagccatcagaagatgaaaaagggttcaaagacaccagtcagtatgtagtaggagaattggcagcactagagaatgagcaaaagcaaattgacacccgtgccgcgctggtggagaagcgccttcgctatctcatggacacaggacagaatctgatcctaactggatctgctactgcagatttagaccaaaactga

SEQ ID NO: 22874 - DNA, 4231 bp, Homo sapiens
  SIMILAR (1647)..(2741): 991254mologous to Homo sapiens Human wild type pKe83 protein,accession number Y51415,Smith-Waterman Score=1820.
cctatgccaactcatactgatgtcatgttaaaattcaagccattatctaaaaaagttggatctgccgctcttcagttttcattatcttgcatttttctgagggaaggaaaagccacagatgaagacatgcaaaggttggcctagttggatgagtatgaagccaggctgacattggccaatttagatgacttcgaagaagataatgaagatgatgatgagaacagagtgaaccaagaagaaaaggcagctaaaattacagagcttatcaacaaacttaactttttggatgaagcagaaaaggacttggccaccgtgaattcaaatccatttgatgatcctgatgctgcagaattaaatccatttggagatcctgactcagaagaacctatcactgaaacagcttcacctagaaataacagaagactctttttataataacagctataatccctttaaagagggtgcagactccacagtatttgaacccattcgatgagccagaagcatttgtgaccataaaggattctcctccccagtctacaaaaagaaaaaatataagacctgtggatatgagcaagtacctctatgctgatagttctaaaactgaagaagaagaattggatgaatcaaatcctttttatgaacctaaatcaactcctcctccaaataatttggtaaatcctgttcaagaactagaaactgaaaggcgagtgaaaagaaaggccccggctccaccagtcctctcaccaaaaacaggagtattaaatgaaaacacagtttctgcaggaaaagatctctctacttctcctaagccaagccctataccaagtcctgttttggggcgaaagccaaatgctagtcagtctttgcttgtatggtgtaaagaagttacaaagaactaccgaggagtaaaaatcaccaattttactacatcgtggagaaatggtttatctttttgtgcaatattacaccactttagaccagatttaattgactacaagtctctgaatcctcaagatattaaagagaacaacaaaaaggcatacgatggatttgccagcataggaatttcccgattattggaaccttctgatatggtattattagcaattcctgataaactgactgttatgacttatctctatcaaataagggcacatttcagtggccaagaactaaatgtcgttcagatagaggaaaacagcagtaaaagcacatataaagttggaaactatgaaacagatacaaacagttctgttgatcaagaaaaattctatgcagagcttagtgatctgaagcgggagcctgaactacaacagcctatcagcggagcagtagacttcttatcacaggatgactctgtatttgtaaatgatagcggggttggagagtcagaaagtgagcatcaaactcctgatgatcaccttagtccaagcacagcctccccttactgtcgcaggactaaaagtgacacagaaccccagaagtctcagcagagctctggaaggacttcaggatctgatgaccctggaatatgttccaatacagattcaacccaagcacaggttttgttaggcaaaaagagactattgaaagctgagactttagaattgagtgacttatatgttagtgataagaagaaggatatgtctccaccctttatttgtgaggagacagatgaacaaaagcttcaaactctagacatcggtagtaacttggagaaagaaaaattagagaattccagatccttagaatgcagatcagatccagaatctcctatcaaaaaaacaagtttatctcctacttctaaacttggatactcatatagtagagatctagaccttgctaagaaaaaacatgcttccctgaggcagacggagtctgatccagatgctgatagaaccactttaaatcatgcagatcattcatcaaaaatagtccagcatcgattgttatctagacaagaagaacttaaggaaagagcaagagttctgcttgagcaagcaagaagagatgcagccttaaaggcggggaataagcacaataccaacacagccaccccattctgcaacaggcagctaagtgatcagcaagatgaagagcgacgtcggcagctgagagagagagctcgtcagctaatagcagaagctcgatctggagtgaagatgtcagaacttcccagctatggtgaaatggctgcagaaaagttgaaagaaaggtcaaaggcatctggagatgaaaatgataatattgagatagatactaacgaggagatccctgaaggctttgttgtaggaggtggagatgaacttactaacttagaaaatgaccttgatactcccgaacaaaacagtaagttggtggacttgaagctgaagaagctcctagaagttcagccacaggtggcaaattcaccctccagtgctgcccagaaagctgtaactgagagctcagagcaggacatgaaaagtggcacagaagatctccggactgaacgattacaaaaaacaacagaacgttttagaaatcctgttgtgttcagcaaagattctacagtcagaaaaactcaacttcagtctttcagccaatatattgagaatagaccagagatgaaaaggcagagatcaatacaggaagatacaaagaaaggaaatgaggagaaggcagcgataactgaaactcagaggaagccatcagaagatgaagtgcttaataaagggttcaaagactcccagtcagtatgtagtaggagaattggcagcactagagaatgagcaaaagcaaattgacacccgtgccgcgctggtggagaagcgccttcgctatctcatggacacaggaaggaacacagaagaagaagaagctatgatgcaggaatggtttatgttagttaataagaaaaatgccttaataaggagaatgaatcagctctctcttctggaaaaagaacatgatttagaacgacggtatgagctgctgaaccgggaattgagggcaatgctagccattgaagactggcagaagaccgaggcccagaagcgacgcgaacagcttctgctagatgagctggtggccctggtgaacaagcgcgatgcgctcgtcagggacctggacgcgcaggagaagcaggccgaagaagaagatgagcatttggagcgaactctggagcaaaacaaaggcaagatggccaagaaagaggagaaatgtgttcttcagtagccatcagatcagaaagaatctctcccaacattttagagtcttgcttcccaaaccagaaaaagtcagactcattgttgatttaaaacttttaacattttgtttttggctggattgtaactactttaccctctacttttacccaccaccacccttttcctccctcctttcccaaataatatacagactcccaaaatagcttcattttaaggatttttttggtgaggtaaccaatttccttgaaatcctgtgaaatagatttgcacagacaccttgtgagtgattggtattggaggtgttcaagaaactgttcgaaaaagaagaaaaacacttccctcggttattttctctcattttttgatgagaggaaaatttgaaaccattattcttgttgttgttggtaatagcataatgacagtgggaggggtacaaggggataagaaaaatgtcatgatttttttccggtcctgccacatgtaacacttacctctgttaccctaaattttatagttagatcatatcccaatctacttaattaaactgtgttctatttacccagtgggagtttttctgcagtggttgcgtttcactgtaaggataatgggagttcctctcctctgcttttcctcagaggagggtccttttaacatagccagaaacaagccctgtggtttgaaggtgagctgtgaggatgggactaattgatatgccccagtttacaaagacagtcttatcatccgagaatacaccatccttttttctctggaaaattatttcttacatcatgcttgattccctacattttgttgggtctcaaccattggctcacgaaatgctgttaatatttattctgtattgataaaaagtctgtcttgccactacaagtaaatcccccatttaatattttcttctttagcatagcactgtcattttttgtgaaaatggttatgtttatttattacaatactgagtcatatataaattttcaataaaagcagaaaattatacttacctt

SEQ ID NO: 22875 - DNA, 517 bp, Homo sapiens
  SIMILAR (17)..(310): 771254mologous to Danio rerio Pbx4/Lazarus homeodomain protein,accession number AJ245966,Smith-Waterman Score=389.
cgccccgcggcgcctcgacacgagcgacgtcctgcagcagatcatggccatcaccgaccagagcctggacgaggcacaggccagaaagcatgctctgaattgccatcggatgaagcctgctctgttcagcgtgctctgtgagatcaaggaaaagacagtggtaagcatccgtggcattcaagacgaagatccccctgacgcccagctcctgaggctggataacatgctgctggctgagggcgtgtgcaggcccgagaagagaggaagaggaggagcggtggccagggccggcacagcaacaccaggtggctggtccaaatgacaatagcattgagcactctgactacagggccaagctgtcccagatccgacagatttaccactctgagctagagaaatatgaacaggtgatctttctgcatggaagagtttcttgcatgtgattgcgcatttgtcaaagcgaaacacggaacgctaaccacctttctttcgtggcgcagaacagggagtccatgca

SEQ ID NO: 22876 - DNA, 625 bp, Homo sapiens
  SIMILAR (346)..(387): 1001254mologous to Homo sapiens bK223H9.2 (ortholog of A. thaliana F23F1.8),accession number AL008582,Smith-Waterman Score= 77.
aaagcatgctctgaattgccatcggatgaagcctgctctgttcagcgtgctctgtgagatcaaggaaaagacagcactccctgatggtgcttcagcattcgtgtggaatggccaagtctcagcccagaggaaactgttcatggtcctgatcctgcaccctgtggtacccacgggccgcctcttgaagggcaatcccatgagccggggtcctggcgtgcttctcgatttaacccacagttctcacatttccctctggctgaagtctgcagcaggccttatggagtgcaccatccaggagaagaatagggatggctgcctgaagattgtctatttggggagctctaagacctcttctatgaacgcaaaaaatacggcttcaagaagaggtgattgggtgtgtgacggatgtggctcacttcttcggtgccccacagctcaaacccctaagggggagcatgcagtcagacaggaacgtggaatgccggctccttccaagtggcagtgccaccgccacccgcaagacagtaatgacgcagaggggaagcaggcatcctacagatgcgtgcgaggaaataggtttactctcaattctggactgttccaccccagctcttacgggccctga

SEQ ID NO: 22877 - DNA, 526 bp, Homo sapiens
  SIMILAR (154)..(348): 381254mologous to walleye epidermal hyperplasia virus type 2 pol polyprotein,accession number AF133052,Smith-Waterman Score=114.
  misc_feature (1)...(526): n = a,t,c or g
ctgccgctgctttaatactnntagaggccctaaaaatcacaacgtatgctcaactcactctctacatttctcgtaacttccaaaatctactttcttcctcatacctgatgcatatactttctgctccccggctccttcagctgtactcactctttgttaagtcccacaattaccattgttcctggcccggacctcaatctggcctcccacattattcctgataccacacctgacccccatgactgtatctctctgatccacctgatattcaccccatttccccatatttccttctttcctgttcctcaccctgatcacgcttgatttattgatggcagttccaccaggcctaatcgccacacaccagcaaagtcaggctatgctatagtacaagccactagcccgcctctcagaacctctcatttcctttccattgtggaaatctatcctcaaggaaataacttctcagtgttccatctgctattctactactcctcagggattattcaggctatctcctgcctcc

SEQ ID NO: 22878 - DNA, 3184 bp, Homo sapiens
  SIMILAR (2696)..(3100): 661254mologous to Homo sapiens reverse transcriptase homolog= pol {retroviral element},accession number S61070,Smith-Waterman Score=435.
atgggcacttattaccagaaacaccagacagccagagatctgctggccctggggggcaatcctttcctttctttgcttggtaaagggtgggtccagttgatgaagacggtctggtcctctcttccaggcaaagagaggacggagattgggctggggccaggtatctgggagctgggtctgctctcctgggtggagctttcccaggccagtggtgcagaccaatggggactgaagttggagatcctggtaagacagctccagggatacccaaaggaaaaaaccaagctaatggaggcagccagaaaacaggacacaccgcagaacaaaagatggatcaccaagtggaaaaatgaagcagaggagatcggaggagggctccacagttttacaagtaaagaagataattatactctagttgttgacatgaactgcttggatgttcagggttgtggtgatgacgtgaacaacagacttcttcactctgcaagttacccaacagcaagctgggtggatgaagccatgccaacagcatctggcaggagccagcaccaagcacaccttacacagcttcgacagagctgcacggagaacacatatgcttgctccctctgtctctcatacaaagtaccttatagtgtgagctccagacacacagacactgccatcctgcctacaaagaaaggaatgcagacacagccaacgtcagcattcggggtgggaccacagtggaacgcatacatcctttcacagctgccaaggccttctgggaagtccaatgcctgcccccacatctctcagagccaaacatcttcttctgcactttccacaagttacaattatgtatttacctgtgtgcttactgccctaacctcctacttatggactgatgtttatgtccctccaaagttcacatgcactgctgttaggatcaaagtgaccatccatgatgcacagagcacgtaccagggtaaagttccagctgggacgcaggcatcagcaattgtagaatttgggttctcccttcctcagatccctgactgtccttggtcattcaagaaagattcactgtccctaggccaagagtcaggagcaaaacaggaacaccaagggtatggtctgaggatgttgtcagcagggagcaacgaccaagcaggacactgggagctgctgtcccgtctgcaggcgggactccatgaaggcccctgtctgcccttccagcctttgccacaaaccctcgaacgctggctgcacactggaatcacttggggagcttttaaaagatacggaggcctgggtctgactcccgcccaggacctcagaaagggcctgccccgcgcgaatccccagtcgctgggacttacttggccaccaggtttacagacttcgcagccgctgagagctagagaagagcccggagagcgccatggtccggggacgccggggccgggaagcgccgtggcccgggaggacgctgctcccgcagtagcgcgagggaggggcaggaccggggcggctgcctcgcgggcccggaacgggaactggctgcgactacagccgcagccgcgcccctctgttggcgcgcccaagagcctgccggctgctgggagaggccgccgaagggcgggggcggtcaaggcagggtcccacggtgctgccattcgcccgggtgaaataaacagctttattgctcacgcaaagccttttggtggtctcttcacacggacacgtgtgacatttggtgccgaagacccgggacaggaggactccttcaggagaccagtcccctgtcctcaccctcactctgtgaggagatccacctatgacctcgggtcctcagaccaaacagcccaaggaacatctcaccaatttcaaatcggatcttctcggactgacgctgcccgatcgcctcagaagcctcctggaccatcacagatgctttgggtaactcttacagtggaggcatggccttttaaatcctataaactctccttacaattcccccattttacctgtccaaaaaccggacaagccttacaggttagttcagcatctgtgccttatctaccaaattgttttgcctatccaccccatggtgccaaacccatatactctcttatcctcaatacccttcacaacccattattctgttctggatctcaaacatgctttctttactattcctttgtacccttcatcacagcctctcttcgctttcacttggactgaccctgacacccaccaggctcagcaaattaccttggctgtactgccgcagtgcttcatagatagcccccattacttcagtcaagcccaaatttcttcctcatctgttacctaccttggcataattctcatgaaaacacacataggactgggcgccgtggagcagggggtggtgctcgtcggggaggctcgggccgcacaggagcccatggagtgggtgggaggctcaggcatggtgggctgcaggtcccgagccctgccccgtgggaaggcagctaaggcccggcgagaaatcgagcgcagcgccgttaccattgttcctgtcctggacttcaatccggccttccacattattccggataccacacctgaccaccatgactgtatctctctgatccacttgacattcactccatttccccatatttccttctttcctgttcctcaccttgaacacacttggtttattgatggcagttccaccagacctaactgccactcaccagcaaaggcaggctatgctatagtatcttccacatctatcattgaggctactgctctgccccgctccactacctctcaacaagccaaactcattgcctatactgactctaaatgtgccttccatatcctgcaccaccatgctgttatatgggaagaaagaaatttcctcactatgcaaggggcctccatcattaatgcttttttaataaaaactcttctcaaagacattttacttccaaaagaagctggagtcattcactgcaagggccatcaaaaggcatcagatcctatcactcaggacaatgcttatgctgataaggtagctaaaaagcagctagcgttccaacttctgtccctcacggccgtttttctccttctcatccggccactctcacctacttccccactaaaacttccacttatcaatctcttcccacacaaggcaaatgattcttag

SEQ ID NO: 22879 - DNA, 1482 bp, Homo sapiens
  SIMILAR (742)..(1158): 681254mologous to Homo sapiens reverse transcriptase homolog= pol {retroviral element},accession number S61070,Smith-Waterman Score=439.
atggaagaaaactttatcagagtgttcttcaccaccacgacaatgctcctgctcattgctctcatcaaacaaggggaactttgtgagagttttgatgggaaatcattagatggcagagacgaaagagttgtaatatgctttgatgctgctgcagggctgcacagagcctgctccatcagaggggaacaacagaatttgggaacacattacttcacatggcagaggctttttgcagaggtgattaaattaggtggattaatgaagccaaaagcaagaaatgccagcagcctctggaaggaaaagacaaagaatggatttttttccctagagactccagaagaaaggcagacctctgacctccataagtatcagttggcatttaggctctttttcatcaaatataaaaacccagcccagttcatggcccatttggcaacaacccttagacactttacagccctagaccctgaaagctctcataacttccaaaatctattttcttcctcacacctgatgcatatactttctgctccccggctccttcggctatactcacgctttgttgagtctcccacagttaccattgttcctggcccggacttcaatccagcctccaacattattcctgataccacacctgacccccatgactgtatctctctgatacacttggcattcactccatttccctatatttccttctttcctgttcctcaccctgatcacacttggtttattgatggcagttccaccaggcctaattgccacacaccagcaaaggcaggctatgctatagtatcttccacatctatcattgaggctactgctctgcccccctccactacctctcggcaagccgaactcattgccttaactcaggccctcactcttgcaaaaggactacgcatcaatatttatactgaccccatatcctgcaccaccatgctgttttatgggctgaaaggtttcctcactatgcaagggtcctccatcattaatgcctctttaattaaaactcttcttcaggccgctttacttccaaaagaagctgaagtcattcactgcaagggccatcaaaaggcatcagatcccatcactcagggcaatgcttatgctgataaggtgccatctttggcccatgcccccacccttactttagcgcctgtgctacagtgcccccttcgggaagtagcaggaactgaagacgataacggaaaagcggttctagaaattccttcaaacatcagaaaatcagcccatgtaccagtacaaacctggaagggatgggacccaacaaaccttttaggagggtggttctctaatttaggaggatttaaaactctggtagggacagtcatcttcatcattgggttcctcctatttctcccctgtgttatcccacggataataaaagccattaaaactcttgttgaaactacagttagccgccagataatccagacgatcctcctgctacaatga

SEQ ID NO: 22880 - DNA, 1809 bp, Homo sapiens
  SIMILAR (1082)..(1741): 801254mologous to Homo sapiens reverse transcriptase homolog= pol {retroviral element},accession number S61070,Smith-Waterman Score=875.
atgcaagttaatctgaaaaaccacaacttttctgaagccactggagagctaaattcacaaggaaaccaattaacctggaatctaaggaaagatctgcatcttcaagaagatggaactggagtacttgcttacctgggaaaaatgccagacctgatgccagccagggacaaaggagacacgttttatctgtggaccgacccaaaactctggcgccggtcatggactagggaaggcagccttcccttggtgtttaatcattgcagggatgccgcctctctgattattcacccaggtttcagaggtgtcagaccacacaaggacgcctgccttagtccttcaacccttagcaacaagtcccgcttttctggaggagggaacatcacggacgccaggctttatgtaactctcacagtggagggcatagttggatactttcacctttggatacctggttttgccatcctaacaaaaccgttatataaactcacaaaaggaaacctagctgaccccatagatcctaaatcctttctccactcctctttccattccttgaagacagctttagagactgcccccaccctagctcttgctgactcatcccaacccttttcattacacacagcagaagtgcagggctgtgcagttggaattcttacacaaggactgggatcgcatcctgtaggctttttgtccaaacaacttgaccttactgttttaggatggccatcatgtctccgtgcagcagctgctgccaccctaatacttttagaggtccttataatcacaaactatgctcaactcactctctacagctctcataatttccaaaatctattttcttcctcacacctgatgcatatactttctgctccccggctccttcagctataccccactctttgttgagtctcccacaattaccgttgttcctggcccagacttcaatctggcctcccacattattctggataccacacctgacccccatgactgtatctctctgatccacctgacattcactccatttccccatatttccttctttcctgttcctcaccctggtcacacttggtttaacgacggcagttccaccaggcctaatcgccattcaccagcaaaggcaggccatgctatagtattttccacatctatcatcgaggctactgctctgcccccctccactacctctcagcaagccgaactcattgccttaatttgggccctcactcttgcaaagggactacatgtcaatatttatattgactctaaatatgccttccatatcctgcatcaccatgctgttatatgggctgaaagaggtttcctcgctatgcgagggtcctccatcattaatgcctctttaataaaaactcttctcaaggccgctttacttccaaaagaagctggagtcattcactgcaagggccatcaaaaggtgtcagatcccatcactcagggcaatgcttatgctgataaggtagctaaagaatcagctagtgtcccaacttctgtccctcgtggccagtttttctccttctcatcagtcactcccacctactctcctactgaaacttccacctatcaatctcttcccacacaaagcaaatggttcttggaccaaggaaaatatctccttccagcctcacaggcctgttttattctgtcgtcatttcataacctcttccatgtaggttacaagccgctagcccacctcttagaatatctcatttcctttctttcatggaaatctatcctcaaggaaatcacttctcagtgatccatctgctattctactactcctcagggatt

SEQ ID NO: 22881 - DNA, 496 bp, Homo sapiens
  SIMILAR (296)..(496): 981254mologous to Homo sapiens sorting nexin 15,accession number AF175267,Smith-Waterman Score=342.
  misc_feature (1)...(496): n = a,t,c or g
ntcgaaaactagatccctagccangtgcgtggaattccaagaaggacccagaggatgtcaaagaggtggtggtctggaagcggtacagcgacttccgtaagctgcatggagacctggcctacacccaccgcaacctcttccgccgcctcgaggagttccctgctttcccccgggcccaggtgtttggccggtttgaagcctcagtgatcgaggagcggcgaaagggggcagaggacctgcttcgcttcactgtgcacatacctgcgctcaacaacagcccccagctcaaggagttcttccggtggaccccccaccatccagccctgcccaggaggccctggatctcctctttaactgtgagagcaccgaggaggcatctggttcccctgcccgaggccccctcaccgaggctgagcttgccctcttcgaccccttctccaaggaagaaggcgcagcccccagccccacccatgtggctgagctggcaacgatggag

SEQ ID NO: 22882 - DNA, 352 bp, Homo sapiens
  SIMILAR (113)..(12): 521254mologous to Homo sapiens Human secreted protein, SEQ ID NO: 4567,accession number G00486,Smith-Waterman Score=73.
gaggccccctcaccgaggctgagcttgccctcttcgaccccttctcccaaagtgctgagattacaggcatgagtcactacgcccggcccatgtctgtctgtcttgatgtgtgamcagcagctgtggtcattaaaccattagtttacccctctagaactggggtctgcaaactcccacctgcagccaaatctggcccacctcctttttaatgtaagggctgtgagagtggtttttactttttttaatgattaaaaaaatcaaaataatattctgtgacaatgacaggtgaaatttatatgtgacaagtgaaaattatatgaaatttaagggtccataaataaaayttgtkggg

SEQ ID NO: 22883 - DNA, 414 bp, Homo sapiens
  SIMILAR (298)..(2): 961254mologous to Homo sapiens sorting nexin 15,accession number AF175267,Smith-Waterman Score=497.
cctgtcgggcaggcaacgggtcactggggactccctgaagcaagacgtgcacgccgtctcgatagccctggagtgcagcagcgtaagcgcctgccttctcatcccgcagggcctgggtgatgagctctgtggcctggcttaggtaggcaggggtgggccctccttccccatcctcttcctcctcctgccctcctggctcccagggttcctggtccagccttgcagactccacctccatcgttgccagctcagccacatgggtggggctgggggctgcgccttctgcagttagaaagggaggactcggaccagactggcccttcctttcccaggccctctgcccaaccccaagacttcttttgtccatcagggtatcagcctgtccccagtagaggggaccaatgccagagcaat

SEQ ID NO: 22884 - DNA, 627 bp, Homo sapiens
  SIMILAR (198)..(368): 891254mologous to Homo sapiens sorting nexin 15A,accession number AF175268,Smith-Waterman Score=262.
gccgccggtcctgctttggcttcgaggggctgctgggggcaaaagacttgtccggagtctcgccagtggtgtgctccaaactcaccgaggtccccagggtttgtgcaaagccctgggccccagacatgactctccctggaatctccccaccacccgagaaacagaaacgtaagaagaagaaaatgccagagatcttgggtggggaggtgacccgacccttggaggtgtccagggacctacacatcctgccaccccctctgatccccaccccgccccctgatgacccccggctatcccaactgctccctgcagaaaggaggggcctcgaggaattggagctcgcccctgcgaggaccccgccggattctgtgaaagatgcttccgccgcggagcccgcggcccccgagcgggttcttggagatgtcccgggggcctgcacgcccgtcgtacccacccgcatccccgcgatagtcagcctgagccgcggcccagtctcgccgctcgtgcgcttccagctgcccaatgtgctgttcgcctacgcgcatactctcgccctgtatcacggcggtgacgacgcgctgctctctgacttctgtgccacactgctcggcgtttccggagccctgg

SEQ ID NO: 22885 - DNA, 570 bp, Homo sapiens
  SIMILAR (265)..(429): 961254mologous to Homo sapiens sorting nexin 15A,accession number AF175268,Smith-Waterman Score=283.
atgcgcacgcgcagaccgcggccaggccttggagctgcgcccgaaggggcggcgaaggatgacttcctgcggcactacacagtgtcggaccccaggactcaccccaagggctacaccgagtacaaagtaaccgcgcagcctcccgagtacctgggactacaggtgcacgctgccacgccccagcacgagtctctggaaaaagacaacctcgccctgcggaaggagatccagtccctgcaggccgagctggcgtggtggagccggaccctgcacttcatctcaaagaaggacccagaggatgtcaaagaggtggtggtctggaagcggtacagcgacttccgcaagctgcatggagacctggcctacacccaccgcaacctcttccgccgcctcgaggagttccctgctttcccccgggcccaggtgtttgccttacctaaggccaagtgggagaatttccaggcatcagcatctttgatcagctccccagggtcccacagcacctgctgctacacagtgtccagtctggaccatggagtgagcaactcgggctccttcaaaggagcctga

SEQ ID NO: 22886 - DNA, 1930 bp, Homo sapiens
  SIMILAR (256)..(1068): 681254mologous to Homo sapiens sorting nexin 15,accession number AF175267,Smith-Waterman Score=865.
tttcgtggcggaggctgggccggaggggtggggactgctttgaggtggaggccggcgctccgctccgctccagctcggtttcatgtcccgccaggcgaaggatgacttcctgcggcactacacagtgtcggaccccaggactcaccccaagggctacaccgagtacaaagtaaccgcgcagttcatctcaaagaaggacccagaggatgtcaaagaggtggtggtctggaagcggtacagcgaccttccgcaagcctgcatggagaccctggcctacacccaccgcaacctctttccgccgcctcgaggagttccccgcttttcccccgggcccagggtgtttggccggttttgaagcctcagttgattcgagggagcgggcgaaagggggcagaggacctgcttcgcttcactgtgcacatacctgcgctcaacaacagcccccagctcaaggagttcttccggggtggggaggtgacccgaccctttggaggtgtccagggacctacacatcctgccaccccctctgatccccaccccgccccctggatgacccccggctatcccaactgctccctgcagaaaaggaggggcctcgatgaattgggggtggccagtggaaccccccaccaattcagccctgcccaggaggccctggatctcctctttaactgtgagagcaccgaggaggcatctggttcccctgcccgaggccccctcaccgaggctgagcttgccctcttcgaccccttctccaaggaagaaggcgcagcccccagccccacccatgtggctgagctggcaacgatggaggtggagtctgcaaggctggaccaggaaccctgggagccaggagggcaggaggaggaagaggatggggaaggagggcccacccctgcctacctaagccaggccacagagctcatcacccaggccctgcgggatgagaaggcaggcgcttacgctgctgcactccagggctatcgagacggcgtgcacgtctttgcttcagggagtccccagtgacccgttgcctgcccgccagaaaggtgtgaagaagaaggcagctgagtacctgaagcgggcagaggagattctgtgcctgcacctgtctcaactcccaccctaacagggagtgggcccttccctgggactctcgctcctgcactgccagccccttctcctctccccagggcctggccctacctcctggtcttgtaattacaggagccatttctgtaggtaactggaccaagaatgagaaaaataatgaattcttagctccctgattacacctgccaccttggaatccaggactcacacttctgaccctgcctgtctttttggggtttttttgagttggagtctcgctgtgtcgcccagactggagtgcagtggtgggatcacggctcactgcaacctccacctcccaggttcaagcagttctcctgtctcagcctccccagtagctgagattgcaggcacatgccaccacgcccagctaatattttgtattttcaagtaggggacggggggttacaaccatgtttgggcccaggctggtcctcgaactccctgaccctcaagtgatcccacccgccctcagtctccccaaagtgcctgagattacaggcatgagtcacctacgcccggcccatgtctgtctgtcttgatgtgtgagcagcagctgtggtcattaaaccattagtttacccctctagaactggggtctgcaaactcccacctgccagcccaaatctggcccacctcctttttaatgtaagggctgtgagagtggtttttactttttttaatgattaaaaaaatcaaaataatattctgtgacaatgacaggtgaaatttatatgtgacaagtgaaaattatatgaaatttaagagtccataaataaaatttgttggaacacaaaaa

SEQ ID NO: 22887 - DNA, 500 bp, Homo sapiens
  SIMILAR (1)..(216): 971254mologous to Homo sapiens DHHC-domain-containing cysteine-rich protein,accession number U90653,Smith-Waterman Score= 370.
  misc_feature (1)...(500): n = a,t,c or g
aatcacacggatgtntggntcgngttcctgcctgccgcccccgtggagacccaggcccctgccatcctggccctggccgccctgctcatccttctgggcctcctgtccacagccctcctggggcacctgctctgcttccacatttatctcatgtggcacaagctcaccacctatgagtacatcgtgcagcaccgcccaccacaggaggccaagggggttcacagggagctcgagtcatgtcctcccaagatgcggcccattcaggagatggagttctacatgcggaccttcagacatatgcgcccagagccccctggccaggccgggccagcagcagtgaatgccaaacactctcgccctgcctccccggatccgaccccaggtaggagggactgtgctgngcctccggtccaggtggagngggatagaaagaagcctctaccctggcgctcgcctctgcttcttttggcgatgtgggtgcccttangctcccccgtgtc

SEQ ID NO: 22888 - DNA, 119 bp, Homo sapiens
  SIMILAR (118)..(32): 931254mologous to Homo sapiens DHHC-domain-containing cysteine-rich protein,accession number U90653,Smith-Waterman Score= 123.
tgagataaatgtggaagcagagcaggtgccccaggagggtggggttgacaaagaactccacgaagacatatgtggccaccagcaccaggagcaggacgcccagtaaagcggatgcaaca

SEQ ID NO: 22889 - DNA, 370 bp, Homo sapiens
  SIMILAR (3)..(197): 1001254mologous to Homo sapiens brain specific protein,accession number BC000691,Smith-Waterman Score=332.
actgggccaagctgtgcaaggactgcaaggtggctgacggaaagtccgtgacagggaccgatgtggacatcgtcttctccaaagtcaaggggaagtctgctcgggtcatcaactatgaggagttcaagaaggccctggaagagctggcgaccaagagattcaaggggaagagcaaggaggaggccttcgatgccatcttcctgctccaacttctgtccacctggggacagtctgtgcctgtagcctcatgaccccaacccagccccaggcatggctaacccctgactgcttgcctcatatttaagctgctgctctggccaagtgcctaattttaacccagacctcaataaagacaccttatgtaccaaaa

SEQ ID NO: 22890 - DNA, 442 bp, Homo sapiens
  SIMILAR (164)..(271): 291254mologous to Homo sapiens DHHC-domain-containing cysteine-rich protein,accession number U90653,Smith-Waterman Score= 40.
tgcatgggcgccatctttgctggccaccttgtggtgcacctgaccgccgtctccatcgatccagcagatgccaacgtgcgggacaagagctatgcggggcccctgcccatcttcaaccgaagccagcacgcacatgtcattgaagacctgcactgcaacttgtgcaacgtggatgtaccccactcaaccaccccgaccggccgggccgcagagcggggaatgagccgggccaatcggcgctgtgccccctctccctgcaggagcgctcgctccaagcactgcagcgcctgcaacaagtgcgtgtgcggtttcgaccaccactgcaagtggctcaacaactgtgtgggcgagcggaactaccgtgttgcatccgctttactgggcgtcctgctcctggtgctggtggccacatatgtcttcgtggagttctttgtcaacccca

SEQ ID NO: 22891 - DNA, 2828 bp, Homo sapiens
  SIMILAR (585)..(1211): 1001254mologous to Homo sapiens DHHC-domain-containing cysteine-rich protein,accession number U90653,Smith-Waterman Score= 1126.
  misc_feature (1)...(2828): n = a,t,c or g
ttccattcgttgatgatgcggacagcatcatttccggcccagtctccgtccgggatggggccccgctcccgggcgcgttgccgcccagtcccggggaccgtccctaccgcgagggtctgaggcgcggctgccccggggagggtggaaggccaggcgtggggcccgaacctctggctgactttggcagggcccatctggcacggcctccgcggcgcgcagctgttttcaagtcagcaaacatttactgaggatctactatgtacaagatgaacatctgcaacaagccctccaacaagacggcccctgagaagagtgtgtggacggcaccggcacagcccagcggaccctcccctgagctgcagggccagcgatcccgccggaatgggtggagctggccccctcacccgctccagattgtggcctggctgctgtacctcttctttgctgtgatcggctttgggatccttgttcccctcctgcctcaccactgggtgcccgctggctacgctgtatccttgggaaagcgtagggctggtccctggaatccattcctctctgtctcagctgagacaatacttcctcagtgcatgggcgccatctttgctggccaccttgtggtgcacctgaccgccgtctccatcgatccagcagatgccaacgtgcgggacaagagctatgcggggcccctgcccatcttcaaccgaagccagcacgcacatgtcattgaagacctgcactgcaacttgtgcaacgtggatgtgagcgctcgctccaagcactgcagcgcctgcaacaagtgcgtgtgcggtttcgaccaccactgcaagtggctcaacaactgtgtgggcgagcggaactaccggctctttctacacagtgttgcatccgctttactgggcgtcctgctcctggtgctggtggccacatatgtcttcgtggagttctttgtcaaccccatgcgtctgcgcaccaaccgacactttgaagtcctgaagaatcacacggatgtgtggttcgtgttcctgcctgccgcccccgtggagacccaggcccctgccatcctggccctggccgccctgctcatccttctgggcctcctgtccacagccctcctggggcacctgctctgcttccacatttatctcatgtggcacaagctcaccacctatgagtacatcgtgcagcaccgcccaccacaggaggccaagggggttcacagggagctcgagtcatgtcctcccaagatgcggcccattcaggagatggagttctacatgcggaccttcagacatatgcgcccagagccccctggccaggccgggccagcagcagtgaatgccaatccctcccagtttcttgccacccgtggccaagcggaacctccaccaccctcttccccagacactctcgccctgcctccccggatccgaccccagaaaaagaggaagaggcgcgtgtataaagtgcgaacgtctgagacctcggatccggcgtcggggcctagggcccccagccgccgctccagctcgtcgacggattccgcggacgccagccctgtgcacgccgctggccctgccggcgcctaccactcggcgtcggcagagtccgtggacgagattccagtggcgcagacgcgcctgggcagcgccgctctggccgccccgcggggccggggccgacagcccacgctggcgcggcaggcgcgtgcgcccgccgttttcggtggcatggcagcgagcacagacatggctgggctggaggagagcttccgcaagtttgccatccatggtgaccccaaggccagtgggcaagagatgaatggcaagaactgggccaagctgtgcaaggactgcaaggtggctgacggaaanggtggcatggcagcgagcacagacatggctgggctggaggagagcttccgcaagtttgccatccatggtgaccccaaggccagtgggcaagagatgaatggcaagaactgggccaagctgtgcaaggactgcaaggtggctgacggaaagtccgtgaccagggaccgatgtggacattgtcttctccaaagtcaaggggaaggctgctcgggtcatcgactatgaggagttcaagaaaggccctggaagagctggcgaccaagagattcaaggggaagagcaaggaggaggccttcgatgccatctgccagctggtggctggcaaagagccagccaatgtgggcgtcactaaagcaaaaacagggggtgctgtagaccggctgacggacaccagcaagatacacgggctcccacaagaagcgcttcgatgagagcggcaagggcaaggcgcattgcgggacggcaggacatcttggacgaccagtggctacgtgagcgcctacaagaatgcaaggcacctacgatgccaaaggtgaaagaagtgaggcttgggaagaaccgcccttgccaaagtgcggcttgccccttgccagaggctcaggcctggggtcttaaggggcacgttggagcaagagatcctgggtccccttcccttgcttggaccttgccacccagaagcttcctgcctaagtcccacttgggcttggcccaccagggcttcttgaccccaggcttgctcttgcggcccctttcctcctcctcttccttgctccaacttcttgtccacttggggacagtctgttgccttgtagcctcatgaccccaacccagccccaggcatggctaacccctgactgcttgcctcatatttaaagctgctgctcgtggccaagtgcctaattttaacccaagacctcaataaagacaccttttgtaccaaaaaaaaaaaaaaaaaaa

SEQ ID NO: 22892 - DNA, 442 bp, Homo sapiens
  SIMILAR (124)..(237): 461254mologous to Homo sapiens Human neuroendocrine-specific protein NSP-A mutant fragment 1,accession number Y21434,Smith- Waterman Score=63.
  misc_feature (1)...(442): n = a,t,c or g
cccacgcgtccgtgttcagtgggcccagctgtctcaggataaaaagggggagatgaactcaatgacctctactgcgggacctccaggcagctcttcagctccctgtgcaacaagaaggaacctgctgcaaaggcagcacctgcagcgcctctcaggggaatttaaaaaagatcctgccacgtactcaaagcacctggagcctctggaggaagagagggacaaatgaggtcaagtcagaggaggaagctgagggccccgagtcccttctgctcagatgtccgcatccagagaggagttctgcttctctcaacctgtgtttcttgcaagagtttatctataaattgctgaaaaatgggtaaaaaaannnaaaaaannnnnnnnnnnnnnnnnnnnnnnnnnnnnnnnnnnnnnnnnnnnnnannnnnnnaaaaccccggcgggg

SEQ ID NO: 22893 - DNA, 1581 bp, Homo sapiens
  SIMILAR (187)..(420): 431254mologous to Mus musculus Hmg20B,accession number AL355734,Smith-Waterman Score=160.
atgccagaaggcaccatctatgaagcaaagaacaaaccctcaccagacacagaatttgctgtgagggcgtccctgggatgggatctgggcgcccggcgcagcgcggctgacaacagccgagcggttccggtgcgctggcacgtggctcgggcctgcccccccggcctggccgcctcccggcgcgttccccggtgcagaaaaggaaagggggctggcctaaaggcaagaagagaaaccccccgagggaccttgctgttccgtgttcctacgacagggtacatgatattcctgaatgagcagagaagtcagctgagggccacacaccccgatctgcctttcacagaaatcatgaagatgctggctgttcagtgggcccagctgtctcaggataaaaagggcagaaagtacgctgggaaagcccttggtgttactccacctccttcagcgctcacaccagtcgccttgattgaagagccaaagcagttggacatccagtctcttccttttcagcccatcctggaccggttaaagattaaagataagaggcagcttgttccctcctacctgggaggcatgcacacggtcaccgagggtcttgctggtaggcaggttctgctccagcaggttcagggtggggcctgggagtctgcatttctgacatgcccatgggccatggctgctgctgctccagggcccacactgactatgctgcagcccagcatctctgccgtgggcttttctcagatggccatggggccacatgtgcagggcagagctagcaaactgagcatctatgtaaacccacgcagacagctttccaccaccaccgccatgggagatgaactcaatgacctctactgcgggacctccaggcagctcttcagctccctgtgcaacaagaaggaacctgctgcaaaggcagcacctgcagcgcctctcagttcgccaggcccgcctgctctgggccacgcaggacacggacgtcagcttctcctggagcgctcgctcactttattccatctctacgagctcctcaagtatcccagagcatccccaggcctgtggccacctcgggtctggatgccgcattctctgacctgtggcacattctgggtgcccatgattatgatgaggttctgtgcccatgtggcctcagggctcttgagaccacccttcaaccaggtctttgctcacctgtctcctgcccagggacgccacccaggtgaaaatgggatcatcgtgctgacctcaagggcagctgttaggattcgatgttcctcatgttcacggtctctaaccgggaatttaaaaaagatcctgccacgtactcaaagcacctggagcctttggaggaagaggagggacaaatgaggtccagtcagaggaggaagctgagggccccgagtcccttctgctcagatgtccgcatccagagaggagttctgcttctctcaacctgtgtttcttgcaagagtttatctataaattgctgaaaaaagggtaatcaagttcagcaactccctggcatctgggatgacctatggttttgaatcctagtcagaaacacctacatagaggaag

SEQ ID NO: 22894 - DNA, 473 bp, Homo sapiens; identical to SEQ ID NO: 12051
  SIMILAR (26)..(403): 1001254mologous to Homo sapiens histone H2B,accession number Z80781,Smith-Waterman Score=629.

SEQ ID NO: 22895 - DNA, 526 bp, Homo sapiens
  SIMILAR (13)..(390): 991254mologous to Homo sapiens Histone H2B,accession number AJ223352,Smith-Waterman Score=627.
ctacacagtgctatgccagagccagcgaagtctgctcccgccccgaaaaagggctccaagaaggcggtgactaaggcgcagaagaaagacggcaagaagcgcaagcgcagccgcaaggagagctattccatctatgtgtacaaggttctgaagcaggtccaccctgacaccggcatttcgtccaaggccatgggcatcatgaattcgtttgtgaacgacattttcgagcgcatcgcaggtgaggcttcccgcctggcgcattacaacaagcgctcgaccatcacctccagggagatccagacggccgtgcgcctgctgctgcctggggagttggccaagcacgccgtgtccgagggtactaaggccgtcaccaagtacaccagcgctaagtaaacagtgagttggttgcaaactctcaaccctaacggctcttttaagagccacccatgttctcaaagaaagagctggtgcttgtattcctcctctgctggccactgacaaacccttgtaacttgctactgtgttt

SEQ ID NO: 22896 - DNA, 674 bp, Homo sapiens
  SIMILAR (84)..(461): 1001254mologous to Homo sapiens histone H2B,accession number Z83336,Smith-Waterman Score=628.
cggacgcgtgggtaagcggtaggttgacagaactaccgtcttcctgtttttttcctccaattttccggcagttactcccagtcatgcccgagccctcaaagtccgctcctgccccgaagaaaggctccaagaaggcagtgacaaaggcccaaaagaaggacggcaagaagcgcaagcgcagccgcaaggagagctactccgtgtacgtgtacaaggtgctgaagcaggtccaccccgacaccggtatctcgtccaaggccatgggcatcatgaactccttcgtcaatgacatcttcgagcgcatcgccggcgaggcttcccgcctggcgcattacaacaagcgctcgaccatcacctccagggagatccagacggccgtgcgcctgctgctgccaggggagctggccaagcacgcggtgtcggagggcaccaaggccgtcaccaagtacaccagttccaagtaactttgccaaatttccaagttgatcgtgatgttgatccgggactcggtgtggtgacggcccgccctgagcacgaaagtgcacgctcttgacaacttccttatgtttggagctttctccaccaccacccccgcccattttcttgtaaaatttttaccatgcagatatgtaataactgcaagtaaaggctgaagacaatgtgagctgaacacg

SEQ ID NO: 22897 - DNA, 597 bp, Homo sapiens
  SIMILAR (86)..(454): 901254mologous to Homo sapiens histone H2B,accession number Z80779,Smith-Waterman Score=541.
cgcgcccctcgagatcgtcgacattagtccgtgcggtggaattctcgatctgctgctcgtctcaggctcgtagttcgccttcaacatgccggaaccagcgaagtccgctcccgcgcccaagaagggctcgaagaaagccgtgactaaggcgcagaagaaggacggcaagaagcgcaagcgcagccgcaaggagagctactccgtatacgtgtacaaggtgctgaagcaggtccaccccgacaccggcatctcctctaaggccatgggaatcatgaactccttcgtcaacgacatcttcgaacgcatcgcgggtgaggcttcccgcctggcgcattacaacaagcgctcgaccatcacctccagggagatccagacggccgtgcgcctgctgctgcccgggggagttgggccaagcacgccgtgtccgagggcaccaaaggccgtcaccaagtaccaccagcgctaagttaaactttgccaaggagggacttttctctgggaatttccctgataatggaccaagaaaagcttcttatcaaaaagaagcaacaattgccttcggttacctcattatctactgcagaaaagaagacgaga

SEQ ID NO: 22898 - DNA, 1005 bp, Homo sapiens
  SIMILAR (367)..(432): 861254mologous to Homo sapiens histone H2B,accession number Z80779,Smith-Waterman Score=95.
ggaagctgtgcgattggcttacgttttatttttatttagaccaataggactcgattatgcaggatacctattttgattgggcaaaactggcatctgtcgtcatccacggataattaccaatcagcagagaccttcccactacctcggccgcataaactattatataaaaagaggagaccgacttcttgttttggttttgccactattgtttcattatgcccgagctggccaagtctgctcccgccccgaagaagggctccaagaaggcggtgaccaaggcccagaagaaggatggcaagaagcgcaagcgcagccgcaaggagagctactccgtgtacgtgtacaaggtgctgaagcaggtccattcccgacaccggcatctcttccaaggcaatggggatcatgaattccttcgtcacgacattcttcgaggcgcatcgcaggcgaggcttcccgcctggcgcattacaacaagcgctcgaccatcacctccagggagatccagacggccgtgcgcctgctgcttccgggggagctggccaagcacgccggtgtcggaggggaccaatgccggtcaccaagtacaccagttccaagtaactttgccaagggagagacatgaagacagaggagaaatgaatgcataaaataaccgattaatatgattctatacatagaacttaggaagtctcatcttgcctgaaaatgacctgtgtggatcccacccaaatccaacttcatcctggtttgctgcacactggttcatcaaaagaaggttaccgaggggaaggaactaaaggtgtttgcacttcatgttactttttgagtttataaacataaaaaccagaatttactytctgttacagacctagttactgggaattcattacttgccatggactacctttgctaagaaaagtctgaatgagaagatggcaggacgtctgaaaaaaaaagttataattaataaaatctgcgaagaattgtaaaaaaaaaaaaaaaaaa

SEQ ID NO: 22899 - DNA, 428 bp, Homo sapiens
  SIMILAR (194)..(319): 591254mologous to Homo sapiens ribosomal protein L37a,accession number X66699,Smith-Waterman Score=121.
  misc_feature (1)...(428): n = a,t,c or g
tctgagctcggacgtagttcacagcaacgtggctaaaccaagaagttggaatcgttggtaaatacaggacccgctatggggtctccctccagaaaatggtgaagaaaattgaaatcagccagtacgccaagtacatttgctcttttctgtggcaaaacccnaagatgaagagacgagctgtggggatctggtgctgtggttctgcatgaagacagtaaaggtgtcttcatccaggaaccacattgtctggacctacaataccacttcagctgtcacggtaaagtccaccatcagaagactgaagcaattgaaagaccagtagacgctcctctactctttgagacatcactagcctataataaatgggttaatttatgtaaccaaaaaaattaaaaaggtttgtggaaaaactgaaaaaaaaaaaaaaa

SEQ ID NO: 22900 - DNA, 770 bp, Homo sapiens
  SIMILAR (117)..(395): 641254mologous to Homo sapiens ribosomal protein L37a,accession number X66699,Smith-Waterman Score=236.
  misc_feature (1)...(770): n = a,t,c or g
gtcatatgtaattcacatgtcggtcacacgtcagtgaggtggaggaacggtgtgtggaggctccgggcctgctgggttccaggtctatcactggtttctcccttcactctaaacaggccaaacgtaccaagaaagtcgggatcgtacggtaaatacgggaacccgctatgggggccttccctccgggaaaatggtgaagaaagattgaaatcagccagcacgcccaagtacactttgctcttttctgtggcaaaaccaagatgaagagacgagctgtggggatctggcactgtggttcctgcatgaagacagttggctggcggtgcctggaccgtacaataccactttccgctgtcacggtaaagtccgccatcagaagactgaaggagtttgaaagacccagtaggacgctcctctactctttgaggacatcactgggcctataaattaaatgggggtaattttatgtaacaaaatttgccttggctttgttaactttattagacattctgatgtttggcattgtgtaaatactgttgtattgggaaaagcatggccaagatgggttattgttaatttcagtgtctttttttagtagtccaatggtaaaatgcagcatangactataagtcttccaagttagatatgagtgttagctttttataagtcatgctcatgcagtttgactatgagatacaattgagctcactggtaaactntagtttttaaattaccagtacgttatatggttgttatgagggcgaagcttg

SEQ ID NO: 22901 - DNA, 356 bp, Homo sapiens
  SIMILAR (3)..(167): 821254mologous to Rattus rattus fusion protein,accession number X62671,Smith-Waterman Score=224.
  misc_feature (1)...(356): n = a,t,c or g
cggttgcccagagcaaggcccatgtagcatccctggagggcctcatccctgaagataaggtcgtgcttctggcaggttctcccttacagaatgaagccaccctgggtcagtgtggggtggaagccctgacaaccctggaagtggttggccgcaggctaggagttcacaatgtctaaaagtcagctgattttgtgttaaaattcagtgtctggctttgcttcaaaaattgggaagatnnnnnnnnnnnnnnnnnnnnnnnnnnnnnnnnnnnnnnnnnnnnnnnnnnnnnnnnnnnnnnnnnnnnnnnnnnnnnnnnnnnnnnnnnnnnnnnnnnnnnnnnnnnnnnnnnnnnnnnn

SEQ ID NO: 22902 - DNA, 439 bp, Homo sapiens
  SIMILAR (424)..(233): 711254mologous to Rattus rattus fusion protein,accession number X62671,Smith-Waterman Score=222.
  misc_feature (1)...(439): n = a,t,c or g
catcccggcgttttaaaaccgcgggcagtggattgttattcggctccctataaggggaattggggtccggggccccccccgaggnnnnnnnnnnnnnnnnnnnnnnnnnnnnnnnnnnnnnnnnnnnnnnnnnnnnnnnnnnnnnnnnnnnnnnnnnnnnnnnnnnnnnnnnnnnnnnnnnnnnnnnnnnnnnnnnnnnnnnnnnnnnnnnnnnnnnnnnnnnnnnnnnnatcttcccaatttttgaagcaaagccagacactcctagcctgcggccaaccacttccagggttgtcagggcttccaccccacactgacccagggtggcttcattctgtaagggagaacctgccagaagcacaaccttatcttcagggatgaggccctccagggatgctacatgggccttgcgatgggctgcgctnaacctatgactacg

SEQ ID NO: 22903 - DNA, 843 bp, Homo sapiens
  SIMILAR (280)..(498): 801254mologous to Rattus rattus fusion protein,accession number X62671,Smith-Waterman Score=295.
atggtccgctgcgtccgactggtggaagcaggatctgtggtgagatacctcagcacaagcatatgcaggcctgtggtagacgccggaagtagggccctttgtctccaagaatgggcagactctcaacaggtgaaagaaaaacagtactccagcagagatgtccagagagcagccgctctcaacatctaccgtatcccaccgtctagcaggaagcccgctctctgtccaactccgcgggaccgactagagtacgacgaggaccgactagagcacatcgcctacgtgcgcgcccgggagctgcacactcttgaagtgaccggcctggagacggttgcccagagcaaggcccatgtagcatccctggagggcctcatccctgaagataaggttgtgcttctggcaggttctcccttacagaatgaagccaccctgggtcagtgtggggtggaagccctgacaaccctggaagtggttggccgcaggctaggagcctcgcttcaacttcagcctccaaacacactatggtgcgggcacttacttactgcagcagcagagaggaaacattcacggccatctaagtcccaacctgccgatgaagcaacaaagctctggccttacaaggcctcagaaatgggggcagtcaaaacacactctgtttgcaaagccctctgtcttcaggaccgccagccgcccccactgccagagcctaccacttcctcttgggtccctgctgatgggaatggcctgcactgtgcttgtcccggtggccccatcacagcaccagttgtgactgtccttgaatctctgaaggagccttttctgccccaacccaccttggtctga

SEQ ID NO: 22904 - DNA, 450 bp, Homo sapiens
  SIMILAR (448)..(395): 881254mologous to Homo sapiens YY1 and E4TF1 associated factor 1,accession number AB029551,Smith-Waterman Score=81.
  misc_feature (1)...(450): n = a,t,c or g
cctattatctgtttcctgttctggccacagtatttaaaaaagagaaaaagtcaccagccccacccatacttagctcttcaccttcttagcctacaaacccaaggcacaaaaccaccctggattcatgattacgattaagtaaatcagagcagtgatttagtatgtcattctagtttccaagtaccttgaggtgtgatttgtttcgctggtctttgttgtagcatttgcagactgtatgctgtttgcttcactaggaggatctttcagaatgtcagactttggtctaaatgagggagannnnnnnnnnnnnnnnnnnnnnnnnnnnnnngcatttagaagatatcttgaattcacttgcaaagtaatatcctgtacttagttaaccagaaacttacttggttttcttgttggtatttttcttggtaacactaggactaatttccgaattcc

SEQ ID NO: 22905 - DNA, 804 bp, Homo sapiens
  SIMILAR (280)..(420): 931254mologous to Mus musculus Ring1 interactor RYBP,accession number AF101779,Smith-Waterman Score=239.
tcaagggcaggccaagatggtgccgtgaactgggtaggagatgccaaggcagttagtgaaaggggaaggagaattcgacacggaagcatgagatggagcatccgacgaggatccatgagcctcgagcacagcagcctccagaagttgcagagacaatgaggatgtgttctcccatgagtcgttcagaagacagagccgcgtctgtgttttgctgtctctcccccgttttcctgctccctgcctcttccctcccttttcccccactctccactcctcggaaggccaaaaagacaagcgaaacctgccgcagacgaagggttttgggattgtagcgtctgcaccttcagaaacagtgctgaagcctttaaatgcagcatctgcgatgtgaggaaaggcacctccaccaggtacttgaagatctgtgttacctgggtagttgtggtcatttgacaagtttttattgagcacacagccatttgcgctcttggtgtacagtggtataaagacagaccaggtccctgttcttacggagcttaaaatactggatctggtccctattcggcaccaatccctgttctgcagtgctgccctctccagggaagcctcgctatgtcctgaggccccttgggggatgaggactgggggcatctttgacggggcccgggtgtggagcagcaagagtctttctggggaagcggcttgctcccaggcagccattgtgggggcctgtttgctctggtcatccatttctcctgggcacatgctggcttcctgtttatgcttcctgttgtgcagcgtggccat

SEQ ID NO: 22906 - DNA, 1501 bp, Homo sapiens
  SIMILAR (71)..(760): 461254mologous to Homo sapiens death effector domain- associated factor,accession number AF179286,Smith-Waterman Score= 367.
  misc_feature (1)...(1501): n = a,t,c or g
actccccggacggcgtttctcctccgagcggcgccggtttcgngttggggggggcggggtacagccatccatgaccatgggcgacaagaagagcccgaccaggccaaaaagacaagcgaaacctgccgcagacgaagggttttgggattgtagcgtctgcaccttcagaaacagtgctgaagcctttaaatgcagcatctgcgactgtgaggaaaggcacctccaccagaaaacctcggatcaattctcagctggtggcacaacaagtggcacaacagtatgccaccccaccaccccctaaaaaggagaagaaggagaaagttgaaaaagcaggacaaaagaggaaacctgagaaaagaccaaggaaatttagtccttagttgttaccaagaaaaataccaacaagaaaaccaaaccaaagtctgatcattctgaaagatcctcctagttgaagcaaacagcatacagtctgcaaatgctacaacaaagaccagcgaaacaaatcacaccttcaaggccccggctggaaaaacgtgggacagggggcattgcacagcagtttgggcagttaactgtggggcaacgtcaccgtcattatcacagactttaagggaaaagactcgctcctcatcggacatcctcatccacagtgacctcccagtgcagggtcaggaacagcagaaccagaggcagcttcgggggttcagaggagccacagacaagggctccctccccgttcctcccaaccccaaagggcgaccatgtcaagcagtcaatgatgaatctttcctgaaattggcacatgggaattgtggaaaactatggaattcaggggtatggaaatttcaaaaccttccacctgcccatgcttgcttgcatccctgggagaatctttcttgtgggacatcgacctctttagttgattgctgccaggataatttcttgctttgccatgggcattcttggccaccaagggattttcggcaccctgacgattactctggacacttttaatgtattccattgttttatatgattttcctaacaatcatttataattggatgtgctcctgaatctactttttataaaaaaaaaaaaaaaatctgctgtgcacaattttccatgtacattacaactggttttttgtttttgttttgttgccggtggggagggctgggagggggagggaacttttatttattgtgttcacaaactccatcctttcagcatatccttttaagtttagttctttcttccagttatactatgtactatcagttttgatataactatatatatataaatataaaattatatataaagggttatttgaaaccaatccatggcaaacgctggtgcttgatacactgtgaagtgaatacaacattgaacagttacagatctgggacagtcccttctatgaaagtgctgaaatttaattaaaatcagtcttacatgaagtatgttccaatccatgtgggaacttgagtctttaatctc

SEQ ID NO: 22907 - DNA, 678 bp, Homo sapiens
  SIMILAR (552)..(623): 681254mologous to Homo sapiens HSPC037 protein,accession number AF125098,Smith-Waterman Score=75.
atggcgggctgcagaaacccatgtaaagctgagagccacagaagcaagagcctgctcagcgaagccgagagcctgttcagggaagccgaaagccagcatgaccgagggagcaagaatgcgggccatcgggatgagtcggtggaggtgtggctgagcctcctctccagcagccaaaccagagcagagattgaaaggcaatctcggggaaaacagtggctgcggcacctcctccgggacactgaagggcccaaggagactgtgaggcccgagctggccactcgcgccgccatggacgtggccgaggtcgagttcctggctgagaaggagctggttaccattatccccaacttcagtctggacaagagctacctcattggggtggacaacatcccgaaggcagacgaaatccggaccctggtcaaggatatatgggacactcgtatagccaaactccgagtgtctgctgacagctttgtgaggcaacaggaggcacatgccaagccggataacttgaccttgatggagatcaaccccagcgggactttcctcacacaagcgctcaaccacacgtacaaactcgcacaaacctccagccttcggagagtactcagtctcaggacttctagagaaaggcctggtgcaggcagcttgctgggggatgtgacgctcaggacgtga

SEQ ID NO: 22908 - DNA, 1499 bp, Homo sapiens
  SIMILAR (697)..(897): 661254mologous to Homo sapiens HSPC037 protein,accession number AF125098,Smith-Waterman Score=187.
atggacgctgccgaggtcgaattcctcgccgagaaggagctggttaccattatccccaacttcagtctggacaagatctacctcatcgggacgtgggaactgaagtacagggagattaggtggctttctcaagggcctcacggaaagccccacgctgacccgggaagcagcatcctgcagaacagctcaggcccctctggggtccgcaccaatgggaagagcaagccgtgggagccctttgtggcagaagagtttgcacatcagttccacgagtcagtgctgcagtccacccagaaggccctgcagaagcataaagggagcgtggctgtgctgtctgcagagcagaaccacaaggttgacacgtccgtccactacaacattcctgagctgcagtcctccagccgcgcccctccaccccagcacaatgggcagcaggagccccccactgcaaggaagggccccccaacccaggagttggaccgggactcggagcaggagcaagaggaggatgatgaagatggagaagatgaggaggaagtccccaagcgcaagtggcaagggatcgaggccgtttttgaagcttaccaggaacacatagaagagaggacacttgaaagaaatcggagttcaactgcagctgataaagcccagctccttgcagccaatcggcaaggccacggccaacccacagaccctgcttcagacaacatcccgaaggcagacgaaatccggaccctggtcaaggatatgtgggacactcgtatagccaaactccgagtgtctgctgacagcttttgtgagacagcaggaggcacatgccaagctcggataacttgactttcgatggagatccacaccagcggtgactttcctcacacaagcgctcaaccacatgtacaaactccgcacgaacctccagcctctggagagtactcagtctcaggacttctagagaaaggcctggtgcaggcggcttgctgggggatgtgagcgctcaggacgtgatgaggtactcgtggttctggagctctagaaacacttctgatgcatgaaaaatgtgtgatggtgcaaggaatggattcaggatgttgttgggagaaacaagttttgttgattagtccctaaaaactttagctccctggggacattctttcatttcccacatctgttttctaggaaaccagccctttttccccccacttttgagaaataaaaaagccttaggtaaataagtcattctccctagcagagccacttgggtctcctgcatggaagccgtcacacttgggcaggtgttcagtgactggtaggtgtagatacagcaggagtggccatgtggtccacggctttttaccccttcttgatcctgatttcttgggctgaatttagactctctcacagaggtggctcacagagaaggatggcagatggtgcagccaacaatgctgaccggtgcttatcctctaagccctgatccacaataaaaatgaacccaactc

SEQ ID NO: 22909 - DNA, 678 bp, Homo sapiens; identical to SEQ ID NO: 22907
  SIMILAR (552)..(623): 681254mologous to Homo sapiens HSPC037 protein,accession number AF125098,Smith-Waterman Score=75.

SEQ ID NO: 22910 - DNA, 1190 bp, Homo sapiens
  SIMILAR (77)..(640): 681254mologous to Homo sapiens HSPC037 protein,accession number AF125098,Smith-Waterman Score=576.
gcggccgcggcgtctcctccgggacgctgaggggcccgaggagaccgtgaggctctggcctgcagctcgcgccgccatggacgctgccgaggtcgaattcctcgccgagaaggagctggttaccattatccccaacttcagtctggacaagatctacctcatcgggggggacctggggccttttaaccctggtttacccgtggaagtgcccctgtggctggcgattaacctgaaacaaagacagaaatgtcgcctgctccctccagagtggatggatgtagaaaagttggagaagatgagggatcatgaaccgaaaggaagaaacttttaccccaatgcccaagccctttactacattggaacttaccgaagctcctgttaaatcatgcttcagacaacatcccgaagcaagacgaaatccggaccctggtcaaggatatgtgggacactcgtatagccaaactccgagtgtctgctgacagcttttgtgagacagcaggaggcacatgccaagctcggataacttgactttcgatggagatccacaccagcggtgactttcctcacacaagcgctcaaccacatgtacaaactccgcacgaacctccagcctctggagagtactcagtctcaggacttctagagaaaggcctggtgcaggcggcttgctgggggatgtgagcgctcaggacgtgatgaggtactcgtggttctggagctctagaaacacttctgatgcatgaaaaatgtgtgatggtgcaaggaatggattcaggatgttgttgggagaaacaagttttgttgattagtccctaaaaactttagctccctggggacattctttcatttcccacatctgttttctaggaaaccagccctttttccccccacttttgagaaataaaaaagccttaggtaaataagtcattctccctagcagagccacttgggtctcctgcatggaagccgtcacacttgggcaggtgttcagtgactggtaggtgtagatacagcaggagtggccatgtggtccacggctttttaccccttcttgatcctgatttcttgggctgaatttagactctctcacagaggtggctcacagagaaggatggcagatggtgcagccaacaatgctgaccggtgcttatcctctaagccctgatccacaataaaaatgaacccaactc

SEQ ID NO: 22911 - DNA, 1041 bp, Homo sapiens
  SIMILAR (491)..(1036): 761254mologous to Homo sapiens match to AA908753 (NID:g3048158),accession number AC004940,Smith-Waterman Score=673.
tgacaagcagcatggctgcaggttgctcagaggcgccgcggccagcggcgggtttctgatgggtctctggtagggcaggctggcgtcctgccttgcctagagttgccgacttatgccgctgcttgtgcgctggtgaacagtcgctactcatgcctggtggccgggccgcaccaaaggcacatcgcgctgtcgccccgctaccttaacaggaaacgcaccggcattcgagaacagcttgatgcggagctccttcgctattctgagagccttttaggtgtccctattgcatatgataacatcaaagttgtgggagagcttggagatatttatgatgatcaaggacacattcatcttaacattgaagccgattttgttattttctgccctgaaccagggcagaagcttatgggtatagttaataaagtgtcttctagccacattggctgtttagtacatgggtgtttcaatgcctccattcctaaacctgagccagttgtcagctgagcagtggcaaaccatggagataaacatgggtgatgaactagaatttgaagtatttcgtttagactcagatgctgctggagtattctgcattcggggaaaactaaatatcacaagtttacaattcaagcgctctgaagtttctgaagaagttacagaaaatggcactgaggaagctgctaaaaaacctaaaaagaagaaaaagaagaaagacccagagacatatgaagtggacagtggtaccacaaagctagcagatgatgcagatgacactccaatggaagagtcagccctgcagaatactaataatgcgaatggcatctgggaggaggagccaaagaaaaagaagaagaagaaaaagcacccaggaagtttccaggacccaggacccctgtttttcccaaggccagttgacttcccagtggttaccaaagtgaccataaaaagaaaaaaaagaaaagaaaacacagtgaagaggccgaatttaccccacctttgaaatgctcaccaaaaagaaaagggaaaagtaattttctttag

SEQ ID NO: 22912 - DNA, 419 bp, Homo sapiens
  SIMILAR (18)..(407): 651254mologous to Homo sapiens calcium channel gamma 5 subunit,accession number AF142621,Smith-Waterman Score=477.
ttcccgggtcgacgatttcgtgcagccgcgccctgaccctgctgagcagcgtgtttggtgcgtgtggcctgctcctggtaggcatcgcggtcagcactgactactggctgtacatggaagaaggcacagtgctaccgcagaaccagaccaccgaggtcaagatggccctgcacgccggcctctggcgagtctgcttctttgcaggtcgggagaaaggtcgctgtgtggcctcagaatattttcttgaaccggagatcaatttggtgacggaaaacacggagaatattctgaagacagtgcgcacggccacccccttccccatggtcagcctcttcctcgtgttcacgggcttcgtcatcagcaacatcgggcacatccgcccgcagaggaccattctggattttgttcagagctgccag

SEQ ID NO: 22913 - DNA, 1625 bp, Homo sapiens
  SIMILAR (3)..(1622): 971254mologous to Homo sapiens protein kinase C gamma,accession number Z15114,Smith-Waterman Score=2765.
tgcagctggagatccgggctcccacagcagatgagatccacgtaactgttggcgaggcccgtaacctaattcctatggaccccaatggtctctctgatccctatgtgaaactgaagctcatcccagaccctcggaacctgacgaaacagaagacccgaacggtgaaagccacgctaaaccctgtgtggaatgagacctttgtgttcaacctgaagccaggggatgtggagcgccggctcagcgtggaggtgtgggactgggaccggacctcccgcaacgacttcatgggggccatgtcctttggcgtctcggagctgctcaaggcgcccgtggatggctggtacaagttactgaaccaggaggagggcgagtattacaatgtgccggtggccgatgctgacaactgcagcctcctccagaagtttgaggcttgtaactaccccctggaattgtatgagcgggtgcggatgggcccctcttcctctcccatcccctccccttcccctagtcccaccgaccccaagcgctgcttcttcggggcgagtccaggacgcctgcacatctccgacttcagcttcctcatggttctaggaaaaggcagttttgggaaggtgatgctggccgagcgcaggggctctgatgagctctacgccatcaagatcttgaaaaaggacgtgatcgtccaggacgacgatgtggactgcacgctggtggagaaacgtgtgctggcgctggggggccggggtcctggcggccggccccacttcctcacccagctccactccaccttccagaccccggaccgcctgtatttcgtgatggagtacgtcaccgggggagacttgatgtaccacattcaacagctgggcaagtttaaggagccccatgcagcgttctacgcggcagaaatcgctatcggcctcttcttccttcacaatcagggcatcatctacagggacctgaagctggacaatgtgatgctggatgctgagggacacatcaagatcactgactttggcatgtgtaaggagaacgtcttccccgggacgacaacccgcaccttctgcgggaccccggactacatagccccggagatcattgcctaccagccctatgggaagtctgtcgattggtggtcctttggagttctgctgtatgagatgttggcaggacagcctcccttcgatggggaggacgaggaggagctgtttcaggccatcatggaacaaactgtcacctaccccaagtcgctttcccgggaagccgtggccatctgcaaggggttcctgaccaagcacccaggggaagcgcctggggcttcagggccttgatgggggaacctaaccatccgtgcacatgggttttttccgctgggatttgactgggagcggctggaacgattggagatccccgcctccttttcaagaccccgcccgtgtggccgcagcggcgagaactttgacaagttcttcacgcgggcggcgccagcgctgacccctccagaccgcctagtcctggccagcatcgaccaggccgatttccagggcttcacctacgtgaaccccgacttcgtgcacccggatgcccgcagccccaccagcccagtgcctgtgcccgtcatgtaa

SEQ ID NO: 22914 - DNA, 1924 bp, Homo sapiens
  SIMILAR (1098)..(1259): 461254mologous to Mus musculus protein kinase C- alpha,accession number M25811,Smith-Waterman Score=88.
atgttgcgggctccacggcaggcgactcgcgatcaccacttcgcacatatcgacattgtccaggttacctgcttccgctacctgcgccgctccgctctagctcccgctccagcgatgccgtcgcctgtccgcgtggaccgcggttctttcccccctgtggccggggggaaccacaccaggaggagaggtggcacaccccaggaaggagtaaccagggaggcattggcattcttcgatgtggtggccaccactggggcagagatgatgtggtccaacttcttcctgcaagaggagaaccggcggcggggggccgcgggccggcggcgggcgcacgggcagggcaggtcggggctgacgcccgagcgcgaggggaaggtgaagctggcgctgctgctggccgcctgggcgccacgctggcggtgctgtccgtgggcaccgagttctgggtggactcaacacctacaaggccaacggcagcgccgtgtgcgaagcggccccacctggggctgtggaaggcgtgcaccaagcggctgtggcaggcggacgtgcccgtggacagggacacctgcggccccgcggagctgcccggaggcctcggagagaaattctgaacacccagctctgatctgtacccttccgcagccccatatgctcaagagaagggcacgcagagcccctggcagcatggcaccaccgctgccgcgtcctcctcaagctgcgtctgtgcctgttttcccgccagactgggagccccttgagagcagggcaagatcaaaatcacctctccactcccagcaccgcccagcacaagagacaggaaggcacagccgaccaagaacaagcacaaggaaaagacaacaaaagcacagcacggaaaaggcaactcacacaccggaacgggcacccaaaccacagacaagggaaaacaacccgaaaggacgagcacaaggcagccctgcaccccgagaccacaacccagcaagcagacaccaaaaaacaagcaacgacaaaagaagcacacacgacacacacaagacaagaaaagacagccagacaagaagaaagaagacaagaaacaacgagaagcagcaaccggaccggacggaccccagatcattgcctaccagcccatgggaagtctgtcgattggtggtcctttggagttctgctgtatgagatttggcaggacagcctccctcgatggggaggacgaggaggagctgtttcaggccatcatggaacaaacgtcacctaccccaagtcgctttcccgggaagccgtggccatctgcaagggtgtggccgcagcggcgagaactttgacaagtcttcacgcgggcggcgccagcgctgacccctccagaccgcctagtcctgccagcatcgaccaggccgatttccagggcttcacctacgtgaaccccgattcgtgcacccggatgcccgcagccccaccagcccagtgcctgtgcccgcatcctctcccacccggccacagctgctggagaataaatttggatgctgatgctgaagtgtttggatattttcttgccccgcagggcgcccctgcctctgaggatgagtcactgcagcagccgcgccctgaccctgctggcagcgtgtttggtgcgtgtggcctgctcctggtaggcatcgcggtcagactgactactggctgtacatggaagaaggcacagtgctaccgcagaaccgaccaccgaggtcaagatggccctgcacgccggcctctggcgagtctgctctttgcagacagtgcgcacggccacccccttccccatggtcagcctcttcctcggttcacggccttcgtcatcagcaacatcggccacatccgcccgcagaggccattctggcttttgtctctggcatcttcttcatactatcggtggctgtgcaatcgttga

SEQ ID NO: 22915 - DNA, 2345 bp, Homo sapiens
  SIMILAR (250)..(1737): 831254mologous to Homo sapiens ubinuclein,accession number AF108459,Smith-Waterman Score=1989.
tgcgccgccgcccggggaccggcatgaggaccgccgcggggggacgtctgcggcccgcgtcggcgctggggacaaagaagccatgcagtgacacccgctaagacttgttggtagccatgtcggagccccacagggtccagttcacctctctcccaggttccctgaatcctgcgtttttgaagaagtcccggaaggaggaggctggggcaggagaacagcatcaggactgtgagccggctgcagcagcctgttcggatttacactcacccctctttgaactcagatcacaaacgctgccccagagttccttcctaccccagagctggtgaagaatatccgagggaaggtaaaaagccttcagccctggagataagaagaaagatctgtcagatcctttcaattgacgaagaaaaggaaaggcataaaagtagaggcccttgcccgaaaatttgaagaaaaatacggttggaaagaaacgtagaaaagaccgaatacaggacttgatcgatatggggtatggttatgatgaatccgactccttcatcgataactctgaggcgtatgatgagcttgttccctgcttctttgactacgaagtatggaggattttacattaactcgggaaccctgcagtttagacaagcatcagagtctgaagatgacttcattaaagaaaagaagaaaaaatctccaaagaagcggaagttgaaggaaggtggtgagaagataaagaagaagaaaaaagatgacacttatgacaaggagaagaaatcgaaaaagtccaagttttccaaagccggcttcacagccctcaatgccagtaaggagaagaagaagaagaaatattctggggctttaagcgttaaagagatgctaaagaaatttcagaaagagaaagaggctcagaaaaaaagggaggaggagcataagcctgttgcggtcccatcagcggaagctcagggcctgcgggaactggagggtgcctctgaccccttgctctcactctttggctctacttctgacaacgacttgctccaggcggccactgccatggactcgctgacggatttggacttggagcatctgctcagtgagtctccagaaggaagtcccttccgagatatggatgatggaagtgattcccttggggtgggattggaccaggaattcaggcagccctcttctctccccgaaggcctgccagcacccctggagaagcgcgttaaggagctggctcaggctgccagagctgctgagggggagagcagacagaagttcttcacccaggatattaatggaatcctattagacatagaggcgcagactcgggagctgagcagtcaggtccgctctggggtgtatgcctatcttgcgtcattcctgccctgcagcaaggatgccctgctcaagcgtgctcggaaacttcacctctatgaacaggggggccgtctgaaggagcctctccagaagctcaaggaagccattggcagggcgatgccagagcagatggccaagtaccaggacgaatgccaggcacacacgcaggcaaaggttgccaagatgctggaagaggagaaagacaaggagcagagggaccggatttgttcggatgaggaagaagatgaagaaaaaggggggaggaggataatgggacctcggaagaagttccaatggaatgatgagatcagggagctactgtgccaggtggtgaagatcaaactggagagccaggacctgggagaggaacaacaaagctcagggcttgggaggactgtgtgaagggctttctggatgcggaagtcaagcccctctggcccagaggctggatgcaggccagaactctgtttaaggagagcagacgaggccatgggcacctgacttcaatcctggccaagaagaaagttatggccccttctaaaatcaaggtgaaggaatcgtctacgaagcctgataaaaaggtttctgtcccatcaggacagattggtggccccattgctttgccctcagatcaccaaacaggaggcctgagtattggggcctcgagcagggagctcccatcacaggcatcgggcggccttgctaaccctcctcctgtcaacctggaggactcattggatgaagacttgatccgcaatccagcctcctcggtggaagccgtgtccaaggaattggctgcattgaatagcagagcagctgggaactctgaattcacactgcctgcaccctcaaaagcacctgcagaaaaagttggaggcgttttatgtacagaagaaaaaaggaactttgcgaagcctagtccttctgctccaccaccagctagctctctgcagtcacccctcaatttt

SEQ ID NO: 22916 - DNA, 492 bp, Homo sapiens
  SIMILAR (1)..(165): 711254mologous to Homo sapiens receptor protein-tyrosine kinase,accession number L36645,Smith-Waterman Score=203.
gcctatcgtaatttcacatcagcaagtgatgtatggagctatggaatcgttatgtgggaagtgatgtcgtacggggagaggccctattgggatatgtccaatcaagatacctaacactgccttgttggatccagcctcccctgaattctctgctgtggtatcagtgggcgattggctccaggccattaaaatggaccggtataaggataacttcacagctgctggttataccacactagaggctgtggtgcacgtgaaccaggaggacctggcaagaattggtatcacagccatcacacaccagaataagattttgagcagtgtccaggcaatgcgaacccaaatgcagcagatgcacggcagaatggttcccgtctgagccagtactgaataaactcaaaactcttgaaattagtttacctcatccatgcactttaattgaagaactgcactttttttacttcgtcttcgccctctgaaattaaagaaatg

SEQ ID NO: 22917 - DNA, 732 bp, Homo sapiens
  SIMILAR (10)..(123): 1001254mologous to Homo sapiens receptor protein-tyrosine kinase,accession number L36645,Smith-Waterman Score=171.
tcattcccagtgccttcccggatcattggagatggggctaactccacagtccttctggtctctgtctcgggcagtgtggtgctggtggtaattctcattgcagcttttgtcatcagccggaggtaagcactgaagccactcactgtgcagcccccgaccttcccagtgtttatgatggtttttttctcttccacacaaagctaaggcttttgattgcgtcataaacttggcatctgcatcccaagtttcctccttgttgctttgatcttcccacacccctaccaaagctgctagctgtaccctggtggcaggctgagaggtccggaaggacccagctaattgtaggaaacaaagctgaagagcaagccagtgggagatttctagatgctttaagctgccaggtgttacgtttatccctctcttaagcctggactcatcccatcgtctgcccagaggctccagaggagtagtcattgatatgtgccccacatctgggccttctttgtctttgatgtgtaagaatctgcctcttccctgatcggcatccccatataccatcaactgtttcacaagatggggaggcttggaaagtcgaagggactgggccaactggtgtccttcataccctctgtgccccagtgccccaacagctccaggagggagaggtgcaagtgccaggacaaagctttttacaatgacttctgcctcttggcccagatatctgtcactggg

SEQ ID NO: 22918 - DNA, 411 bp, Homo sapiens
  SIMILAR (51)..(206): 981254mologous to Homo sapiens receptor protein-tyrosine kinase,accession number L36645,Smith-Waterman Score=296.
atgatcagtcactggacagtttcttgtccttgtcgatcttccactcccactcttgcaaaattggatattacaaggctctctccacggatgccacctgtgccaagtgcccaccccacagctactctgtctgggaaggagccacctcgtgcacctgtgaccgaggctttttcagagctgacaacgatgctgcctctatgccctgcacccccatatatggctagtggagactataccggacggcagacccagagaacgtttctatcaccacagaaagttctattggacaatactgtagtagacgttccaacagagaagacagtaggagtttctcaaagaacctcttgttcagatgatccacagagtaactctccccactcgcacgctgcccccagctttatcggattctcttga

SEQ ID NO: 22919 - DNA, 827 bp, Homo sapiens
  SIMILAR (194)..(78): 391254mologous to Homo sapiens Human secreted protein encoded by Gene No. 15,accession number W73411,Smith-Waterman Score=67.
gcggccgctgggaggtggaggagcctctccagccccggccgcagctcatcgtgagccaaccgcgccacctgccggccagatgcgggagtgtgcggccccggaggaagggcgagcggacaaagaccgcaacccgcaatccgcaaccccgcagagaggtggtgcgtgcgtttgggcgagcttttcagccaccgccaagtctcgtgcactagggctactcctaccgtggggctgcggacagcgctcaagaggtcctggagtctgtcgtgactctcgcctgctggatttcaaaagatggaatcggaaagcgtttcaaggagaaactcctaacaaaccttccgggggttgcctgagtggctgctctcggaaaagcggatcctaaataaagcgggagggttatagggcgacgtcgaggagaggacaggtctcgagtcactgctacagtttcaggtcactggcgtcgcagcagatcgtgttttctcccgtggctcgagacgtgcgctggtttctcatgcaaactcagagccgagctaatgacatgagcaacttttacttttacacaagatgagcacgcgtgccgaggcgctgggcggcggctgtgtgagttggtggcccagacgaacagcttgtgcgagactctgggcatttcggtttctagatacaagatttgcttaaatgtcacagtccaaagaagtggatttcagtcattgtagctactgattgcacacaagtaaaaagggaaaaaatatgtactcgggggatatatgtatgtgtgtgtgcgtgcataaattatttaaaataactgcactaaatccctttaagaaatgcaa

SEQ ID NO: 22920 - DNA, 927 bp, Homo sapiens
  SIMILAR (175)..(801): 991254mologous to Homo sapiens receptor protein-tyrosine kinase,accession number L36645,Smith-Waterman Score=1096.
atggcaagtggagctggtcccaacctcggggattttgggaggttctgtgggaagtgttttggcagcctgagcattctctgtcaacagttcaaattcatgggaaaaggcatgaagccaaaagtgcttgcaggtgaattatttgtccctttcaagtgcatcttacttaccctgatgacgtgtccaccatctgctcccctgaacttgatttcaaatgtcaacgagacatctgtgaacttggaatggagtagccctcagaatacaggtggccgccaggacatttcctataatgtggtatgcaagaaatgtggagctggtgaccccagcaagtgccgaccctgtggaagtggggtccactacaccccacagcagaatggcttgaagaccaccaaagtctccatcactgacctcctagctcataccaattacacctttgaaatctgggctgtgaatggagtgtccaaatataaccctaacccagaccaatcagtttctgtcactgtgaccaccaaccaagcagcaccatcatccattgctttggtccaggctaaagaagtcacaagatacagtgtggcactggcttggctggaaccagatcggcccaatggggtaatcctggaatatgaagtcaagtattatgagaaggatcagaatgagcgaagctatcgtatagttcggacagctgccaggaacacagatatcaaaggcctgaaccctctcacttcctatgttttccacgtgcgagccaggacagcagctggctatggagacttcagtgagcccttggaggttacaaccaacacaggtaacaaggaccacccagactcagtcacttctgaggctatttttataatacagctgaatcccattacagtgaaatctaaggagttgtctgtaatttttggttcagcagacattttgctgcaatga

SEQ ID NO: 22921 - DNA, 1117 bp, Homo sapiens
  SIMILAR (422)..(457): 1001254mologous to Homo sapiens receptor protein-tyrosine kinase,accession number L36645,Smith-Waterman Score=71.
atgaggtggttactaaaatgggagagaaagtacacactatacagttcaggggtcctcaaacataagaatcttctggaaagcttgttaggacagtttcttgggcctcctgctcagaggtttgattcagcaggtggtgtgcggcccaaaaatgatggcagatttacagtcattcagctggtgggcatgcttcgtggcattgggtctgggatgaagtatttatctgatatgagctatgtgcatcgtgatctggccgcacggaacatcctggtgaacagcaacttggtctgcaaagtgtctgattttggcatgtcccgagtgcttgaggatgatccggaagcagcttacaccaccaggggtggcaagattcctatccggtggactgcgccagaagcaattgcctatcgtaaattcacatcagcaaagtgatgtatggagctatggaatcgttatgtgggaaagtgatgtcgtacggggagaggccctattgggatatgtccaatcaagatgtgattaaagccattgaggaaggctatcggttaccccctccaatggactgccccattgcgctccaccagctgatgctagactgctggcagaaggagaggagcgacaggcctaaatttgggcagattgtcaacatgttggacaaactcatccgcaaccccaacagcttgaagaggacagggacggagagctccagacctaacactgccttgttggatccaagctcccctgaattctctgctgtggtatcagtgggcgattggctccaggccattaaaatggaccggtataaggataacttcacagctgctggttataccacactagaggctgtggtgcacgtgaaccaggagtaagtactcaacgatgtaacacgaaaggggacctggcaagaattggtatcacagccatcacgcaccagaataagattttgagcaggtgtccaggcaatgcgaacccaaatgcagcagaatgcacggcagaatggttccccgtctgagcacagtactgaataaactcaaaactcttgaaattagtttacctcatccatgcactttaattgaagaactgcacttttttaacttcgtcttcgccctctgaaattaaagaaatt

SEQ ID NO: 22922 - DNA, 3342 bp, Homo sapiens
  SIMILAR (268)..(2928): 891254mologous to Xenopus laevis receptor tyrosin kinase,accession number X91191,Smith-Waterman Score=4280.
tttcgtgacctgaaactgtagcagtgactcgagacctgtcctctcctcgacgtcgccctataaccctcccgctgtatttaggagccgcttttccgagagcagccactcaggcaacccccggaagggttgttaggagtttctccttgaaacgctttccgattccatcttttgaatccagcaggcgagagtcacgacagactccaggacctcttgagcgctgtccgcagccccacgaagcggcaggagcagcgttggcaccggcgaaccatggctgggattttctatttcgccctattttcgtgtctcttcgggatttgcgacgctgtcacaggttccagggtataccccgcgaatgaagttaccttattggattccagatctgttcagggagaacttgggtggatagcaagccctctggaaggagggtgggaggaagtgagtatcatggatgaaaaaaatacaccaatccgaacctaccaagtgtgcaatgtgatggaacccagccagaataactggctacgaactgattggatcacccgagaaggggctcagagggtgtatattgagattaaattcaccttgagggactgcaatagtcttccgggcgtcatggggacttgcaaggagacgtttaacctgtactactatgaatcagacaacgacaaagagcgtttcatcagagagaaccagtttgtcaaaattgacaccattgctgctgatgagagcttcacccaagtggacattggtgacagaatcatgaagctgaacaccgagatccgggatgtagggccattaagcaaaaaggggttttacctggcttttcaggatgtgggggcctgcatcgccctggtatcagtccgtgtgttctataaaaagtgtccactcacagtccgcaatctggcccagtttcctgacaccatcacaggggctgatacgtcttccctggtggaagttcgaggctcctgtgtcaacaactcagaagagaaagatgtgccaaaaatgtactgtggggcagatggtgaatggctggtacccattggcaactgcctatgcaacgctgggcatgaggagcggagcggagaatgccaagcttgcaaaattggatattacaaggctctctccacggatgccacctgtgccaagtgcccaccccacagctactctgtctgggaaggagccacctcgtgcacctgtgaccgaggctttttcagagctgacaacgatgctgcctctatgccctgcacccgtccaccatctgctcccctgaacttgatttcaaatgtcaacgagacatctgtgaacttggaatggagtagccctcagaatacaggtggccgccaggacatttcctataatgtggtatgcaagaaatgtggagctggtgaccccagcaagtgccgaccctgtggaagtggggtccactacaccccacagcagaatggcttgaagaccaccaaagtctccatcactgacctcctagctcataccaattacacctttgaaatctgggctgtgaatggagtgtccaaatataaccctaacccagaccaatcagtttctgtcactgtgaccaccaaccaagcagcaccatcatccattgctttggtccaggctaaagaagtcacaagatacagtgtggcactggcttggctggaaccagatcggcccaatggggtaatcctggaatatgaagtcaagtattatgagaaggatcagaatgagcgaagctatcgtatagttcggacagctgccaggaacacagatatcaaaggcctgaaccctctcacttcctatgttttccacgtgcgagccaggacagcagctggctatggagacttcagtgagcccttggaggttacaaccaacacagtgccttcccggatcattggagatggggctaactccacagtccttctggtctctgtctcgggcagtgtggtgctggtggtaattctcattgcagcttttgtcatcagccggagacggagtaaatacagtaaagccaaacaagaagcggatgaagagaaacatttgaatcaaggtgtaagaacatatgtggacccctttacgtacgaagatcccaaccaagcagtgcgagagtttgccaaagaaattgacgcatcctgcattaagattgaaaaagttataggagttggtgaatttggtgaggtatgcagtgggcgtctcaaagtgcctggcaagagagagatctgtgtggctatcaagactctgaaagctggttatacagacaaacagaggagagacttcctgagtgaggccagcatcatgggacagtttgaccatccgaacatcattcacttggaaggcgtggtcactaaatgtaaaccagtaatgatcataacagagtacatggagaatggctccttggatgcattcctcaggaaaaatgatggcagatttacagtcattcagctggtgggcatgcttcgtggcattgggtctgggatgaagtatttatctgatatgagctatgtgcatcgtgatctggccgcacggaacatcctggtgaacagcaacttggtctgcaaagtgtctgattttggcatgtcccgagtgcttgaggatgatccggaagcagcttacaccaccaggggtggcaagattcctatccggtggactgcgccagaagcaattgcctatcgtaaattcacatcagcaagtgatgtatggagctatggaatcgttatgtgggaagtgatgtcgtacggggagaggccctattgggatatgtccaatcaagatgtgattaaagccattgaggaaggctatcggttaccccctccaatggactgccccattgcgctccaccagctgatgctagactgctggcagaaggagaggagcgacaggcctaaatttgggcagattgtcaacatgttggacaaactcatccgcaaccccaacagctatgaagaggacagggacggagagctccagacctaacactgccttgttggatccaagctcccctgaattctctgctgtggtatcagtgggcgattggctccaggccattaaaatggaccggtataaggataacttcacagctgctggttataccacactagaggctgtggtgcacgtgaaccaggaggacctggcaagaattggtatcacagccatcacgcaccagaataagattttgagcagtgtccaggcaatgcgaacccaaatgcagcagatgcacggcagaatggttcccgtctgagccagtactgaataaactcaaaactcttgaaattagtttacctcatccatgcactttaattgaagaactgcactttttttacttcgtcttcgccctctgaaattaaagaaatg

SEQ ID NO: 22923 - DNA, 450 bp, Homo sapiens; identical to SEQ ID NO: 18991
  SIMILAR (84)..(449): 591254mologous to Homo sapiens ECSIT,accession number AF243044,Smith-Waterman Score=309.
  misc_feature (1)...(450): n = a,t,c or g

SEQ ID NO: 22924 - DNA, 1762 bp, Homo sapiens
  SIMILAR (180)..(1286): 651254mologous to Homo sapiens ECSIT,accession number BC000193,Smith-Waterman Score=1081.
  misc_feature (1)...(1762): n = a,t,c or g
agggggatttgagaccatagtccatgtgcaggaattcgcgcccagcaacaagacagagctggcctggagtccgcggctggccgcgtgagtaggtgattgtctgacaagcagaggcatgagctgggtccaggccaccctactggcccgaggcctctgtagggcctggggaggcacctgcggggccgccctgcacaggaacctccatctctcaggtccctcgccggnctccctcggggcctccactgcagcgcagctgcccatagctctgaacaagtccctggttcccagcccaccggaaccccggcaagagggcccaccaaggctcttggtgccctttgagggacctgttttggggcagggcgctgggttgggggaacggggacaagggcgagctttcctgcagacggttgcagaaatttgcggacgactagcgtgcgtaaacgggggccacattggatttattttacttggccctgcgcaaaatgcgggaagtatggtgtcgagcggggaacctggctgtgtacaaccagctgctcaacatcttccccaaggaggtcttccggcctcgcaacatcatccagcgcatcttcgtccactaccctcggcagcaggagtgtgggattgctgtcctggagcagatggagaaccacggtgtgatgcccaacaaggagacggagttcctgctgattcaaatctttggacgcaaaagctaccccatgctcaagttggtgcgcctgaagctgtggttccctcgattcatgaacgtcaaccccttcccagtgccccgggacctgccccaggaccctgtggagctggccatgtttggcctgcggcacatggagcctgaccttagtgccagggtcaccatctaccaggttcctttgcccaaagactcaacaggtgcaagcaagatcccccccaagccccacatcgtagggcacagggcatgtatgtctccacaccaggaatccaagaagtcccgatcaagcaaggccgcccttggcccgccacaatccaagcccggcctgtcttttgttgagggccccttctccctgtggctccgcaacaaagtgtgtgtattaccaacatcctcagagctgaacttgctgcccccggaagaagaagggaagtggaagagaacgccggaggagtgggaacctctactacccgatggcagctggacctggagtatgtgaggagtggcttgggacaactacgagtttgacatcaatgaagtggaggaaggccctgtcttcgccatgtgcatggcgggtgctcatgaccagggcgacgatggcttaagtggattccaggggcctgcaggagaccaaccccaaaccttggcccaaaatcccccgtggtctttccgccttcgccgggtccaacccggggagcttccagacatccttctgcagggctggaggagcccgcccctgcccgaggaccaccaaggaagaagacgacaacctgcaagcgacagcagcagggcccagagctagtctgagccggcgcgagggcacgggctgtggcccgaggaggcggtggactgaaggcatgagatgccctttgagtgtacagcaaatcaatgttttcctgcttggggctctcttccctcatctctagcagtatggcatcccctccccaggatctcgggcttccagcggttggccgggggggccccccccggaatttccaggcccctttggttcccggaattcaaataaaaacggggcgggagcgctgttggttgtgcgcaaaaaaa

SEQ ID NO: 22925 - DNA, 2520 bp, Homo sapiens
  SIMILAR (1947)..(1985): 1001254mologous to Methylomonas aminofaciens transposase,accession number AB026428,Smith-Waterman Score=70.
atgaaggatccatatggctttggagacagtcgagattcaaggcgtgatcgatccccaattcgaggaagtccaaggagagagcccagggatggcagaaatggccgggatgcccgggacagcagagacattcgagacccccgagacttgcgggaccacagacatagtagagatttgcgggatcacagagacagcaggagtgtgcgcgacgttcgggacgtgagggatcttagagactttcgtgatctaagagactctagggattttcgagatcagcgagaccccatgtacgacagatacagagacatgagagactcccgagatcctatgtacaggagagaaggctcttatgaccgatacctacgaatggatgactattgcaggagaaaggatgactcttattttgaccgttacagagatagctttgatggacggggccctccaggcccagaaagtcagtctcgtgcaaaagagcgtttgaaacgtgaggaacggcgtagagaagagctttatcgtcaatattttgaggaaatccagagacgctttgatgccgaaaggcccgttgattgttctgtgattgtggtcaacaaacagacaaaagactatgctgagtctgtggggcggaaggtgcgagacctgggcatggtagtggacttgatcttccttaacacagaagtgtcactgtcacaagccttggaggatgttagcaggggaggttctccttttgctattgtcatcacccagcaacaccagattcaccgctcctgcacagtcaacatcatgtttggaaccccgcaaggacagaaactggtgagtgactgcacagagttcactgaaacggaatgccttccttgcggtgaaagcgaattcctagacacctggaacagagagacacactgccaccagcacaaatactgcgaccccaacctagggcttcgggtccagcagaagggcacctcagaaacagacaccatctgcacctgtgaagaaggctggcactgtacgagtgaggcctgtgagagctgtgtcctgcaccgctcatgctcgcccggctttggggtcaagcagattggtaatcgtcacctccacaaagagcgactcgctgtataccgttggcatgctagctttatctgttcgggcaatacgatgcccattgtacttgttgactggtctgatattcgtgagcaaaaacgacttatggtattgcgagcttcagtcgcactacacggtcgttctgttactctttatgagaaagcgttcccgctttcagagcaatgttcaaagaaagctcatgaccaatttctagccgaccttgcgagcattctaccgagtaacaccacaccgctcattgtcagtgatgctggctttaaagtgccatggtataaatccgttgagaagctgggttggtactggttaagtcgagtaagaggaaaagtacaatatgcagacctaggagcggaaaactggaaacctatcagcaacttacatgatatgtcatctagtcactcaaagactttaggctataagaggctgactaaaagcaatccaatctcatgccaaattctattgtataaatctcgctctaaaggccgaaaaaatcagcgctcgacacggactcattgtcaccacccgtcacctaaaatctactcagcgtcggcaaaggagccatgggttctagcaactaacttacctgttgaaattcgaacacccaaacaacttgttaatatctattcgaagcgaatgcagattgaagaaaccttccgagacttgaaaagtcctgcctacggactaggcctacgccatagccgaacgagcagctcagagcgttttgatatcatgctgctaatcgccctgatgcttcaactaacatgttggcttgcgggcgttcatgctcagaaacaaggttgggacaagcacttccaggctaacacagtcagaaatcgaaacctcaaaatttattcacacatggttacgctttggggaaattatgaggggatctctcagtaccaagtgcctcaattcgatcaatcaacgattaaaaatattgagtctgcaaaaggacttgatgtgtgggacagctggccgctgcaaaacgctgacggaacagtagctgaatacaacggctatcacgttgtgtttgctcttgcgggaagcccgaaagacgctgatgacacatcaatctacatgttttatcaaaaggtcggcgacaactcaatcgacagctggaaaaacgcgggccgtgtctttaaagacagcgataagttcgacgccaacgatccgatcctgaaagatcagacgcaagaatggtccggttctgcaacctttacatctgacggaaaaatccgtttattctacactgactattccggtaaacattacggcaaacaaagcctgacaacagcgcaggtaaatgtgtcaaaatctgatgacacactcaaaatcaacggagtggaagatcacaaaacgatttttgacggacgactatataggatccccgggacttacgagccctatgaaatttaa

SEQ ID NO: 22926 - DNA, 1762 bp, Homo sapiens
  SIMILAR (663)..(923): 541254mologous to Homo sapiens CDw40,accession number X60592,Smith-Waterman Score=176.
atcatcgtggtggaattcgtcagcagaggcctcgctcgggcgcccagtggtcctgccgtcttttctcaccttgctatggctcgactgcctctgcggggcgtccggtggggctgcttgctgaccgctgtccatccagaaccacccactgcatgcagagaaaaacagtacctaataaacagtcagtgctgttctttgtgccagccaggacagaaactggtgagtgactgcacagagttcactgaaacggaatgccttccttgcggagaaagcgaattcctagacacctggaacagagagacacactgccaccagcacaaatactgcgaccccaacctagggcttcgggtccagcagaagggcacctcagaaacagacaccatctgcacctgtgaagaaggctggcactgtacgagtgaggcctgtgagagctgtgtcctgcaccgctcatgctcgcccggctttggggtcaagcagattgctacaggggtttctgataccatctgcgagccctgcccagtcggcttcttctccaatgtgtcatctgctttcgaaaaatgtcacccttggacaagctgtgagaccaaagaccttggttgtgcaacaggcaggcacaaacaagactgatgttgtctgtggtccccaggatcggctgagagccctgggtggtgatccccatcatcttcgggatcctgtttgccatcctcttgggtgctggtctttatcaaaaaggtggccaagaagccaaccaataaggccccccaccccaaggcagggaaccccaggagatcaattttcccgacgatcttcctggggttccaacactgctgctccagttgcagggaggatttttacatggggtggccaaccggttcacccaggaggatgggcaaagagagtcgcatttcagttgcagggagagacagtgaaggctgcacccaaacccaggagtgtggccacgtgggccaaacaggcagttggccagagagccctggtgctgctgctgctgtggcgtgagggtgaggggctggcactgaactgggcatagctccccgcttctgcctgcaccgctgcaagtttgagacaggagacctggcactggatgcagaaacagttcaccttgaagaacctctcacttcacccctggagccacatccagtctcccaacttgtattaaagacagaggcagaagtttggttggtggtggtgttggggtaatgggtttagtaatatccaccagaccttccgatccagcagtttggtgcccagagaggcatcatggtggcttccctgcgcccaggaagccatatacacagatgcccattgcagcattgtttgtgatagtgaacaactggaagctgcttaactgtccatcagcaggagactggctaaataaaattagaatatatttatacaacagaatctcaaaaacactgttgagtaaggaaaaaaaggcatgctgctgaatgatgggtatggaactttttaaaaaaagtacatgcttttatgtatgtatattgcctatggatatatgtataaatacaatatgcatcatatattgatataacaagggttctggaagggtacacagaaaacccacagctcgaagagtggtgacgtctggggtggggaagaagggtctgggggagggttggttaaagggagatttggctttcccataatgcttcatcatttttcccaaaaggagagtgaattcacataatgcttatgtaattaaaaaatcatcaaacatgtaaaaagaaaa

SEQ ID NO: 22927 - DNA, 731 bp, Homo sapiens
  SIMILAR (666)..(439): 901254mologous to Homo sapiens 02-AUG-1994 Human Nip1 encoding cDNA,accession number X04119_cd1,Smith-Waterman Score=321.
  misc_feature (1)...(731): n = a,t,c or g
ctattaaataaaatcaagtttattcaaggaatgaccaggagttttcatcacctttcttcctacctcttctctcttccctccaccagatctggcatttaagggcacgatgggagcgggagacaggaggggcatccggtcctggaggctggactttaagtgctccacgcagcagcggcctcccatagtgcacaatggtggaaggaggcagttcgtatgtccccagggcggcatcccaatgccagaccttcctcccatggctctgttcaccctttacaagccagctacttgcagaaaagtggggcactgtgttccatccaacctgcaggcaactggtgcaaacggaggggtgtgtggctcagcttagcagcctagagctcaggaaccaggacagatcctgaaacaggagctgaaagggccagaactggcacctttgggatctcacaaaaatggaaagagccgctttttcacaatatagaggaccgtagcaagaaacagggctagcgcaaggaagatgagaagcttgtccgtcagctcccggcgattgtattttgtgataagcttccggcccagctggatggtgcccgacatggacttaannatctcatttgcatccaggatcngttcgtgagaagtgactagagactgcatggcctnctcgctctgctgatccccatgaggctctcagtgatggtaactgatgtctgggccangctcctcttttgtgttttcct

SEQ ID NO: 22928 - DNA, 585 bp, Homo sapiens
  SIMILAR (1)..(582): 1001254mologous to Homo sapiens Nip1 isoform s1,accession number AF083956,Smith-Waterman Score=946.
atggcggctccccaagacgtccacgtccggatctgtaaccaagagattgtcaaatttgacctggaggtgaaggcgcttattcaggatatccgtgattgttcaggacccttaagtgctcttactgaactgaatactaaagtaaaagagaaatttcaacagttgcgtcacagaatacaggacctggagcagttggctaaagagcaagacaaagaatcagagaaacaacttctactccaggaagtggagaatcacaaaaagcagatgctcaggaaaaccaccaaagagagcctggcccagacatccagtaccatcactgagagcctcatggggatcagcaggatgatggcccagcaggtccagcagagcgaggaggccatgcagtctctagtcacttcttcacgaacgatcctggatgcaaatgaagaatttaagtccatgtcgggcaccatccagctgggccggaagcttatcacaaaatacaatcgccgggagctgacggacaagcttctcatcttccttgcgctacgcctgtttcttgctacggtcctctatattgtgaaaaagcggctctttccatttttgtga

SEQ ID NO: 22929 - DNA, 2607 bp, Homo sapiens
  SIMILAR (1)..(918): 1001254mologous to Escherichia coli DNA topoisomerase III (EC 5.99.1.-),accession number D90819,Smith-Waterman Score=1584.
atgaatgccatcagtgttcatgcaccggatctgttgccgcagccagtggtagatccagatatacgcaaccgctgttgggatgacaaaaaggtcgatgcgcaccacgccatcattccgaccgcacggagttctgcgatcaacctgacggagaacgaagcgaaggtctataacctgattgcccgtcagtatctgatgcaattctgcccggatgcggtgttccgcaagtgtgttatcgaactggacattgccaaaggcaaatttgtcgctaaagcgcgttttcttgctgaagcaggctggcgcacgctgttaggcagcaaagagcgcgatgaagaaaacgacggcacgccactgcctgtggtggcgaaaggcgatgagttgctgtgtgaaaaaggtgaagtggtagagcggcaaacccagccgccgcgccattttaccgatgcaacactgctttcggcgatgaccgggatcgcgcgctttgtgcaggataaagatctgaaaaagatcctccgtgcgaccgatggtctggggacagaggcaacgcgtgccgggattattgaactgttgttcaagcgtggtttcctgaccaaaaaagggcgctatatccactccaccgacgccggaaaagcgctattccattcgctgccggagatggcgacgcgaccggacatgaccgcgcactgggaatcggtgctgacgcaaatcagcgaaaagcagtgtcgctatcaggactttatgcagccgctggtggggacgctatatcagcttattgatcaagccaaacgtacgccggtgcggcagtttcgcggcattgtggctccgggcagtggtggcagtgctgataagaaaaaggctgcaccgcgtaaacgtagtgcgaaaaaaagtccgccagcagatgaagtcggaagcggggcgatagcgcgttaccacagtcctgcctgttttcgtccaaacagaggagtttccggtagcagcttaactgtgcggctgcttgagggggtctgctgttgtccagtccgccgctgtgaggtagaaagtctaggtgttgtcgggggtggtctagttgcatctctcaagattccctgcatccagtgtggcagcttactgtgttacaacattgaaagggtggaagtggcagctgagtgcctagtactcttctcagctttcctgccaggaagtgttgtatccatctgcgagtgcatagtgtttgcgcctcgcaacccgttgggtgtttggcggtctggataccggattgcggctgggacggttctggtgtgcgctcgtgggtgcaacctgggggtttcgccaggatacaaatatgaccagacgggaaacgcctccacagtcaagtgcgacgtttttcgcctgcttcgcggccaaaaatcggaaccaggccaaaagcaggccaaaagcactctagaacaaaccagcgaataccccagtaacagaggtattccgataatccgccaaaggcttggaggagagatccagatgaccatgcatcaagggtgtctggctggtgttaatcaagttccctggtggctgttgaagccaagtgccttctcagcaagcgttcatactagaaagaaaccctacaagtgtgaagaatgtggcaaagcatttatatggtcctcaacactaactagacataagaggatgcacactggagagaaaccctacaaatgtgaagaatgtggcaaagcttttagccagtcctcaacccttactacacataagataattcatactggagagaaacgctacaaatgcttagaatgtggcaaagcttttaagcaactctcaactcttactacacataaaataattcatgttggagagaaactctacaaatgtgaagaatgcggcaaaggttttaatcgatcttcaaatcttactacacataagataattcatactggagagaaaccttacaagtgtgaagaatgtggcaaagcatttatctggtcctcaacccttactaaacataagagaattcatgctagagagaaaccctacaaatgtgaagaatgtggcaaggcatttatatggtcctcaaccctaactagacataagaggatgcacactggagagaaaccctacaaatgtgaagaatgtggcaaatcttttagccaatcctcaacccttactacacataagataattcatactggagagaaaccctacaaatgtgaagaatgtggcaaagcctttaactggtcctcaactcttactaaacataagataattcatactgaagagaaaccctacaaatgtgaaaaatgtggcaaagcctttaagcagtcttcaatccttactaaccataagagaattcatactggagagaaaccctataaatgtgaagaatgtggcaaatcttttaaccggtcttcaacttttactaaacataaggtaattcatactggagtaaaaccctacaaatgtgaagaatgtggcaaagcatttttctggtcctcaaccctaactaaacataagagaattcatactggagagcaaccctacaaatgggaaaaatttggcaaagcctttaatcggtcctcgcacctcaccacagataagataactcattggagagaaatcttacaagtatga

SEQ ID NO: 22930 - DNA, 924 bp, Homo sapiens
  SIMILAR (420)..(770): 271254mologous to Homo sapiens Human secreted protein sequence encoded by gene 14 SEQ ID NO:80,accession number Y91359,Smith-Waterman Score=92.
atgaaagggttaaaacgagaagacgggattggccagcgcataggagaaccggcgtcggaatgcagtaatacgacgcaacaaactacacagttagcgcaaaataataaaacggtggaaagaattgcgatacaacggcaagtggggaaaaagacgggacggtgcttagcgtcgtgcgctcgcgtatacatatgggggtgggggtgggggtggggtgcccagttcgctatcggaatcaggatgaccatgagctacaaattacacacgggaacaagattctatgtggaattgtgtgcgataagggcgcacaaccgcaaccacgcactcagtcacgcagcgcacggacgaacggcagcggcgtgcggatactgcactcactttggcggattatcggaatacctctgttactggggtattcgctggtttgttctagagtgcttttggcctgcttttggcctggttccgatttttggccgcgaagcaggcgaaaaacctatggcaccgttccccagtcgtgctactctttttacgtcgcacttgactgtggaggcgtttcccgtctggtcatatttgtatcctggcgaaacccccaggttgcacccacgagcgcacaccagaaccgtcccagccgcaatccggtatccagaccgccaaacacccaacgggttgcgaggcgcaaacactatgcactcgcagatggatacactgaacggagatggacgatcgcaccttgcagggcagagagctcgttccctccgaactgcccgtccgcagcgccaataccggattcatacgacaagtgactttccggattgtctgtcaatacgctcaggctgttgctcaggatttggtaatgtgtcgtggataatggcggagattttgataagttgggaggcatctcaccctcttccccgctcatgcttctaa

SEQ ID NO: 22931 - DNA, 1689 bp, Homo sapiens
  SIMILAR (1279)..(1545): 881254mologous to Homo sapiens hMSH3,accession number U61981,Smith-Waterman Score=388.
atgtgcgcggcaaaggacaaacagagacagacagacaagaaacacgaaacacacaaagacgagacaccacaacgaaacgggaaagacccgagcacgcacatgtatggacacacgcagaaaaaaacaacaacaccgagagcacgagcagaagacacgcaaacaaacagaaaacgcaaaccagagagcaccaccagcatccagcggggcaacgtacgcagaacagaccgaccagcgccagaacaaagcggcaacgggcgcaaagcgagcagaggcacgacacgaaagcaaacgcaacagacagcgagaaggccgcacgcagcgcgcgcgaaaaccgtccgagtcagcggcacaccgcgaacacacaggcacgagagagagggaccaggccggacgcgacacgacaccaacgcagcgaacaggcaggcgcccgcggaagccaggcacgacggccgagcacgccacgcgcggcgacagaccacagacgagaccaacgggcgggaggggcgagagaggaagcggacgaccgaggagcgagaagaagcgacacgaaggcggaagagcgagaagaagcgaagagggagcagaccgagccacacaggggcaggaccggggcacgaaagctggagcgagcacgagcgagcaggcaaggggacgcgacgcgaggccacgcgagagcgggcacaacgacgaaagacggacgacgacgacagcggatggaaggagagcgaagacacgggaagcgaaggcggggagagcagagcgcgcgaacacgtgagacgtcgagaggacaggaacaggagagccgagggaggagacggggaagagcggacggccagcgaaggaacgcacgcggagcgagggcgaaaaaacgcggagcggcgagagaaggccgtacgggaggagggggacgggtgcgcaagagacgaaccggagcggagcgcaaagaaggaagaggagcggcagacaagagagcagcagggagcaggcgaagcagcgggggaggaggcggagagagggggagggaagatgcgagcgggcacgcgagagggccgcgtgggaaggagagaggcaggaagagttgcacccacgagcgcacaccagaaccgtcccagacgcaatccggtatccagagcgccaaacacccaacgggttgcgaggcgcaaacactatgcactcgcagatggatacactgtacggagatggacgaacggacctgcagggcagagagctcttttccccgaaatgtccgttcggagcgccaataacggattattacgcagtgtgcaggatgacagaattcgagtcgaaaggatggataacatttattttgaatacagccatgctttccaggcagttacagagttttatgcaaaagatacagttgacatcaaaggttctcaaattatttctggcattgttaacttagagaagcctgtgatttgctctttggctgccatcataaaatacctcaaagaattcaacttggaaaagatgctctccaaacctgagatatatgcaaacaaccaagaagcacgtgaaaatatgctcaacatcattaagcatcagcctctgtctgaagtatggaagacatttagcctgcaggctcatgcctatgcagtaccagagggaatgtggagggcgcttgccatgcaccagcagccctattctcacctgtgtgattatatctaa

SEQ ID NO: 22932 - DNA, 849 bp, Homo sapiens
  SIMILAR (420)..(373): 1001254mologous to Escherichia coli K12 putative inner membrane component for iron transport,accession number AE000162,Smith-Waterman Score=81.
atgccaggcggtgttgatgatggagatgattatgagggtggtgtgatggtgatgatcgtgatggtgatggcgacggagatcatgatagggggacacagccacagccctccaacggctggtggagctgacgaccagcaggtgaccccggtgaggagccttcgggaccagtaccacctcatccggaagctggctccggctcctacggccgcgtgctccttgcccagcctcaccaggggtcaagtgcgacgtaaaaagagtagcacgactgggggcggtgccataggtttttcgcctgcttcgcggccaaaaatcggaaccaggcaaaagcaggccaaaagcactctagaacaaaccagcgaataccccagtacagagccacatcagcttatacgccgccgggataataaacagcgacagcaaggtgcggtgatcatgccgccaatcatcggcgcggcaatccggctcatacctctgaaccagcccccgttccccacagaatcggcagcagaccggcgaaatcaccgccaccgtcatcgctttcgggcgcacgcgcaggaccgcgccggatataacgcctcatccagcttctgctcgctgaatgtttgtggattattaacgacggcacggcctctatggcgtgaccatcaccagccaaattcggcggcgaccccggcgagggcgataaagccagtgcccgtcccacggaaagatgaaagcccatccaccacagcaaccagatgccgcccacagcgcaaacggtacgctgctgataatcagcaacgcttcgcccacccgacgaacgccagatacaacagcacgaagataatcatcaacgtcatcggcacctga

SEQ ID NO: 22933 - DNA, 3795 bp, Homo sapiens
  SIMILAR (2511)..(2564): 381254mologous to Escherichia coli similar to melibiose carrier protein,accession number L10328,Smith-Waterman Score=41.
  misc_feature (1)...(3795): n = a,t,c or g
atggtttacaaaatgcgttatcggtctcagcacccctatagcatcaaggaaaagcagatgaagagtgaagtgttgtccgttaaagagaaaattggttatggcatgggagacgccgccagccacattattttcgataacgtaatgttatatatgatgttcttttataccgatatttttggcattcctgccggttttgtcggaaccatgtttttggtcgctcgtgcactggatgcgatttccgatccttgcatggggttgttggccgatcgaacgcgctctcgctggggtaaatttcgtccgtgggtactgtttggcgcactgccattcgggatcgtctgtgtactggcctatagcacgccagatctcagtatgaacggcaaaatgatctatgcagcaattacttacaccctacttaccttactttataccgtcgtcaatatcccttactgcgcattgggtggtgtaatcaccaatgacccgactcagcgtatctcgctgcaatcctggcgttttgtgctggcgaccgcgggaggcatgctttctactgttctgatgatgccactggttaatttaattggcggtgataataaaccactcggtttccagggcgatttaagcccgatgttctctacacctgaagagatcgcccgacctggaccgtacgaaaacgacgttcacgtagtgggcgcatcctcactggctgccggtcataaaacgctgatcccggaactggtacgaagcgctgaacaacacatggggacgcgaagatatctgcgtggtcgacgggtggcagtcattccgccgacaggattacgccttcctgcaagagcgcggcagtggcggcgatttatggtccagcacactcgcccaggccatgacgctggtggaaaggcgtcaccgcgtcatcaggcactaagtacgcagctgcttgatgccattatgccgtactgcggtaacaccctgcgactgggcgttaccggcacccccggcgcggggaaaagtacctttcttgaggcctttggcatgttgttgattcgagagggattaaaggtcgcggttattgcggtcgatcccagcagcccggtcactggcggtagcattctcggggataaaacccgcatgaatgacctggcgcgtgccgaagcggcgtttattcgcccggtaccatcctccggtcatctgggcggtgccagtcagcgagcgcgggaattaatgctgttatgcgaagcagcgggttatgacgtagtgattgtcgaaacggttggcgtcgggcagtcggaaacagaagtcgcccgcatggtggactgttttatctcgttgcaaattgccggtggcggcgatgatctgcagggcattaaaaaagggctgatggaagtggctgatctgatcgttatcaacaaagacgatggcgataaccataccaatgtcgccattgcccggcatatgtcgagagtgccctgcatattctgcgacgaccgcctatgcatcgtgttcctagaaaccctaaggtcaacctgcttcctggaaccgctatggccaatctgctgtcctaggaccgcaatggccacgctgggtcctaggaaccgctatggctttgatccattggctgtttcctcggggacccggtcttgttccttgggggttcctcgggcacaccgcttcgcccttgcgggttctcgggacccaggctatacgcacaagcgcgttcttgccatattccaagcctttaacgcgttcccggaaccaccggccaacacgccggaagatccggcaggtctctctctactgccatcaggccacacgtctgctcgagagcctggcctctgtctcccaatcaactcgctttgccctattgttcagtctctctggccctcatcactgcgctctacccaaccgctcacaccccttcccagctgcccctcccaggcccatcaccctggcagcgtggctccgtgcggtgcagcctggtacccggcggggcacacgcacaggaagctgcctggcgtgttctcgcagcgcccgaggtcacacggcggcggcacgcggtggcactcgtccacatctgtaggcacagaccaggcggctgggactggggcagacagccccgggagaagcgacgcaaggaggcaggggtcagcagggaagcgggcagcgggaccaagcttgggccagagccaggatggggacccggccaggaccagccggcagcaggggcacagtgcagcagcaggcaatcgtggcagggcagggtttggtcagcgccacagggcagaaaggcagcagctttggggaccaagctcacgggaaggtggggtaggggctagagaagaacaggagcagtttggggataggggctctggtgtggcagggttggaatcggggtcgcggtcaggagattggttgccgcagtttgcaggacagtggccgcggctgcgggaggcagtcagtcagcgcagggctcacgcagcgcacggacgaacggcagcggcgtgcggatactgcactcactttggcggattatcggaatacctctgttactggggtattcgctggtttgttctagagtgcttttggcctgcttttggcctggttccgatttttggccgcgaagcaggcgaaaaacctatggcaccgtcccccagtcgtgctactctttttacgtcgcacttgactgtggaggcgtttcccgtctggtcatatttgtatcctggcgaaacccccaggttgcacccacgagcgcacaccagaaccgtcccagccgcaatccggtatccagaccgccaaacacccaacgggttgcgaggcgcaaacactatgcactcgcagatggatacactgaacggagatggacgaacgcaccttgcagggcagagagctcgttccccccgaactgtccgtccggagcgccaataccggattcatacgacaagtgaccttcccggaatgtctcgtcaataccgctcaggctgctgcctaggattctgtcaggtgttgttgcccgatgacaacggtaaattgcagccgttaacacatccgcaaggaatgacgccgtgggacgatgccatcgcgcagtggagttttgataaaggcctgcctgcgggcgcgggcaccgacacgttacccggtgtaccgtaccangattttgccgctaaaaagcggcgagaaaacctacgggctggtgaaatcttaacgctcgatctggcaagcgaaggatcaccccacgcccgccaggccagcgagatccgtcagcatgtgctgaacactacccgactggtgaataatctactggatatggcgcgaattcagtccggcggctttaatttgaagaaagagtggttaacgctggaagaagtagtcggcagcgcgctgcaaatgctggaaccgggtttatcgtcgcccatcaatctttctctgccagaaccgctgaccttaatccacgttgacgggccactctttgaacgggtgctgattaatctgctggagaacgcggtgaaatatgcgggtgcgcaggccgaaattggtatcgatgcccacgttgagggcgaaaatctacaactggatgtctgggataacggccccggtcttccgccaggccaggagcagacgatatttgataagtttgctcgcgggaataaagagtcggcagtaccgggggtagggcttggactggcaatttgtcgggcgatagtggatgtacacgggggcactattaccgcgtcaaccgaccggaaggtggtgcctgttttcgtgttacacttcccccagcaaatggccctgaacttgaaaatttcctga

SEQ ID NO: 22934 - DNA, 1214 bp, Homo sapiens
  SIMILAR (733)..(828): 1001254mologous to Homo sapiens Nip1 isoform s2,accession number AF083957,Smith-Waterman Score=153.
cggcgtccccaacatggcggctccccaagacgtccacgtccggatctgtaaccaagagattgtcaaatttgacctggaggtgaaggcgcttattcaggatatccgtgattgttcaggacccttaagtgctcttactgaactgaatactaaagtaaaagagaaatttcaacagttgcgtcacagaatacagccagttctctatcaaagggcatttatttggactgcttccacatttttttttaagctaacttattccctgacagacttttcttcaactcagcatgacttcaactctccaactacacctgttaccttcagtgacctgggagcagttggctaaagagcaagacaaagaatcagagaaccaacttctactccaggaagtggagaatcacaaaaagcagatgctcagcaatcaggcctcatggaggaaagctaatctcacctgcaaaattgcaatcgacaatctagagaaagcagaacttcttcagggaggagatctcttaaggcaaaggaaaaccacaaaagagagcctggcccagacatccagtaccatcactgagagcctcatggggatcagcaggatgatggcccagcaggtccagcagagcgaggaggccatgcagtctctagtcacttcttcacgaacgatcctggatgcaaatgaagaatttaagtccatgtcgggcaccatccagctgggccggaagcttatcacaaaatacaatcgcccgggagctgacggacaagcttctcatcttccttgcgctacgcctgtttcttgctacggtcctctatattgtgaaaaagcggctctttccatttttgtgagatcccaaaggtgccagttctggccctttcagctcctgtttcaggatctgtcctggttcctgagctctaggctgctaagctgagccacacacccctccgtttgcaccagttgcctgcaggttggatggaacacagtgccccacttttctgcaagtagctggcttgtaaagggtgaacagagccatgggaggaaggtctggcattgggatgccgccctggggacatacgaaccgcctccaggaccggatgcccctcctgtctcccgctcccatcgtgcccttaaaggccagatgtggtggagggaagagagaagaggtaggaagaaaggtgatgaaaactcctggtcattccttgaataaacttgattttatttaatagaaaaa

SEQ ID NO: 22935 - DNA, 1458 bp, Homo sapiens
  SIMILAR (643)..(1005): 971254mologous to Escherichia coli similar to,accession number D90889,Smith-Waterman Score=603.
gtgtgcccagtaatatgggatgctgccttgtgtgggactgctggtggtgcttgtgaccatgctgaaggtgctacagctcggatggctaatgatggtgggggctgctgcgacaacctgtggtggcagctgctggcctgctgatggattgcgtatgatcccgtattggcgctgcgaacgggcagttcggggggaacgagctctctgccctgcaaggtgcgttcgtccatctccgttcagtgtatccatctgcgagtgcatagtgtttgcgcctcgcaacccgttgggtgtttggcggtctggataccggattgcggctgggacggttctggtgtgcgctcgtgggtgcaacctgggggtttcgccaggatacaaatatgaccagacgggaaacgcctccacagtcaagtgcgacgtaaaaagagtagcacgactggggggcggtgccataggtttttcgcctgcttcgcggccaaaaatcggaaccaggccaaaagcaggccaaaagcactctagaacaaaccagcgaataccccagtaacagaggtattccgataatccgccaaagtgagtgcagtatccgcacgccgctgccgttcgtccgtgcgctgcgtgactgagtgcgtggttgcggttgtgcgcccttatcgctccactcaggctgctcgtgactggctgaagctgaaaatggcggggctggagcgtgaagaatttatgatgctgtatctgaaccagcagaaccagttgattgcccacgaaaccctgtttgccggttctattagcagtaccgaggtacatccccgtgaggtggtcaaacgcgccctgtatttcaatgcagcagcagtgatactggcgcataaccacccctccggcgacactactcccagccaggcagataagactataacgcagcgtctggtgcaggcgcttcagctcgttgatatccgtgtccctgaccatctgattgttggtggcaggcaaatctattcgttcgcagaacacggtatgaaaattatcagtaaacgcagggcaatgacgatataccgccagcatcctgagtcccgaatctttcgctactgcaccggcaaataccagtggcacggtagcgtctgtcattacaccggcagggacgttccggatatcgccggagtcctcgcggtatacgccgaacgccgccaggaccgcaatgggccctatacctgcctgatgagcatcaccctgaactgacaatagtggagaactgtaatgagcaaccctaccaggggcctgcagcgggagattacactgcgcctgggagcccgtctggtgcaggaaggcaaccgactgcattatctggctgaccgggccagcatcaccggcaagttcagtgacatcgaatgccggaagctggatgaaacattcccgcactttatcctccagatggcatcgatgctgaccaccggtgaactcagcccccaccat

SEQ ID NO: 22936 - DNA, 2234 bp, Homo sapiens
  SIMILAR (1244)..(1408): 581254mologous to Homo sapiens putative p150,accession number U93574,Smith-Waterman Score=156.
atgccccttactgtcagaagccccatctaccacgaagcataccagatcctgaggcagcagcctgaggcgtattacgagacaatccgggaggtcacttgtcgtatgaatccggtattggcgctccggacggccagttcggggggaacgagctctctgccctgcaaggtttttcgcctgcttcgcggccaaaaatcggaaccaggccaaaagcaggccaaaagcactctagaacaaaccagcgaataccccagtaacagaggtattccgataatccgccaaatcctagtaatcgccttgcaagctagccagctggacgtcacatgtggtaccccttggtgtcagagatgtctgcagaaaatctgcctgctgaacaatagcttgcaaacgcagcgtggcactcggtgccggtgccggcataaaggagtcagcgagcagggcgttggacaaacagagagccaaatcatgagtgaactcccattcacaattgcttcaaagagaataaaatatctaggaatccaacttacaaaggatgtgaaggacctcttcaaggagaactacaaaccactgctcaacgaaataaaagaggatacaaacaaatggaagaacattccatgctcatgggtaggaagaatcaatattgtgaaaatggccatactgcccaaggtaaattacagattcaatgccatccccatcaagctaccaatgcctttcttcacacaattggaaaaaactactttaaagttcatatggaaccaaaaaacagctcgcatcgccaagtcaatcctaagccaaaagaacaaagctggaggcatcacactacctgacttcaaactatactacaaggctacagtaaccaaaacagcatggtactggtaccaaaacagagatatagatcaatggaacagaacagagccctcagaaataatgccgcatatctacaactatctgatctttgacaaatctgagaaaaacaagcaatggggaaaggattccctatttaataaatggtgctgggaaaactggcttgccatatgtagaaagctgaaactggatcccttccttacaccttatacaaaaatcaattcaagatggattaaagacttaaacgttagacctaaaaccataaaaaccctagaagaaaacttaggcattaccattcaggacataggcatgggcaaggacttcatgtctaaaacaccaaaagcaatggcaacagaagccaaaattgacaaatgggatctaattaaagagcttctgcacagcaaaagaaactaccatcagagtgaacagggcacctacagcatgggagaaaaatttttacaatctacccatctgacaaaggctaatatccagaatctacaagaacttaaacatatttacaagaaaaaatcaacaccccatcaaacgataagggcgcacaaccgcaaccacgcactcagtcacgcagcgcacggacgaacggcagcggcgtgcggatactgcactcactttggcggattatcggaatacctctgttactggggtattcgctggtttgttctagagtgcttttggcctgcttttggcctggttccgatttttgggcgccgaagcaggcgaaaaacctatggcaccgtcccccagtcgtgctaactctttttacgtcgcacttgactgtggaggcgtttcccgtctggtcatatttgtatcctggcgaaacccccaggttgcacccacgagcgcacaccagaaccgtcccagccgcaatccggtatccagaccgccaaacacccaacgggttgcgaggcgcaaacactatgcacctcgcagatggatacactggacggggatggaccgcggaccttgcagggaaaaaggcgttcccccggactgcccgtccgaaggccaatacgggatatacagcagtaacttccggatgttcttataagctaggcattgttaggatctggaatccctctggatcacaacagaggtgtagaggctggaacacaacccctgaaccatgggcacttcctacaccggcatcaccaagtgccgattatcccccacattgggacaagcgtcccccttcgcttgcggcatacatccttgatttcccggaaacccgtgacccggatatacccagggaattaaccattggatcccggacatattcctccccctttacgagcgacacgacggatgggcaggcatatgccttcaatacgacatccaacaggctggttaaggcgtaa

SEQ ID NO: 22937 - DNA, 1046 bp, Homo sapiens
  SIMILAR (1028)..(900): 651254mologous to Homo sapiens Human secreted protein, SEQ ID NO: 8172,accession number G04091,Smith-Waterman Score=114.
ctgttgggccctgcattgcctggctttgctggtgaaattgagaagaaaatatgctgcaagttgtggcttacaggtgaaagagttgttaaagccaaatgaaatgaacagttgattgtagtggatttgggttgaaaaatgagacttgcgaattcccctgtaaaaactggatgttaaaacccaggattcacttgcgatcctcgagaaaaaaccggtactgtcatcctcacgaaaccttggattcaggcaactgctgtgcgctgtatccgtatcagaacaacatgagatgccgatgaatggcctcctcaacttgttcacggatgctccgccgagtctatccacgcacagcattaccagaatcctgaggcagcagcctgaggcgtattgacgaaacaatcccggaaggtccacttgtcgtatgaatccggtattgggcacttgcgggacgggcagttccggggggaacgagctctctgccctgcaaggtgcgttcgtcgcatctccgttcagtgtatccatctgcgagtgcatagtgtttgcgcctcgcaacccgttgggtgtttggcggtctggataccgggtttgcggctgggacggttctggtgtgcgctcgtgggtgcaaccctgggggtttcgccaggatacaaatatgaccagacgggaaacgcctccacagtcaagtgcgacgtaaaaagagtagcacgactggggggcggtgccataggtttttcgcctgcttcgcggccaaaaatcggaaccaggccaaaagcaggccaaaagcactctagaacaaaccagcgaataccccagtaacagaggtattccgataatccgccaaagtgagtgcagtatccgcacgccgctgccgttcgtccgtgcgctgcgtgactgagtgcgtggttgcggttgtgcgcccttatcgtctgttgatagcttcttttgctgtactgaagctctttaatcagatcgcatttatcaatttttgcttttgttgcaatcgctttcggtgtcttcatcatgaaatctttgcccgtgccattgtcctgcat

SEQ ID NO: 22938 - DNA, 2968 bp, Homo sapiens
  SIMILAR (11)..(184): 681254mologous to Homo sapiens Nip1 isoform s2,accession number AF083957,Smith-Waterman Score=176.
agtccccaacatggcggctccccaagacgtccacgtccggatctgtaaccaagagattgtcaaatttgacctgggaggtgaaggcgcccattcaggatatccgtgacctgttcaggacccttaagtcgctcttactgaactgaatcctaaagtaaaagagaaatttcaacagttgcgtcacagacctacaggacctgggagcagttggctaaagagcaagacaaagaatcagagaaacaacttctactccagggaagtggagaatcacaaaaaggcagatgcttcagcaattcaggccttcatgggagggaaagcttaattcttcacctggcaaaatttgcaattcggacaatctagagaaagcagaacttcttcagggaggagatctcttaaggcaaaggaaaaccaccaaagagaggcctggcccagacatccagtaccatcactggagagcctcatggggattcaggcaggatgatggcccagcaggtccagcagagcgaggaggccatgcagtctctagtcacttcttcacgaacgatcctggatgcaaatgaagaatttaagtccatgtcgggcacccatccagctgggccggaagcttatcacaaaatacaatcgccgggagctgacggacaagcttctcatcttccttgcgctagccctgtttcttgctacggtccctctatattgtgaaaaagcggctctttcccatttttgtgagattcccaaaggtgccagttctggcccctttcaactccctgttttcaggaatctgtccctggttccctgaagctcctaggctgcctaaagctgaagcccacacacccctccgttttgcaccccagttgccctgcaggttgggatgggaacaccagtgccccccacttttcctgcaaagtagctggcttgtaaagggtgaacagagcccatgggaggaaggtcctggcattgggatgccgcccctggggacatacgaaccgcctccttcccaccattgtgcactatgggaggccgctgctgcgtggagcaccttaaagtccgagcctcccaggacccggatgcccctcctgtctcccgctcccatcgtgcccttaaatgccagatctggtggagggaagagagaagagcgataagggcgcacaaccgcaaccacgcactcagtcacgcagcgcacggacgaacggcagcggcgtgcggatactgcactcactttggcggattatcggaatacctctgttactggggtattcgctggtttgttctagagtgcttttggcctgcttttggcctggttccgatttttggccgcgaagcaggcgaaaaacctatggcaccgccccccagtcgtgctactctttttacgtcgcacttgactgtggaggcgtttcccgtctggtcatatttgtatcctggcgaaacccccaggttgcacccacgagcgcacaccagaaccgtcccagccgcaatccggtatccagaccgccaaacacccaacgggttgcgaggcgcaaacactatgcactcgcagatggatacactgaacggagatggacggacgcaccttgcagggcagagagctcgttccccccgaactgcccgttgtagcgccaataccggattcatatcgtggatgcttccgtttgtgggccgtgaagtcccagcggtgtgagggaaaagaacgagggccactcagcgcgtgcgcccgcgcgtgcggggcgctgctgttcgtcggctgcgtcggcgtgtcgtgaggctgtgtcggcgactggtggggggtgaggcgtcgcgtcgccgcgtgcgtgtcgtgtggccgtgtggcatgtgacgacaggcaatactgcttatattgcttgactgcgcctgggttaacagtaggagctgatgaacgtatagagatatgaatgccataccggatgctaaggcgatatagagtgctacgacggagcgagccgtagatatgcgcgacagaggctggatttggcccgacgtagccagaaagacggcgactatgacgcgtagggagccaggggagccggggatgtgaaattgcggatttggtggttgtgggtgccttgcacttgactaacttgactttacttgccatcgtataagctgcctgatttttcagtgggcggttgtccatttgtatcagatcatccatacgaagaagcatacccgttgtccatttgtatcagatcatccatacgaagaagcatacccgttgtcgatttgtatcacaacatccatacgaagatccatacccgttgtccatttgtaacagaacatcgatgcgtagatgctcacgcgtagcgaattgatggacgcgggagccggtgtaaaagtgtacaaccacccgtacagggtagcatggtttaacaccgggatgcacacctcgaattttgcccgatagcggtagcggagttgaaacgtttgcttgatttgaagtacccagagagtttgggccgtgagggatgactactagagggcgtgtgactgtgtcagacaaagaactgcttagaatgtggagctgggcgtaaccggttggtttgggacattggtggccggcgtaccgaaggcggggacacctgtcagagtgttgaccggagtagaagcccgcctgcttacagccgcctgctttcagtctaactactactgccatcgtatagcgccgatttacacccacgctcgtgcacccgtgtatcgcaaccgtaacacgcaagtacgggacgcctttaactaggggccggagtgccgtaagaaaggggcagctacatatacgccggaatacccggtcttgcgggaaatgatatacggcctgggtgctttttgggggcaccgaaacgcccgtgtgtgacgtggatcttaacatgttgatagagacatccatgaaaaaggttgggcgtggccccggggaccaggcgacactgactagtgcggcgccccgcttgtccatgaatgtatgcat

SEQ ID NO: 22939 - DNA, 1300 bp, Homo sapiens
  SIMILAR (94)..(606): 441254mologous to Homo sapiens G16,accession number U89336,Smith-Waterman Score=294.
  misc_feature (1)...(1300): n = a,t,c or g
atcgtgggcaggaggtggtttctggtttgttggggcgtgtgtatgtgtatttggggggactgaagggtacgtgggggcgaagcagaacttgccatggcagcagcggaggaggaggtctggggcccccaatgttccaaatcgcgagcggggcggggcgggccgccngaaaacccccttcgaatgtaatatatgtttggagactgctcgggaagctgtggtcagtgtgtgtggccacctgtactgttggccatgtcttcatcagtggctggagacacgggccagaacggcaagagtgtccaagtatgtaaagctgggatcagcagagagaaggttgttccgcctttatgggcgagggagccaagaagcccccaggatcccagaattaaaaactccacccccgccccccagggggcagaggaccagctccagagagcagagggggattcccagccatttggtgatacggggggcttccacttcttcatttggtgttggtgcttttcccttttggctttttcaccaccgtctttcaatgcccatgagccttttcgccggggtacaggtgtggatctggggacagggtcacccaagcctccaacttggcaaggaattccctcttcctggtttctcggcaatcttcttccttttttggctgctcagtaattgagctaatgtctgctttcctgcccacctccagccagagaagaatcaagtattgagggtcccctgctgacccttccgtgactcctgggacccccttgaacccctctaatttctgttgggtaaaggcccaagccctgggacatttgtccaaggaaggccctgggggaggaaggagtgaaagtctgtgccatagatgggagagccttctgcctcagaggctcacctcagtaacgttgttttaattttctgcccctggggaaggaggatggattgagagaatgtctttctcctctcctaaatcatttgctttccctgatttcttgatttgatctttcaaaggtgggcaaaagttcccctctgactccttccccccctccccatcttactgatttaatttaatttttcacttccccagagtyctaatatggattttggactcttaaagtgcttccgccccctcactacctcctttaattccaaattcaataaaaaaggtgaaatataaaaaaaaaacaaaaaatattaagtgggaatcttctttaccccaaaaaatatttngggggggcgcctttttaaaaaatcctttggggggcccaattttcccccggcggaaaagatatattttttctttaaaagg

SEQ ID NO: 22940 - DNA, 1140 bp, Homo sapiens
  SIMILAR (37)..(117): 421254mologous to Zea mays cell wall protein (put.); putative,accession number M36913,Smith-Waterman Score=62.
atgcagcggcggcggcggcggcggctgctgctgctgccgccgcggaggcagacagaccgggcgctgccaccgccgccctcccccggctccatgccgccgccgctgccgcctcctcctctccggcgaggggcggggggctccggcccggggatgggctgtatccaaagcatcacctgcaaggcgcggatccggcgcgagaacatcgtggtgtacgatgtgtgcgccaccatcgaccagtgccccacgcgcatcgaggagacctcgcccatcgtcctgcgctacaagaccccctacttcaaagcctccgcccgcgtggtcatgccccccatcccccgccacgagacctgggtggtgggctggattcaggcgtgcaatcagatggagttcttcaacacctacagcgacctgggcattgacagggcgggtgtagggaggctccttgcgaaggcattttctcgtggtttgcttctgacttcccagaaacgcgaggagaaaggtgcggggcgggaagaacgcgacaaggagggttcgagaggcggaggtggggatggctggcgagtgcctggcgagtttcagggcgccaaaccggagcgggcttggaagagcaggtcccgggcatccgagcgggagttggtagttctgtccttgccctcgcgactgttgaagtttcgaacccttgtcccccgggccagggagcccggaggcgtttccgtctggaaccacaagccggacacagttgcctctctgtttccgcgccccctggaccagttctggtggggagctggaaggcaccgagtgcgtcccggccaagaagggcggatagccttgtgcgagcagcgttcggctggcgcggcgcggggtgtttcttatgctaaaggaaaggatggatctcttgtctgtctagggtccttactttttaaaactttcctaattgcggcactggaagggattcccctggcgcccaccgccgaattctatcggcgagctgggagctctccaactttcagcagcgccggttggtgcgcgccgggcttggctgctgcggtgaagaccaaggatcgccgcggctcctcaaccgccaggggccgcaggctacgggcggtcgcgtccgggacttttatatttaccaaattttcataa

SEQ ID NO: 22941 - DNA, 1716 bp, Homo sapiens
  SIMILAR (814)..(1713): 991254mologous to Homo sapiens dJ543J19.2.1 (A putative TH1 protein, isoform 1),accession number AL109840,Smith-Waterman Score= 1551.
atggcgggggccgtgccgggcgccatcatggacgaggactactacgggagcgcggccgagtggggcgacgaggctgacggcggccagcaggaggatgattctggagaaggagaggatgatgcggaggttcagcaagaatgcctgcataaattttccacccgggattatatcatggaaccctccatcttcaacactctgaagaggtattttcaggcaggagggtctccagagaatgttatccagctcttatctgaaaactacaccgctgtggcccagactgtgaacctgctggccgagtggctcattcagacaggtgttgagccagtgcaggttcaggaaactgtggaaaatcacttgaagagtttgctgatcaaacattttgacccccgcaaagcagattctatttttactgaagaaggagagaccccagcgtggctggaacagatgattgcacataccacgtggcgggaccttttttataaactggctgaagcccatccagactgtttgatgctgaacttcaccgttaagcttatttctgacgcagggtaccagggggagatcaccagtgtgtccacagcatgccagcagctagaagtgttctcgagagtgctccggacctctctagctacaattttagatggaggagaagaaaaccttgaaaaaaatctccctgagtttgccaagatggtgtgccacggggagcacacgtacctgtttgcccaggccatgatgtccgtgctggcccaggaggagcaggggggctccgctgtgcgcaggatcgcccaggaagtgcagcgctttgcccaggagaaggcctgccaggctctcggggccatgctgtccaaaggagccctgaaccctgctgacatcaccgtcctgttcaagatgttcacaagcatggaccctcctccggttgaacttatccgcgttccagccttcctggacctgttcatgcagtcactctttaaaccaggggctcggatcaaccaggaccacaagcacaaatacatccacatcttggcgtacgcagcaagcgtggttgagacctggaagaagaacaagcgagtgagcatcaataaagatgagctgaagtcaacgtcaaaagctgtcgaaaccgttcacaatttgtgttgcaacgagaacaaaggggcctctgaactagtggcagaattgagcacactttatcagtgtattaggtttccagtggtagcaatgggtgtgctgaagtgggtggattggactgtatcagaaccaaggtactttcagctgcagactgaccatacccctgtccacctggcgttgctggatgagatcagcacctgccaccagctcctgcacccccaggtcctgcagctgcttgttaagctttttgagactgagcactcccagctggacgtgatggagcagcttgagttgaagaagacactgctggacaggatggttcacctgctgagtcgaggttatgtacttcctgttgtcagttacatccgaaagtgtctggagaagctggacactgacatttcactcattcgctattttgtcactgaggtgctggacgtcattgctcctccttatacctctgacttcgtgcaacttttcctccccatcctggagaatgacagcatcgcaggtaccatcaaaacggaaggcgagcatgaccctgtgacggagtttatagctcactgcaaatctaacttcatcatggtgaactaa

SEQ ID NO: 22942 - DNA, 1629 bp, Homo sapiens
  SIMILAR (2)..(1258): 1001254mologous to Homo sapiens alpha subunit of GsGTP binding protein,accession number X56009,Smith-Waterman Score=2215.
gccggttagaagctctgctccccggcggggacactcagtcgcgtcggcaccgcggagcgggctgcgtcaggtggctggccggcgcggcgcggcgctcccctgctctctggctccgggctgcggcgcggcggctggagcgagcccctgtcccggcgcggggcggcggcgggcggccggcgggcgctgccttgcgtgtgagtgcacctcactcacatgtgctggagaatctggtaaaagcaccattgtgaagcagatgaggatcctgcatgttaatgggtttaatggagagggcggcgaagaggacccgcaggctgcaaggagcaacagcgatggtgagaaggcaaccaaagtgcaggacatcaaaaacaacctgaaagaggcgattgaaaccattgtggccgccatgagcaacctggtgccccccgtggagctggccaaccccgagaaccagttcagagtggactacattctgagtgtgatgaacgtgcctgactttgacttccctcccgaattctatgagcatgccaaggctctgtgggaggatgaaggagtgcgtgcctgctacgaacgctccaacgagtaccagctgattgactgtgcccagtacttcctggacaagatcgacgtgatcaagcaggctgactatgtgccgagcgatcaggacctgcttcgctgccgtgtcctgacttctggaatctttgagaccaagttccaggtggacaaagtcaacttccacatgtttgacgtgggtggccagcgcgatgaacgccgcaagtggatccagtgcttcaacgatgtgactgccatcatcttcgtggtggccagcagcagctacaacatggtcatccgggaggacaaccagaccaaccgcctgcaggaggctctgaacctcttcaagagcatctggaacaacagatggctgcgcaccatctctgtgatcctgttcctcaacaagcaagatctgctcgctgagaaagtccttgctgggaaatcgaagattgaggactactttccagaatttgctcgctacactactcctgaggatgctactcccgagcccggagaggacccacgcgtgacccgggccaagtacttcattcgagatgagtttctgaggatcagcactgccagtggagatgggcgtcactactgctaccctcatttcacctgcgctgtggacactgagaacatccgccgtgtgttcaacgactgccgtgacatcattcagcgcatgcaccttcgtcagtacgagctgctctaagaagggaacccccaaatttaattaaagccttaagcacaattaattaaaagtgaaacgtaattgtacaagcagttaatcacccaccatagggcatgattaacaaagcaacctttcccttcccccgagtgattttgcgaaacccccttttcccttcagcttgcttagatgttccaaatttagaaagcttaaggcggcctacagaaaaagaaaaaaaggccacaaaagttccctctcactttcagtaaaaataaataaaacagcagcagcaaacaaataaaatgaaataaaagaaacaaatgaaataaatattgtgttgtgcagcattaaaaaaaatcaaaataaaaattaaatgtgagcaaaaaaaaaaa

SEQ ID NO: 22943 - DNA, 898 bp, Homo sapiens
  SIMILAR (814)..(182): 1001254mologous to Homo sapiens CGI-107 protein,accession number AF151865,Smith-Waterman Score=1083.
aaccctcaaaatcagatagtaatttcaaacaacattaatttcagatgatcccttttatttagaggccctgcatctgttttgatcaagtcacatagccttacaccaacttatcaaaaaaaaaaaaaaaaaaactacccaaaatatagttgtatttttaaaataacaaataaatatatagtcagtttggagagacctggagtacccgatgttgtctaccaactgtcacgatcacttctctgcaaaacgctgctgctgccattggagtccttatggttcctcttgctgaggctgtcagttcttcaatctcagcatttaatttatgtattacccattccattgcttctcggcctttactagcatttgaggatatcgtacttgccatcagtccttcaaggtaactgctgaggctaactcctttcacggtaattatggcttcttgtgtcaaaacagttttttctggatcctgaggatgtggtttgtatataagtctctcatctactgaaaccatgtttgtaaatgaaatattagtagatttaagttccattgttttctctacaggatcaactacagaatgttcttgcacatatgttttcgttcttgctgcaccaataagagacttcacaatggaaggcagtccccactctgtgctgagaagtctgtggctgtgcaactttccagagggatctatatgtctgtccaacacatcaactccaaccacacttgggttcatagggtttgggtatttctgcattgcagctgttgtaacagtttcccacgggtggtcaaagacgtgctccgaagtccagatcttcatggtgccggcaccctgagagatgtccgggtagcgccaggggacaacgaggcacagaggctacacctgcccctgccccgcccccag

SEQ ID NO: 22944 - DNA, 820 bp, Homo sapiens
  SIMILAR (286)..(122): 851254mologous to Homo sapiens dJ543J19.2.2 (A putative TH1 protein, isoform 2),accession number AL109840,Smith-Waterman Score= 224.
gcaagtttacctctacgttgaacagaaggagctagcagctttggctgtggaacacgggccatgggaagggttttgtggggagcactaggaaggaagggctgagcagaaacagggcctctcacttctcctgggcaaagcgctgcacttcctgggcgatcctgcgcacagcggagcccccctgctcctcctgggccagcacggacatcatggcctgggcaaacaggtacgtgtgctccccgtggcacaccatcttctgcaagattgcagggagagagggggcagggtttactactgtagcacagacgggcggacgagagccaagcctccaccgtgctcgggcccgggagtgagcatcctggaaggtgccctcagaaatggagattctgttcagggaaggagcatctcatgcttgaaagccaagacccaaagcagcctccttataatctgaggttcataaagaaagaacatacggcaaactcagggagatttttttcaaggttttcttctcctccatctaaaattgtagctagagaggtccggagcactctcgagaacacttctagctgctggcatgctgtggacacactggtgatctccccctggtaccctgcgtcagaaataagctaggacgcaaaacaagaagtcagaggggaggcatgcagtgaccgcacctccacgggaagctggcttgtcagtgttcatggtgaggtggagtaagtgtgcgctggtcgtgggtctcaggccttcactccgccctcaccctgctatcacctaggtgtgtgccctgggctgaccacctcgaattccacgacactggact

SEQ ID NO: 22945 - DNA, 1584 bp, Homo sapiens
  SIMILAR (70)..(117): 871254mologous to Sus scrofa alpha-stimulatory subunit of GTP -binding protein,accession number X63893,Smith-Waterman Score=77.
tatagattgccgtagaacgccttcggaatcgccggggagatccacgcgtgcgccgccgccgccgccgccatgggctgcctcgggaacagtttgaccgaggaccagcgcaacgaggatttttgcgcagcgtgaggccaacaaaaagatcgagaagcagctgcacaagagacaagtctgtctaccgagccacgcaccgcctgctgctgctgggagctggataatctggtaaaagcaccattgtgaagcagatgaggatcctgcatgttaatgtgtttaatggagacagtgagaaggcaaccaaagtgcaggacatcaaaaacaacctgaaagaggcgattgaaaccattgtggccgccatgagcaacctggtgccccccgtggagctggccaaccccgagaaccagttcagagtggactacattctgagtgtgatgaacgtgcctgactttgacttccctcccgaattctatgagcatgccaaggctctgtgggaggatgaaggagtgcgtgcctgctacgaacgctccaacgagtaccagctgattgactgtgcccagtacttcctggacaagatcgacgtgatcaagcaggctgactatgtgccgagcgatcaggacctgcttcgcttgccgtgtcctgactttctggaatcttttgagaccaagttccaggtgggacaaaagtcaacttccacattgtttgacgtggggtgggccagcgcgatgaacgccgcaagtggatccagtgcttcaacgatgtgactgccatcatcttcgtggtggccagcagcagctacaacatggtcatccgggaggacaaccagaccaaccgcctgcaggaggctctgaacctcttcaagagcatctggaacaacagatggctgcgcaccatctctgtgatcctgttcctcaacaagcaagatctgctcgctgagaaagtccttgctgggaaatcgaagattgaggactactttccagaatttgctcgctacactactccctgaggatgctactcccgagcccggagaggacccacgcgtgacccgggccaagtacttcattcgagatgagtttctgaggatcagcactgccagtggagatgggcgtcactactgctaccctcatttcacctgcgctgtggacactgagaacatccgccgtgtgttcaacgactgccgtgacatcattcagcgcatgcaccttcgtcagtacgagctgctctaagaagggaacccccaaatttaattaaagccttaagcacaattaattaaaagtgaaacgtaattgtacaagcagttaatcacccaccatagggcatgattaacaaagcaacctttcccttcccccgagtgattttgcgaaacccccttttcccttcagcttgcttagatgttccaaatttagaaagcttaaggcggcctacagaaaaaggaaaaaaggccacaaaagttccctctcactttcagtaaaaataaataaaacagcagcagcaaacaaataaaatgaaataaaagaaacaaatgaaataaatattgtgttgtgcagcattaaaaaaaatcaaaataaaaattaaatgtgagcaaag

SEQ ID NO: 22946 - DNA, 1238 bp, Homo sapiens
  SIMILAR (308)..(451): 911254mologous to Homo sapiens dJ543J19.2.1 (A putative TH1 protein, isoform 1),accession number AL109840,Smith-Waterman Score= 233.
ggcacgaggtggcgggggccgtgccgggcgccatcatggacgaggactactacgggagcgcggccgagtggggcgacgaggctgacggcggccagcaggaggatgattctggagaaggagaggatgatgcggaggttcagcaagaatgcctgcataaattttccacccgggattatatcatggaaccctccatcttcaacactctgaagaggtattttcaggcaggagggtctccagagaatgttatccagctcttatctgaaaactacaccgctgtggcccaggactgtgaacctgctggccgagatggctcattcagacgggggttgaaccagtgcaggttcaagatactgtggaatatcacttgaagagtttgctgatcaaacattttgacccccgcatagcagattctatgtttactgaagaaggagagaccccagcgtggctggaaacagatgattgcacataccacgtggcgggaccttttttataaactggctgaagcccatccagactgtttgatgctgaacttcactgttaagcttatttctgacgcagggtaccagggggagatcaccagtgtgtccacagcatgccagcagctagaagtgttctcgagagtgctccggacctctctagctacaattttagatggaggagaagaaaaccttgaaaaaaatctccctgagtttgccaagatggtgtgccacggggagcacacgtacctgtttgcccaggccatgatgtccgtgctggcccaggaggagcaggggggctccgctgtgcgcaggatcgaccaggaagtgcagcgctttgcccaggagaaaactgttttgacacaagaagccataattaccgtgaaaggagttagcctcagcagttaccttgaaggactgatggcaagtacgatatcctcaaatgctagtaaaaccattgtggccgccatgagcaacctggtgccccccgtggagctggccaaccccgagaaccagttcagagtggactacatcctgagtgtgatgaacgtgcctgactttgacttccctcccgaattctatgagcatgccaaggctctgtgggaggatgaaggagtgcgtgcctgctacgaacgctccaacgagtaccagctgattgactgtgcccagtatatatttgtgcttgaaatgcaggtgccctgctgtgaagaagcccagagtcatccaggacaacatggaggggtgcaagtggggaggaactga

SEQ ID NO: 22947 - DNA, 1675 bp, Homo sapiens
  SIMILAR (514)..(1311): 571254mologous to Homo sapiens alpha-S1 (AA 1-380),accession number X04409,Smith-Waterman Score=616.
gcgggcgtgctgccgccgctgccgccgccgccgcagcccggccgcgccccgccgccgccgccgccgcgcatgggctgcctcgggaacagtaagaccgaggaccagcgcaacgaggagaaggcgcagcgtgaggccaacaaaaagatcgagaagcagctgcagaaggacaagcaggtctaccgggccacgcaccgcctgctgctgctgggtgctggagaatctggtaaaagcaccattgtgaagcagatgaggatcctgcatgttaatgggtttaatggagagggcggcgaagaggacccgcacgcatgcaaggagcaacagcgatggctcggcacaaggcaaccaaagtgcaggacatcaaaaacaacctgaaagaggcgattgaaaccattgtgttttgccatgagcaacctggtgcccccccgtgggagctggccaaccccgagaaccaagttcaagagtggactacattcttgaagtgtgattgaaccgtgcctgactttgacttccctcccgaattctatgaggcatgccaaggcttctgtggggagggatgaagcgagtgcgtgcctgcttacggaacgcttccaacgagttaccagcttgatttgactgtgcccagtacttcctgggacaagattcgacgtgatcaagcaggctgacttatgtgccgagcgatcagggacctggctttcgctgccgtgttcctgacttctgggaatctttgagaccaagtttccagggtgggacaaagtcaacttccacatgttgtgacgtggggtgggccagcgcgatgaaacgccggcaaagtgggatccagttgtttcaacgatgttgacttgccatcatctttcgttggttggccagcagcaagctacaacatggtcatccggggaggacaaccagaccaaccgcctgcaggaggcttttgaaactctttcaagagcatctgggaacaacagatggctgcgcaccaatctctgtgatcctgttcctcaacaagcaagatcttctccgctgagaaaggtctttgctggggaaaatcgaagattgaggactactttcccagaatttgctcgctacactactcctgaggatgctactcccgagcccggagaggacccacgcgtgacccgggccaagtacttcattcgagatgagtttctgaggatcagcactgccagtggagatgggcgtcactactgctaccctcatttcacctgcgctgtggacactgagaacatccgccgtgtgttcaacgactgccgtgacatcattcagcgcatgcaccttcgtcagtacgagctgctctaagaagggaacccccaaatttaattaaagccttaagcacaattaattaaaagtgaaacgtaattgtacaagcagttaatcacccaccatagggcatgattaacaaagcaacctttcccttcccccgagtgattttgcgaaacccccttttcccttcagcttgcttagatgttccaaatttagaaagcttaaggcggcctacagaaaaaggaaaaaaggccacaaaagttccctctcactttcagtaaaaataaataaaacagcagcagcaaacaaataaaatgaaataaaagaaacaaatgaaataaatattgtgttgtgcagcattaaaaaaaatcaaaataaaaattaaatgtgagcaaag

SEQ ID NO: 22948 - DNA, 458 bp, Homo sapiens
  SIMILAR (347)..(445): 961254mologous to Homo sapiens ribosomal protein L26 homolog,accession number AF083248,Smith-Waterman Score=156.
  misc_feature (1)...(458): n = a,t,c or g
cattaaagacatcacgaccgcccgcccggnccggaattaccgggtcgaccgacgcgtccggggtcaccatgaagttcaatcccttcgttttctcggaccgcagaaaaaaccgcaaacgtcacgtgaatgccccctcacacgtgcgcaggaagatcatgtcatccccgctctccaaggagctgcggcagaagtacaatgtccgctccatgcccatccgcaaggacgacgaggtccaggtagttcgaggacactacaaaggtcagcaaattggcaaggtagtccacgtgtacagaaagaaatatgttatctacatcgagcgggtgcagcgtgagaaggccaacggcacaaggatcggaaaaaaattcttgaacgcaaagccaagtctcgacaagttggaaaagagaaaggcaaatataaagaagaacttattgggaaaatgcaggaatatatagaacctg

SEQ ID NO: 22949 - DNA, 579 bp, Homo sapiens
  SIMILAR (142)..(453): 991254mologous to Escherichia coli msbB,accession number M77039,Smith-Waterman Score=569.
gaatacgtcgcctacagccacacgggccgcatcatccctgcaatctggttccgctacgacctcagccccatcacggtcaagtacacagagagacggcagccgctgtacagattcatcaccacgtattttccagaagggaatgcccctttccataatcagggcaacccggtttttgattatgtctggaacacggtgcgtcgtcgctttggcggtcgtctgcatgcgagaaatgacggtattaaaccattcatccagtcggtacgtcaggggtactggggatattatttacccgatcaggatcatggcccagagcacagcgaatttgtggatttctttgccacctataaagcgacgttgcccgcgattggtcgtttgatgaaagtgtgccgtgcgcgcgttgtaccgctgtttccgatttatgatggcaagacgcatcgtctgacgattcaggtggttatcaccaggctaaaactggacaaggatcggaaaaaaattcttgaacgcaaagccaagtctcgacaagttggaaaagagaaaggcaaatataaagaagaacttattgagaaaatgcaggaataa

SEQ ID NO: 22950 - DNA, 813 bp, Homo sapiens
  SIMILAR (625)..(263): 441254mologous to Homo sapiens ribosomal protein L26 homolog,accession number AF083248,Smith-Waterman Score=145.
  misc_feature (1)...(813): n = a,t,c or g
tttttttttttttttttgatagtaagtggaatttatttataagacaatgcaaatactatgtggaattaggaagcatttcccatttttattcataaaatttattacttaaaaattgcaaaaattaaattttacaagaggcacagggtaaccaaaaccaggaaattgaaatgttccaaaccattccgaaaagttcgaaagaaacacaccctagccttcaaaaatctccgggttaaaccgtggttgcacaaccaggttctatttattcctgcattttctcaataagttcttctgtatattatgccttgctcttttccaccttgtcgagacttggctttgcgttcaaagaatttttttccgatccttgtcccagttttaagccctggtgaataaccaccttgccttgggtgaaatgccccacgtggaacagtttgtccgttgggctttctcacggctgcaccccgctcggatgtagggtggacatattttctttctggtacacctgggactaccttggccaatttgctgacctttgtagtgtccatcgaactacctgggacctcgtcgtccttggcggatggtgcatggagcggacattgtacttctgccgcagctccttggagagcgggggatgacatgatcttcctgcgcacgtgtgagggggcattgaagtgacgtttgcggtttttactgcggtccgaggtaacgaagggattgaacttcatggtgaccctctcgtgatccgcccgcctcggccttccaaagtgctgnnnntacgagcgtgagccgccgcgccctcctacctctacttttttc

SEQ ID NO: 22951 - DNA, 1201 bp, Homo sapiens
  SIMILAR (67)..(564): 741254mologous to Homo sapiens Human carbohydrate-associated protein CRBAP-1,accession number Y79505,Smith-Waterman Score=582.
caagacagacccgagatccccgactgcgcgccgtgttccacgtaccccggggggccggtcatgaaaatggcggtatctggggccgacagcgatgccgaggggaaactagaagatggccattgaaacaactctttgagctctccagttcaagcggacgtgtacttcccacgactgatagttccattttgtgggcacattaaaggtggcatgagaccaggcaagaaggtgggagtgatgggcatcgttgacctcaacccaaagagctttgcaatcaacttgacctgtggggactcagaagaccctcctgccgatggggcaatcgaactcaaagctgtgttcacagatcggcagctactcagaaattcttgtatatctggggagaggggtgaagaacaagtcagcaatcccttactttccattcattccacgaccatgccattcagggtggaaattctttgtgagcacccactgtttccgaagtgtttgtggatggacaccaactttttgatttttaccatccgcattcaaaccgttatcttgcaatttgacaccataaagataaattggagacctccagatcaccaagcttgggcttgatttaaaccacctctatttcaaataaggatcacgtgccacaactatctggactgttggtctggaagaagtgtcctagcaagatctggagacttaaaaagaaaacaaaaacaaatggcaagtttcacttaagggtggtctgcccttaagaagaaagctgttgggacaaagacaccgagccattatacccagaataaaataatacatttatgctggattttattcagaccaaactaaaatggatttgtgatgatttgtgatttggtagcaaattattcatcttttcaaagcaaggcaatgcttagaaacagaagtgctaaagacacttaaaaagccaacaacaacggtacagtgaaatcaatgcatttctgccactaaagtggaattgtgtagccacaaccaatattttagtcagggtatttacatagaatgtaggttgttcaaggtttgactttttttttgttttttgtttttgtttttgtttttgttttgcacagcataatgttaattcagattgttgaagctttcttgtagttatttatttatactcaatgtatgtattaaagaatgaacaatgtctcaaaaaaaaaaaaaaagggcggccgct

SEQ ID NO: 22952 - DNA, 486 bp, Homo sapiens
  SIMILAR (16)..(99): 421254mologous to Homo sapiens small nuclear ribonucleoprotein N,accession number AF134832,Smith-Waterman Score= 66.
  misc_feature (1)...(486): n = a,t,c or g
caaggttttataaagccccccctaaaggaagaaaactttactctcccaccccccggtaaatttgggccccccaagggatccttaaatagcccccccccnnnnnnnnnnngtgaagtcctggggggggcatattattattagtttattatttataccgtgctctgttccaaaaaggatgtaaggaggcagcatggcttgagtacccccttacttgatgagttaaggagttcacatccatctagagacacttgtctgagagactgtattagaagactacgggatggtttaggggagggaagagtgctaagaaaagcagtggcatcttgtccaacctcatcttctctctcctcatttgcaaatcatatctcaggagtaagccaaaaactggtgggagggttgcagcaggaaaaaattagcagtaaagcagnagancgggggcgtgcgtatgccatcatttccgggccggtnccgcanggcgatcaattn

SEQ ID NO: 22953 - DNA, 1479 bp, Homo sapiens
  SIMILAR (191)..(802): 771254mologous to Homo sapiens uncharacterized hypothalamus protein HSMNP1,accession number AF220191,Smith-Waterman Score=787.
  misc_feature (1)...(1479): n = a,t,c or g
gttcaggagggcatgatatggagagttgggcattggctgtggtccctgaatacagaagtatttttcttgtggtgcctggaactggcatcccctttgtggagcttagggcaagccccgcctctgcaaggagacttggtttgtgggacacacttggtttcagggaaggggaaagaggtcaccaagggcagaggtgtccaggccggagccaggggccccactgttgggatgctggctgcagtggggcgccccaagcccacggcccctctgtcttctctttcgactttgcagctgtacttggtttgctcctctacccgcaggagctgacatggacccaaatcctcgggccgccctggagcgccagcagctccgccttcgggagcggcaaaaattcttctaggacattttacagccacagacagagtttgtctttcctctgtcccatctgcatctcgagtcgcagagaccccccataggtagtatctcatccatggaaatgaatgtggacacactggagcaagtagaactttattgaccttggggacccggatgcaacaaaaggtggccttgccttgcgaaagatcctccaccaaccccccagtcgtctggggtgggacaaccatttggaggagctgagcctgccggtgcctatatcaggacaggaccacatctaggacctcctcctcctcctcctcccgactcctccaccaacctgcatagcccaaatccaagtgatgatggagcagatacgcccttggcacagtcggatgaagaggaggaaaggggtgatggaggggcagagccttggagcctgcagctagcagtgggccccttgcctacagacctgaccccgctggctattctcccacatngagaccaccaggccccagcccagagcctntcggggagaagacccagactctttacttgccagtagggcacccagaggtgggaatggatggtgggattgtggtaccctttcctaagaattaaccctctccctgctttactgcctaattttttcctgctgcaacccctcccaccagtttttggcttactccctgagatatgatttgcaaatgaggagagagaagatgaggttggacaagaatgccactgctttttcttagcactctttcccttcccctaaaaccatccgcgtagtcttctaaatacagtctctccagacaagtgtctctagaatggatgtgaaatcccttaactcatcaagtaaggtggtactcaagccatgntggcctccttacatcccttttgggaacagagcacgggtataaataaataacttattaataatatgccnnnnnnnnnnnnnggggggcgcccttttaaaagaaccaattttaaccccccggggcgggcaagaaaaaattttttttagggggccccaaaaataaattcaggggcccgcttttaaaaaccttgggaagggaaaaacccgggggttccccaatttaatcccct

SEQ ID NO: 22954 - DNA, 9359 bp, Homo sapiens
  SIMILAR (6407)..(5703): 821254mologous to Homo sapiens DIA-156 protein,accession number Y15909,Smith-Waterman Score=938.
  misc_feature (1)...(9359): n = a,t,c or g
taacgtatatcttaactttattgaataagtaagtagccattacatatagattgcaagtcattcttggtcctgcttagagataggtgtttattccaaggtgaaatgacagcacaaatccacagttctactgcaagtgaaatacttcttcagggtggcttggtatggacacaatctccctcaatacccattcaaagcagtctttgctttcacctctccctttaagggaagggattcacggtatgtaaaataagcttgtaaagaaccccttctgtatcagaggtagtttttgtgcctgcactgtgaaccatagaaggcatttggtcaaaggtgtcataaaaggggcagaagaggtacatcagagcacagagttgggatcgattatttttttcaagttaattgcccatagtagcaaaagtatcaaccaaaatttagaatagcctgtccatccatttaacaacagagcatgcagcagcctgtgcagacaatagcttttagagacaaacttcgatctggtttgagcaccaagaatgcatcttaaaaagtgaaaaattcatttgtgtgcaatgaatagtgtagtgagctgcatggtgccccctccccaataaagatattcaatatcctaactccctggaacctgtgatagtaccttatttggaaaaaaggtcctttcagatataattaagaatcttggaataagggaatgatcatgggtaatctggatgggccctaagtcccgtcacaagtgtccttataagagagaggcagaggtagattatatatacagaggggaagtgatgtgaagacagaggagagggagatgcagtcacaaaccaaggaatgatggcagccacaagaaactggaagacacgggaagagtgtttcccttagagtctccagaagacgttcagccctgccaacccctcaattttggacttttggcctccaaaacaacaagataataaatttntattgttttaagccactgggctagagggtaatttgttacagcagccatgggaatctaatgcagattgtggaactgggacggattgggtacttctgtaacaaatgtcttagaatgtgagaaaggctttggaattggataatgggtagagactagaagaattttggtggatgtgatagaaaaaaactagattgcctttaccagatggtagtagtatgaatgttaaaggcatttctagtgatggtttagaaggaaatgaagattttattggaaaatggaagaaagggaatccttgtcatatagtggcaaaaagtttatctatctaaattgtctactacagtagtgtgaaaagttgaataaatgatgaacttggatgtttagctgaggaaattttcaagtctagtgttagagatatagcttagtttcttcttagtgcttatagtaaaataagacagnaaacagatacattgacaaaacaggctgggcatggtggcttacacctgtaatccggcactttaggaggccaagatgggtggattgcttgaggctaggagttcgagagcagcctggacaacatagcaagatcaagtctctacaaaaaaatgcaaaaaattagccaggcatggtggcatgcacctgtagacccagctacttggaaggctgatgcaggaggatcccttgagcctgggagtttgaggttacagtgagctatgtttgcaccactacactgcagcctgggtgacagagtgagacctcatctctaatacattaaaaaaaatttttttttaaagagaaaataactatataagtggacaaaaggaatcagtatctgatgactgggtaaattctgagcctgaattcacaatctggaatgattgtaaaaaaaaaaaaaaagatgctaaaattaggagattcactgttagaaaagtgtgctctgtagataagcccaagggtgtgtcttgacaacctttggctagtgctgaagaggttaggcattaacttgtggatttatttgactgtttcaacagaagccaagaatagagatggggttgttcaggaaaaatctgtgaggaccctcttttctgaatgtgtgaatcaatgtgacatacgtagaagacccacaagatttttgagaatgttctaccatcagaaacanttccaactgggcctaaaagggacagagacagaaaaaaatgaaagaagattgtgagactgccagaattctacaggtaggaaacccgttgataaaacttctcagctgcaaacatgtgccacccttcaagataaaggaagcaccatcccgagagcagagctgcaggtacagaggcagaggcccaagtgtgggaacagaggaagaagtgcaacccataggcacagaggcagaggcccaatccatagtccaagaaagaagagctacaggcccaaagggtggagccctgagaaagaggattactgccaggccttgaaatagaacagaaatttgcctggctagattttgaaaatgattgggacaggagactccattccaatttccattctctcctttttgagacagaaatgtctgtaactgttatcctatgcctgttcccaccattgtaatttgaaagcagattaacttttctgtttcactggttctcagaggaagaggatttggcctcaggaaagaccatacccagagtttcactcatacctgatttagatgatctaaatgatnagctttggaacttttgaaccgatnatatttgaatgaaattttggacttaggattgatataatgggttgagacttttggtaatgttaggatgggatgaatgtcttttacacatgagacagacataaattttgggccaaagggcagactctggtgggctaagagtggcttcctaaaagacatagccacatcctaatccccaaaaccatgaatttatcttatttggagaagggggccttgcagatntaattnagttaagactcatgaggtgaggagattatcctggagtaatctgggtagtccctaaaagtcatcataaggatccttattaaacagaggcagaggcagattaggtatacagaggagggtgatgtgaagacacagcagaaagagaaatgtggccataagccaaaaaatgccaatngccaccaaaaggtggacgtggcaaggaaagattctcctctngagcctctggagggagccatggctttgctgcccttcaaaaatgtaagcaaataagtttctgttgtgttaagccatcatattattggtggtaatttgttacagcagccaaaggagataatggatgcaattagttgttaatattttaaggattctgtaccttttaaaaatattctgaagaaaatctgcataaatggtgcttctcatgtgtggcagtaatatggccaacaaaagaccttagtgtaatttggtttcatactaaaaatgtcactatatactttttttggtgatatactttccaatcatctaaaacaaaactgcaaatggctagagcaggaccattacaaatctgggaaacaaaccttttaactcactcaactattggaacttcatgaaagaccctgaaaggtttttttttttaatgtttgtgaaaagcatgtgggattgctctaaataaaaatatataagtaagttatcaataatagtacttcattcgttcttgttcacnaactagaaaataaggcaagtttgtatctggaaaaggtgatgatacatatcagtatttctaccttgaccagcttgataatatagcaaggcatatgctcccaaattttagtcagggtnaacatttcaagatcattctcctacagactgataagctgtcaaaagaattaaaaaagccataccacgaagatttcagaaaagaaagactttgtaaagtcaaaaatacacatactaggtatttacataaattagaacctaaacttttgttgttgttaaaaaacagtgttactgctatgtccctgaaatgtgtgtgtgcatgtgtgtgcatttgtgtatgtgtgttttcagatcggataggactgtgaaatttcagatactgttaccctttttgatttttctattgtagcagcttcagagctttttaaagaagtataatacctaagtaaggatgcactggaggcaaaggcagcagtttgaatcattatacatctatataaaggaattatctgtgggctgctggtcacttgtttactttatctcagatggggatttgccaagccagccatttgttcttctctctgaatatctacaatgtgctttgaatgagtagaaacagtattttctaacataagaaatatacatgtangaaatttcttacaataatcacaatcaatcatctgcatgaattagacttaaaattgcactccagagaagttataccacattatttcaatgcatattttaaaataatagacagacaagttaagtataacttttactccctaatttatttaagaaaaatgtagaacctgttttccctgctagacttgttttggcagcatcatcttaatttgttaatataaggtaagtaagtatgatgataattgagaagaagttcacttagttggaattattgtagcaagagatagaaatatatacacatatttacacatacatacataaaatttctttttcttcttcagaccaccaaagtgaaattggaaagagagtggaaagggagataaaacaattgacctttcagacagttttctgctgcctcctgtaaaaagaattctttttcctctcaggttttctagaagtctatttccctgccttcaagggactcaagggagaaagaagcaatagaaaaaagaaataaaccacagagcataggaatcaatatttgcctttgaaatctaaataaacgtaatagaattttccaggttcatccctagcataaacattaaaatgtgagggttttctcaaaaatagccatataaagtatttgtataaagtagatatctgtgcataattagaaaatacctctttaaataaagtttaaatcactttccctaactgattcggttaaactttggtttatttatttttagcaatgagaagtgcttgcaatatcatgctgaaatgctagctagactaatgataagtttaatttcagccaaagcagatgaatccatcagctttcacttgagataaaattcctaaataactcaactggggtggagcagtactttcgtgaatttccaaaatggcttctcttacagtgtgcataatattagcctctctccaaatcaagatgcatatttttcttggcccttttctattatatatgtactagggattggaagctgacactggataattctttctattctttttcttctcttttgtttttggggggggtgacttacacatttaagattttaaatttttggactgagtgtttttgaaagccttagaactcttcaatttcttacacttccatcatcacagtcaggtcacacacaattacaaatgatacacatctttacactaaaatggaacacattttgtaatcctgataactgtgttcagattagaataattgtgggaggagtcttgcaatagtattacaaatgcacactacttcatccagcttatcttgatctttgcagaaatgcacttatttcctttccagccgctgagtgcacactttgttccttctcaaaatgcatcattttgtttttacttaaatattttcatattctttggcatcaggaatcacttagatgagatagctccattgtggcgagagcgtgacctttccaaaggtactcgtctgttatctggattccttggaatccgctttcgacggtctctgaatgctgcacctgattgtagggcttctagaagattatccatcacaccagtctcatcaccctctttgtttatatcaatgagttgtttctttttcttctggcgttctaacttttcttgttcagctttctcttttgcaagttttgccctcctggtcttctcttccatttctcttctcttattgttttctctcactgcttccaaaaacaaagttcggaagttgttgagatcaccaaagaactcttctatgctcactgtctttgagtcaaaaatgaagtattctccaagattctcatagagcttcatcatgttgttgtgcatggtggagagtttttaaaacggttataggccattcttagtaaagctggtcatcttttccacaaactaatggtgatgattttcgagtttggggaaatttcttgaggtcacgttccagatgaacaatctgatgttccactgatgcaagagctgctcttgagaatttgagctgaaactttggcttgcactttatacgtgttccagttattcaggaaattttaggatatctcgatatttttcctcacaaatgtcggcaataaaatgcaaaagggttgttatttgatccgctgattttagtatctctgatcttacaaaggaagttgatcttaaatcccaaagactgggcatttcttgagcctgagttcatgtagtttccaacaagaagaactaactctaaaagtctgttaaagctttcacttttcttcagttcttcacaggcaagagttactgctatgatgcttggtttgatgttgtttatgtgttcttcaaatgtgagcttgaacaggatactactgagacgaggctgtaacattttcacagagctcatcacaactccaaattgttcaggctcacagaggtcatcatattcattcttaagctctgctaattcgttgagtatcttctgctcaggaagatgtttcacaaggttctgaattaaagcctcactcagcatgtcttcattaacctccagaataacgtttcttatgtcttcatatggcatgcgatatgatcccagaaagatggacagattctgagctgttttgggatccaaaattctcagttctttcactttcttctttgtaggcccagtcttcttttcttctaatgcttctgcgttcttttgaacttttatctgagtagcaaaattcaatgccaatttggcaaagagatctggattctcaaacttgtcttctttgactcttaaccagaaacagttctcagataattctgtgggttcaatctttgaccaattgattctcttcatggacacttcaggtttatacatttttttctgcttcattccataaggtagattaagtgatattcctgggggaggaggaactcctccaaggggtggtggtggaggaggtcccccaaataaaagtggtggtgggggtggtggtggtatccccatcattccaggtaaaggaggtggtggaggaggaagaggagctcctccgggtagaggtggcgcgggtggtggtggaggcggccctacacctggcaatggaggtgctgcaggaggacctggaattcctgatgaacttgagagtacttgtgcctgggttcgaagttgctggatttctgcttcaagttctttgattttctcatctcttttttgaagctctgcttgagcttcctgtcgagctgtgaattcttcatcgaacttctttgaaaactctgcagctttttgttcactttcttcaactttcgccttgttcacacaagaatctatcagatgagttaaatcgatgtctaatctttgcctgtatttgaagtctggatccataccactgcagtgtagcactatctgtgaaacacattcctcaattattttataatattgtggcctgatataataatcatttctgataagcaaaaaatgttgtagaatagataagaagtaattttcagcagcagtgtccttcagcatattatatagaagatggtagacttcattcatatcatccatttctgctcgaatgtcattgagacggtgtgataattcagttaggtcatcttctttgttttcatcaaatactttcaactgaatatcaagctcatcattctctttttcttttagatctggtaacattgtttttagtcctgaacggaggaattcattccttaaatgtattcgaaaatcaagctcataaggagaagtgacaagggcatttataaactgcatgcaggccacctgtaattgcaaggcttcctgattttctaaaccttccacaattggtgaaaatcgttccctgttatttctttctgctgctgttgttatagcccctaaaagtttatctagaatgttctcttctccaacaatgcaaatagcagaaagtatttttactatttcagtcatcatgttgggttgtttggggtcaattgctcttgccaatagtaaaagacttctttcatctcctagaatcctttgtaatccaaacttattattcataaatgctttgaggcattgaataagtttatactgattcttcttgtcaatattttcttgctgttttttgtccagaagcttttccagctcatccaataagagtccaagaccttcatggccaaagttgttaacccagctgaccggattgctggttaaagaaaccctgagggattctaggcaattaagaagtttctcatctgatatacccgatcgtaattcatgaacatattcttgtgaagacagggtgcattcatgtttgctgtttttcagcccaccagatttggcagtggcagaaatatactggacaaccatctcacgtttggtggtaaagtctttgtttcgtaaaggagcttttttctcttcgttaaggttcatgtcctccatcattttttcaaagagatccaatacttccttttctgacaaattcaaagatcgttcatcatataatggctgagctgcaggaaactcactcatcgcgacttgagaatcaataggatgttgaataagaggtttttcttttttgacagtagattttctaaaacttgtaattcggtcacgcacatcatctgccaaagtttttatttgaatgttcaatttgggtttgtttttcgtttcctcttcattggcggcccggttccccgcgctccgcttgttgctccggcccccaccgggttcctcgctgccgcctcccgctcccgacgccgccgccccgggctgctccatctttctccggccctgtcacctgtgccctgtaaccccacctctcctcaactgagaaagcacctcggggcgctcacactgccccgcgctgactcggcggcacctcttcctgagggagagagtgtctgcccgggaagctgccgatttcaggcccccgggactccaggctcccaggcacccccgacgcaaccacgccgttgccactactcggcgctggggcaagccctgcccctgagcagttgcaattaccacggtcgccgccgccctcagggcggtgtttagggtggagggaaaagtaggtgcctatctctttaagagggcctcaacacacgtgattcttcaaagtgccccgc

SEQ ID NO: 22955 - DNA, 666 bp, Homo sapiens; identical to SEQ ID NO: 3515
  SIMILAR (2)..(175): 1001254mologous to Homo sapiens protein-tyrosine phosphatase,accession number X68277,Smith-Waterman Score=290.

SEQ ID NO: 22956 - DNA, 408 bp, Homo sapiens
  SIMILAR (3)..(146): 1001254mologous to Homo sapiens protein-tyrosine phosphatase,accession number X68277,Smith-Waterman Score=255.
gaggatacgaagcgttttcggcttcctgcccggagctgtgcagcaaacagtcgacccccatggggctcagccttcccctgagtactagcgtccctgacagcgcggaatctgggtgcagttcctgcagtaccccactctacgatcaggttagtaggtgtccctgccacagggaagaagtaagaactggcaaaggcatggaagagtagtgccagggagaatatagaaagtgacctgcagcattatttataacggaggggacacagggatatgatttattccacagttaagtggtctgacggagccgagtctccagttgtaggctctacggaaatgaacttgctggtcctgcccaggcaaatgggcttagttccctatttatttatcctccagcaacagaactgagttccg

SEQ ID NO: 22957 - DNA, 2963 bp, Homo sapiens
  SIMILAR (1075)..(2214): 481254mologous to Homo sapiens protein-tyrosine phosphatase,accession number X68277,Smith-Waterman Score=596.
gttaaatggaacctctccatgtgtatatagtatttccttgtataaagcactttactacctaccacttgtgttgtgaacgtttggtgactgctgttgaaagaaggaaaagggtgtgtgagaaagcctactgaagcagcagcactgccactacatgtggacaaaagtgaacatataaaagaagttggtgctatttaactctgaatacttggagaaacttagggtgaagatgcaaccagaaaggagaatatggtatgcgtgaagtctcagctttgagctggaggctagattccaagatgacagccatgatgaaactttttaaaaaactaaaccagaagagactttaaaataagagaaagaaatcataaatgtaagacatatgcttggctaaaggggaaatggactttaaattttaaagaggctcatttgcaatgccacttgtatacacttcaaaaattattgtagacacagaatttgttaatatttttgtgccttagtaatttaaacctgaacattgaaacagttttcctccttgtctttcttaacagtgataggcccttaaaagttcccggttttttaacccaatgtatgtgatagtcaaaaaatcacagtttttcattattattcatcttctgtacccacgcataaccactatacatagtttcttttgtacttgaatatacaaaacatgaacacagtgccatatgaataatttcacatacagaacctttttttctctgaagtcctgtggacttgcaaatatatatatatattgctttgttaatttgtttttatatataatcctatgtaataaaggaatatgatctgacatttgggctgtgtgtgcgacgcggtttcggaagggcaaatcggggggaaaccgcggaaagaagccgaaggaagcccggagccccgcgtcgacgctccctctctcagtcccaaaagcgggcttttggttcggcgcagagagacccgggggtctagcttttcctcgaaaagcgccgccctgcccttggccccgagaacagacaaagagcaccgcagggccgatcgacgctgggggcgctgaggccggccatggtcatggaagtgggcaccctgggacgctggaggcctgcgggcgcttgctgggggagcgagcggcgcaattgcctgcttgcttggactgccgctccttctttcgctttcaacgccggccacatcgccggctctgtcaacgtgcgcttcagcaccatcgtgcggccgccgggccaaagggcgccattggggccttggaagcacatcgtgcccaacgccgagctccgcgcgccgcctgctggccggcgcctaccacgccgtggtgttgctggacgagcgcagcgccgggcctggacggcgccaagcgcgacggcaccctggccctggcggccgggcgcgctcttgccgcgaggcgcgcgccgcgcaagtcttcttccctcaaaaggaggatacgaagccgttttcggcttcctgccccggagctgtgcagcaaacagtcgacccccatggggctcagccctttccctgagtactagcgtccctgacagcgcggaatctgggtgcaagttcctgcagtaccccaactctacgatccagggtggcccggtggaaatcctgccctttctgtacctgggcagtgcgtatcacgcttcccgcaaggacagtgctggatgcgcttgggcatagactgccttggatcaacgtgctcagccagattgtcccaaaccattttggagggtcacttaccagtacaagagcatccctgtggaggacaaccacaaggcagacatcagcttctggttcaacggaggccattgacttcatagactccatcaagaatgctggaggaagggtgtttgtccactgccaggcaggcatttcccggtcagccacacatctgccttgcttaccttatgaggactaatcgagtcaagctggacgaggccctttgagtttgtgaagcagaggcgaagcatcatctctccccaactttcagcttcatggggccagcttgctgcagtttgagttccccaggatgcttggtcccgcactgtttcgggcagaggctgggaagccccggcaaatggctgtgcttcgaccgaggcaccatccaccaccaccgtgttcaacttccccgtctccatccctgtccactccacgaacagtgcgctgagcgtaccgttcagagccccattaacggacctttcccagctggttgaaaggcccacggggaggtgaggctcttcacatccccattgggacttccatgctcccttgagaggagaaatgcaataactctggggaggggttcgagagggctggtccttatttatttaacttcaccccgagttccctctgggtttctaaggcagttatgggtgatgacttaggcgtcaagacattttgctggaacttcagcacatttcggggacccaatatatagtggggtaccatccaagtccattctggacaaaatggggggcaggaagaggaaagggacttcagtgtgttgatccccggtttctttttttgcttcgcccctgtttttttgtagaatctcttccatggcttggacatacctacccagtattattcccggacgacacatatacatatgagaatataccttatttatttttggtgtaggtgtctgccttcacaaatgtcattgtcctactcccctagaagaacccaaataccctcaatttttgtttttgaagtactgtacctatccctgtaaatatatccttaagcaggtttgttttcagcactgatggaaaatacccagtgttgggttttttttttagttgccaacagttgtatgtttgctgattatttatgacctgaaataatatatttcttcttctaagaagacattttgttacataaggatgacttttttatacaatgggaataaattatggcatttctaaaaaaaaaaaaaaaaa

SEQ ID NO: 22958 - DNA, 458 bp, Homo sapiens
  SIMILAR (13)..(285): 741254mologous to Homo sapiens Human breast tumour-associated protein 44,accession number Y48583,Smith-Waterman Score=311.
  misc_feature (1)...(458): n = a,t,c or g
ggccacgaggcnctctccgcccctccttctgcggcgtctcgagggaccatggccgatcctcgcgtgagacagatcaagatcaagaccggcgtggtgaagcggttggtcaaagaaaaagtgatgtatgaaaaagaggcaaaacaacaagaagaaaagattgaaaaaatgagagctgaagacggtgaaaattatgacattaaaaagcaggaaaatgaaaaagacttggaagaagctgaggaatataaagaagcacgtttagtactggattcagtgaagttagaagcctgaaacttttctcgtatggggtggtttttgcattaaatcctggggtccattttacaatccattatttttgaccactgctatgtgttcaagtagtatgagaatgtgattgtttttatctggttacatatatatttctttgtctaatttaatatgtcaaataaatgagttcatct

SEQ ID NO: 22959 - DNA, 495 bp, Homo sapiens
  SIMILAR (328)..(492): 1001254mologous to Homo sapiens cofactor A protein,accession number AF038952,Smith-Waterman Score=268.
gcaggatttcctcatgatcccaaggtgtctgacacaagtggcaggtgtcacacacaggtgacaatgtccaggttggtcaaagaaaaagtgatgtatgaaaaagaggcaaaacaacaagaagaaaagattgaaaaaatgagagctgaagacggtgaaaattatgacattaaaaagcagcttaaaccacgtatgccgtcagtgcactggtcgccacctactgtcagagctcgatttaatgcatcgggtaatcgccctagggtcttctcgcctagtcacagacgcgtgtataaactgaccggctcagtgcacaacgacacgacatgcacggcagagatcctacaagaatccaggatgatgatcccagattgccagcgcaggttggaagccgcatatttggatcttcaacggatactagaaaatgaaaaagacttggaagaagctgaggaatataaagaagcacgtttagtactggattcagtgaagttagaagcctga

SEQ ID NO: 22960 - DNA, 639 bp, Homo sapiens
  SIMILAR (235)..(615): 771254mologous to Homo sapiens p40,accession number U93571,Smith-Waterman Score=491.
atgtcaccagcatctgcttctggtgagggcctcatggcagaaggtgaagggagagccagcatgtcacatgtttctttcttatggtctggagagaaagctaattttctaaaacatttttggcttttttataggttggtcaaagaaaaagtgatgtatgaaaaagaggcaaaacaacaagaagaaaagattgaaaaaatgagagctgaagacggtgaaaattatgacattaaaaagcaggatcacaactccttaccagcaagggaacaaagctggatggagaatgagtttgacaaattgacagaagtaggcttcataaggtgggtaataacaaactcctctgagctacgggaggacattctaacccatcgaaaggaagctaagaaccttgaaaaaaatttagacgaatggctaactagaataaccagtgtagagaagtgcttaaaggagctgatggagctgaaaaccaaggctcgagaactacgtgaagaatgcagaagcctcaggagccgatgcgatcaactggaagaaagggtatcagcaatggaagatgaaatgaatgaaatgaagcgagaagggaagtttagagaaaaaagaataaaaagaaatgagcaagcctccaagaaatatgggactatgtga

SEQ ID NO: 22961 - DNA, 675 bp, Homo sapiens
  SIMILAR (135)..(407): 481254mologous to Homo sapiens Human breast tumour-associated protein 44,accession number Y48583,Smith-Waterman Score=152.
cccacgcgtacgtggacgcgtgggcggataccccggctctccgcccaaccttctcgcggcgctcgagggaccatggccgatcctcgcgtgagacagatcaagatcaagaccggcgtgggtgaagcggttggtcagaagaaaaagtgttgtatgaaaaagagccaaaacaaccaagaagaaaagattgaaaaaatgagagctgaagacggtgaaaattatgacattaaaaagcaggcagagatccttacaagaatcccaggatgatgattcccagatttgccagcgcaggtttggaagccgcatatttggatcttcaacggatactagaaaatgaaaaagaccttggaaagaagctgaggaatataaagaagcacgttttagtactggattcagtgaagttagaaagcctgaaacttttctcgtatggggtggtttttgcattaaaaccccgggggcccattttacaatccattatttttgaccatgtgctatgtgttcaagtagtwatgagaatgtgattgttttttatctggttacatatatatttctttgtctaatttaatatgtcaaataaaatgagttcatctaataaaattgtgtattttatactgtaaaaaaaaaaataaaggtgtggcgtatagtgagtcggtcgcgcggccgcaatttagtagtgta

SEQ ID NO: 22962 - DNA, 789 bp, Homo sapiens
  SIMILAR (75)..(356): 1001254mologous to Homo sapiens Protein sequence encoded by clone p199-7 (PL mutet.rsT4),accession number P93369,Smith-Waterman Score=542.
atggctatgctactaccttgccagccccatagtgccatgacactgtgcagtcaggcaccgtgtatgaaatctaacaatgcgctcatcgtcatcctcggcaccgtcaccctggatgctgtaggcataggcttggttatgccggtactgccgggcctcttgcgggatatcgtccattccgacagcatcgccagtcactatggcgtgctgctagcgctatatgcgttgatgcaatttctatgcgcacccgttctcggagcactgtccgaccgctttggccgccgcccagtcctgctcgcttcgctacttggagccactatcgactacgcgatcatggcgaccacacccgtcctgtggatctacccactattgactgtcagctgtccttgctccatgatgctgtttttgacaacggatgttttattgcctttggtgttcattaagaagcttggcgcaaatgttggctttttatcctcgaagaagcctctgtttgtcttgtggcttgggataaccacattgtttgcctttggctttgcggctctgtcgaggtgtcagagtgatatcgacgagtgctctggaaacccttgcctgcacggggccctctgtgagaacacgcacggctcctatcactgcaactgcagccacgagtacaggggacgtcactgcgaggatgctgcgcccaaccagtatgtgtccacgccgtggaacattgggttggcggaaggaattggaatcgttgtgtttgttgcagggatatttttactggtggtggtgtttgttctctgccgttag

SEQ ID NO: 22963 - DNA, 1062 bp, Homo sapiens
  SIMILAR (391)..(606): 981254mologous to Homo sapiens homologue of Drosophila Fat protein,accession number X87241,Smith-Waterman Score=360.
atgggacatggggtgctctctcgggaagaaggcatgatctcaggtggtgcagctctccttaagctagggcatggcctagaaaaggactcagctaggaagtgtgagctgtggatactcccagaagctaggggaggttgtggtcgtaaacgctgctggcgcatttctccccaaagtgtctgtgagttctgggagccttcatttggcaaggactggatccttccccagagactgccttcactgatcacagagccactgaatggggtacaaacgaccagtccctttgcctcaactccccctgagagtgctccctcagcaaagcacgagtaccaagcctctgtctcaggttctgtttctagcaaacctgaaatagaccttcagctctatgatgaggtacgagatcaagatgtgcctgtaaaacgcaactttgcaaggattgtggtcaatgtcagcgacacgaatgaccacgccccgtggttcaccgcttcctcctacaaagggcgggtttatgaatcggcagccgttggctcagttgtgttgcaggtgacggctctggacaaggacaaagggaaaaatgctgaagtgctgtactcgatcgagtcaggctcgcatcctccctataagactgcagctgatgtgctcttgaaagcaccacctcctggctggaggccaaccaacacaaaaccagtgcactcaacagaagcacaaccaacacaaaaccagcgcactcaacagaaacacaaccaaggagcctcacggagtcctcgtcactcctttgctacctccaccagagcaggtgctggtatctgcggctgcaagacccgaagatggatgacaagatggatggaagagtcacggggctctttgcagacactcccaagtaccagactggagcctggtagctccgctgcgtggctagacccagaagagcaagcacagtccctacagttcagctctcaggaagccccattcctaggggaagggggagaaaaccacatcaagggagtcccccatgggacaaaagaatctcaacagcagcccttgaatcacagatcttccctctga

SEQ ID NO: 22964 - DNA, 1227 bp, Homo sapiens
  SIMILAR (178)..(534): 971254mologous to Homo sapiens homologue of Drosophila Fat protein,accession number X87241,Smith-Waterman Score=648.
atggcagcagccaggccttcccccaccggttacccgaccatacgacgaacggcaagaaacaaagaaaacttttcttcagatagttcttacgttcaggcaagaaaaatttcccccgggggaaaactccagggtctcctgttggttcccttggaaatgtatgttggggcacttaaaactgggtatcactgggatacatcagattggatgccaagcgttcctctgccggacatacaagagttccccaactatgaggtgattgatgagcagacacccctgtactcagcagatccaaacgccatcgatacggactattaccttggaggctacgacatccccagtgattttcctccacccccagaagacttcaccgcagctgatgagctaccaccgttaccgcccgaattcagcaatcagtttgaatccatccaccctcctagagacatgcctgccgcgggtagcttgggttcttcatcaagaaaccggcagaggttcaacttgaatcagtatttgcccaatttttatcccctcgatatggggatcctcagaggattttgccgatttcggaaccaccatcaaacaggattttcgcctgctggggcaaaccagcgtggaccgcttgctgcaactctctcagggccaggcggtgaagggcaatcagctgttgcccgtctcactggtgaaaagaaaaaccaccctggcgcccaatacgcaaaccgcctctccccgcgcgttggccgattcattaatgcagctggcacgacaggtttcccgactggaaagcgggcaactgcagctgatgtgctcttgaaagcaccacctcctggctggaggccaaccaacacaaaaccagtgcactcaacagaagcacaaccaacacaaaaccagcgcactcaacagaaacacaaccaaggagcctcacggagtcctcgtcactcctttgctacctccaccagagcaggtgctggtatctgcggctgcaagacccgaagatggatgacaagatggatggaagagtcacggggctctttgcagacactcccaagtaccagactggagcctggtagctccgctgcgtggctagacccagaagagcaagcacagtccctacagttcagctctcaggaagccccattcctaggggaagggggagaaaaccacatcaagggagtcccccatgggacaaaagaatctcaacagcagcccttgaatcccagatcttccctctga

SEQ ID NO: 22965 - DNA, 663 bp, Homo sapiens
  SIMILAR (112)..(474): 871254mologous to Homo sapiens homologue of Drosophila Fat protein,accession number X87241,Smith-Waterman Score=585.
atgcacatgatcatcaaaaagattgtaaatcaagccgcagttctggtgtttacgagtgcacttatggcaggaggagcgactcaagccttcgcgaaagaaaataaccaaaaagcatacaaagaaacaccgtattttgattccaagctaaataagaacatttactcagacataccaccccaggtgcctgtccggcctatttcctacaccccgagtattccaagtgactcaagaaacaatctggaccgaaattccttcgaaggatctgctatcccagagcatcccgaattcagcacttttaaccccgagtctgtgcacgggcaccgaaaagcagtggcggtctgcagcgtggcgccaaacctgcctcccccacccccttcaaactccccttctgacagcgactccatccagaagcctagctgggactttgactatgacaatagagcagaaaggctttgttttgaaaataagccagtgggcttcagcgtgctgcagctggtagtaacagatgaggattcttcccataacggtccacccttcttctttactattgtaactggaaatgatgagaaggcttttgaagttaacccgcaaggagtcctcctgacatcatctgccatcaagaggaaggagaaagatcattacttactgcaggtgaaggtatga

SEQ ID NO: 22966 - DNA, 595 bp, Homo sapiens
  SIMILAR (2)..(313): 991254mologous to Cloning vector pZC320 SopA,accession number U26464,Smith-Waterman Score=528.
cgatccacacctgatgctccgactggccattgaaactgttgctcatgactatgatgtcatagttattgacagcgcgcctaacctgggtatcggcacgagtaatgtcgtatgtgctgctgatgtgctgattgttcccacgcctgctgagttgtttgactacacctccgcactgcagtttttcgatatgcttcgtgatctgctcaagaacgttgatcttaaagggttcgagcctgatgtacgtattttgcttaccaaatacagcaatagtaatggctctcagtccccgtggatggaggagcaaattcgggatgccttggcactcgaagcccacctggataatgacactgtagtttcccctggagaagacgggcgcgttgtcattgacatcggacacatcgatgttcacggtcgtcgtgttgactctgggtggactgccattatcagaagcttgaaccgtggcaactacgacagtcacttcgatgtggacaagggaactggaaccatcattgttgccaaacctcttgatgcagaacagaagtcaaactacaacctcacagtcgaggctacagatggaaccaccactatcctcactcaa

SEQ ID NO: 22967 - DNA, 3952 bp, Homo sapiens
  SIMILAR (1370)..(1699): 1001254mologous to Homo sapiens homologue of Drosophila Fat protein,accession number X87241,Smith-Waterman Score=566.
atggcagcaaggatagaagttattcatgagctcagcatcagattactcctcatgaaaactgatctggatgcagccactgctgcactgctgaatgtccagcctgccaagagtggagataacaccagcggagcaccattccctgggaaaatcagccagacgctgctgaaagatccccacaacggctatcacgttgtgtttgctcttgcgggaagcccgaaagacgctgatgacacatcaatctacatgttttatcaaaaggtcggcgacaactcaatcgacagctggaaaaacgcgggccgtgtctttaaagacagcgataagttcgacgccaacgatccgatcctgaaagatcagacgcaagaatggtccggttctgcaacctttacatctgacggaaaaatccgtttattctacactgactattccggtaaacattacggcaaacaaagcctgacaacagcgcaggtaaatgtgtcaaaatctgatgacacactcaaaatcaacggagtggaagatcacaaaacgatttttgacggagacggaaaaacatatcagaacgttcagcagtttatcgatgaaggcaattatacatccggcgacaaccatacgctgagagaccctcactacgttgaagacaaaggccataaataccttgtattcgaagccaacacgggaacagaaaacggataccaaggcgaagaatctttatttaacaaagcgtactacggcggcggcacgaacttcttccgtaaagaaagccagaagcttcagcagagcgctaaaaaacgcgatgctgagttagcgaacggcgccctcggtatcatagagttaaataatgattacacatttgaaaaaagtaatgaagccgctgatcacttcaaacacggaggaggggccacaatcaaggggagggtggcagataatggaaagcctcagttgtcatctttgacatacattgacattagggtaattgaggagagcatctatccgcctgcgattttgcccctggagattttcatcaccgcttctggagaagaatactcaggtggcgtcattgggaagatccatgccacagaccaggacgtgtatgatactctaacctacagtctcgaccctcagatggacaacctgttctctgtttccagcacagggggcaagctgatagcacacaaaaagctagacatagggcaataccttctcaatgtcagcgtaacagatgggaagttcacgacggtggccgacatcacagtgcatatcagacaagtcacacaggagatgttgaaccacaccatcgcgatccgctttgccaacctcactccggaagaattcgttggtgactactggcgcaacttccagcgagctttacgagaacatcctgggtgtgaggaggaacgacatacagattgttagtttgcagtcctctgaacctcacccacatctggacgtcttactttttgtagagaaaccaggtagtgctcagatctcaacaaaacaacttctgcacaagattaactcttccgtgactgacattgaggaaatcattggagttaggatactgaatgtattccagaaactctgcgcgggactggactgcccctggaagttctgcgatgaaaaggtgtctgtggatgaaagtgtgatgtcaacacacagcacagccagactgagttttgtgactccccgccaccacagggcagcgagacaacaaacggggcccgccattacacaacccggcggacacgtagacaaccgccagaaaatacaactgcgacaaacgttaaacatcagtaactgcaacgccacccgacaagcggggcccccccccaccaacacgacaccccgcgaaggggtgggcgacaattcatatgaccagctggaaaaacgcggggccgtgtctttaagaccagcgataagtttgacggccaacgatccgatcctgaaagatcagacgcaagaatggtccggttctgcaacctttacatctgacggaaaaatccgtttattctacactgactattccgggaaacattacggcaaacaaagcctgacaacagcgcaggtaaatgtgtcaaaatctgatgacacactcaaaatcaacggagtggaagatcacaaaacgatttttgacggagacggaaaaacatatcagaacgttcagcagtttatcgatgaaggcaattatacatccggcgacaaccatacgctgagagaccctcactacgttgaagacaaaggccataaataccttgtattcgaagccaacacgggaacagaaaacggataccaaggcgaagaatctttatttaacaaagcgtactacggcggcggcacgaacttcttccgtaaagaaagccagaagcttcagcagagcgctaaaaaacgcgatgctgagttagcgaacggcgccctcggtatcatagagttaaataatgattacacattgaaaaaagtaatgaagccgctgatcacttcaaacacggtaactgatgaaatcgagcgcgcgaatgttttcaaaatgaacggcaaatggtacttgttcactgattcacgcggttcaaaaatgacgatcgatgggtgtggtgtggacggtgtgtcccaggaacagggtgtggtgtggacggtgtgtcccacgaacagggtgtggtgtggacggtgtgtcccacgaacagggtgtggtgtggacggtgtgtcccacgaacaggaaagtggcagctttaccaagccgatgcagaaaaatttgctgcaaaattttgcgctgggcgatcgaaaaatatttcacgtaagattattacccgctgaatcaacaccgccaaattgcttaaatcagttgttgctctttatcgtcaccccggtgaactatctgcccggtcaggctttgcagaactttcagcggtataccggcatacagcatgtgcatcgcataggaatggcggaacgtatgtggtgtgaccggaacagagaacgtcacaccgtcagcagcagcggcggcaaccgcctccccaatccaggtcctgaccgttctattcatcatggaaggctgcagtacaagtttgactgtggaagtggccctggaattgtctctgttcagagcattcaggtcaatgatgggcagtggcacgcagtggccctggaagtgaatggaaactatgctcgcttggttctagaccaagttcatactgcatcgggcacagccccagggactctgaaaaccctgaacctggataactatgtgtttttggtggccacatccgtcagcagggaacaaggcatggaagaagtcctcaagttgaacgttcagcagtttatcgatgaaggcaattatacatccggcgacaaccatacgctgagagaccctcactacgttgaagacaaaggccataaataccttgtattcgaagccaacacgggaacagaaaacggataccaaggcgaagaatctttatttaacaaagcgtactacggcggcggcacgaacttcttccgtaaagaaagccagaagcttcagcagagcgctaaaaaacgcgatgctgagttagcgaacggcgccctcggtatcatagagttaaataatgattacacattgaaaaaagtaatgaagccgctgatcacttcaaacacggtaactgatgaaatcgagcgcgcgaatgttttcaaaatgaacggcaaatggtacttgttcactgattcacgcggttcaaaaatgacgatcgatggtattaactcaaacgatatttacatgcttggttatgtatcaaactctttaaccggcccttacaagccgctgaacaaaacagggcttgtgctgcaaatgggtcttgatccaaacgatgtgacattcacttactctcacttcgcagtgccgcaagccaaaggggatcctctagagtcgcaatgcagtatgcaagccaaatacagtgtgtcagggaggaaaactcttattacacccctatag

SEQ ID NO: 22968 - DNA, 13960 bp, Homo sapiens
  SIMILAR (187)..(13584): 991254mologous to Homo sapiens homologue of Drosophila Fat protein,accession number X87241,Smith-Waterman Score=23122.
ctgggcggccgggcgcggggagagggcgcgggagcggctcgtgcggcaggtaccatgcggacgcgcgagcccggcgaggccccggcaggcccgtccctgctcgggggcgcgctgagacggcgggtgagctccacgagagcgccgtcgccacttcgggccaactttgcgattcccgacagttaagcaatggggagacatttggctttgctcctgcttctgctccttctcttccaacattttggagacagtgatggcagccaacgacttgaacagactcctctgcagtttacacacctcgagtacaacgtcaccgtgcaggagaactctgcagctaagacttatgtggggcatcctgtcaagatgggtgtttacattacacatccagcgtgggaagtaaggtacaaaattgtttccggagacagtgaaaacctgttcaaagctgaagagtacattctcggagacttttgctttctaagaataaggaccaaaggaggaaatacagctattcttaatagagaagtgaaggatcactacacattgatagtgaaagcacttgaaaaaaatactaatgtggaggcgcgaacaaaggtcagggtgcaggtgctggatacaaatgacttgagaccgttattctcacccacctcatacagcgtttctttacctgaaaacacagctataaggaccagtatcgcaagagtcagcgccacggatgcagacataggaaccaacggggaattttactacagttttaaagatcgaacagatatgtttgctattcacccaaccagtggtgtgatagtgttaactggtagacttgattacctagagaccaagctctatgagatggaaatcctcgctgcggaccgtggcatgaagttgtatgggagcagtggcatcagcagcatggccaagctaacggtgcacatcgaacaggccaatgaatgtgctccggtgataacagcagtgacattgtcaccatcagaactggacagggacccagcatatgcaattgtgacagtggatgactgcgatcagggtgccaatggtgacatagcatctttaagcatcgtggcaggtgaccttctccagcagtttagaacagtgaggtcctttccagggagtaaggagtataaagtcaaagccatcggtgacattgattgggacagtcatcctttcggctacaatctcacactacaggctaaagataaaggaactccgccccagttctcttctgttaaagtcattcacgtgacttctccacagttcaaagccgggccagtcaagtttgaaaaggatgtttacagagcagaaataagtgaatttgctcctcccaacacacctgtggtcatggtaaaggccattcctgcttattcccatttgaggtatgtttttaaaaggacacctggaaaagctaaattcagtttaaattacaacactggtctcatttctattttagaaccagttaaaagacagcaggcagcccattttgaacttgaagtaacaacaagtgacagaaaagcgtccaccaaggtcttggtgaaagtcttaggtgcaaatagcaatccccctgaatttacccagacagcgtacaaagctgcttttgatgagaacgtgcccattggtactactatcatgagcctgagtgccgtagaccctgatgagggtgagaatgggtacgtgacatacagtatcgcaaatttaaatcatgtgccgtttgcgattgaccatttcactggtgccgtgagtacgtcagaaaacctggactacgaactgatgcctcgggtttatactctgaggattcgtgcatcagactggggcttgccgtaccgccgggaagtcgaagtccttgctacaattactctcaataacttgaatgacaacacacctttgtttgagaaaataaattgtgaagggacaattcccagagatctaggcgtgggagagcaaataaccactgtttctgctattgatgcagatgaacttcagttggtacagtatcagattgaagctggaaatgaactggatttgtttagtttaaaccccaactcgggggtattgtcattaaagcgatcgctaatggatggcttaggtgcaaaggtgtctttccacagtctgagaatcacagctacagatggagaaaattttgccacaccattatatatcaacataacagtggctgccagtcacaagctggtaaacttgcagtgtgaagagactggtgttgccaaaatgctggcagagaagctcctgcaggcaaataaattacacaaccagggagaggtggaggatattttcttcgattctcactctgtcaatgctcacataccgcagtttagaagcactcttccgactggtattcaggtaaaggaaaaccagcctgtgggttccagtgtaattttcatgaactccactgaccttgacactggcttcaatggaaaactggtctatgctgtttctggaggaaatgaggatagttgcttcatgattgatatggaaacaggaatgctgaaaattttatctcctcttgaccgtgaaacaacagacaaatacaccctgaatattaccgtctatgaccttgggataccccagaaggctgcgtggcgtcttctacatgtcgtggttgtcgatgccaatgataatccacccgagtttttacaggagagctattttgtggaagtgagtgaagacaaggaggtacatagtgaaatcatccaggttgaagccacagataaagacctggggcccaacggacacgtgacgtactcaattcttacagacacagacacattttcaattgacagcgtgacgggtgttgttaacatcgcacgccctctggatcgagagctgcagcatgagcactccttaaagattgaggccagggaccaagccagagaagagcctcagctgttctccactgtcgttgtgaaagtatcactagaagatgttaatgacaacccacctacatttattccacctaattatcgtgtgaaagtccgagaggatcttccagaaggaaccgtcatcatgtggttagaagcccacgatcctgatttaggtcagtctggtcaggtgagatacagccttctggaccacggagaaggaaacttcgatgtggataaactcagtggagcagttaggatcgtccagcagttggactttgagaagaagcaagtgtataatctcactgtgagggccaaagacaagggaaagccagtttctctgtcttctacttgctatgttgaagttgaggtggttgatgtgaatgagaacctgcacccacccgtgttttccagctttgtggaaaaggggacagtgaaagaagatgcacctgttggttcattggtaatgacggtgtcggctcatgatgaggacgccggaagagatggggagatccgatactccattagagatggctctggcgttggtgttttcaaaataggtgaagagacaggtgtcatagagacgtcagatcgactggaccgtgaatcgacctcccattattggctaacagtctttgcaaccgatcagggtgtcgtgcctctttcatcgttcatagagatctacatagaggttgaggatgtcaatgacaatgcaccacagacatcagagcctgtttattacccagaaatcatggaaaattctcctaaagatgtatctgtggtccagatcgaggcatttgatccagattcgagctctaatgacaagctcatgtacaaaattacaagtggaaatccacaaggattcttttcaatacatcctaaaacaggtctcatcacaactacgtcaaggaagctagaccgagaacagcaagatgaacacatattagaggttactgtgacagacaatggtagtccccccaaatcaaccattgcaagagtcattgtgaaaatccttgatgaaaatgacaacaaacctcagtttctgcaaaagttctacaaaatcagactccctgagcgggaaaagccagaccgagaaagaaatgccagacgggagccgctctatcgcgtcatagccaccgacaaggatgagggccccaatgcagaaatctcctacagcatcgaagacgggaatgagcatggcaaatttttcatcgaaccgaaaactggagtggtttcgtccaagaggttttcagcagctggagaatatgatattctttcaattaaggcagttgacaatggtcgccctcaaaagtcatcaaccaccagactccatattgaatggatctccaagcccaaacagtccctggagcccatttcatttgaagaatcattttttacctttactgtgatggaaagtgaccccgttgctcacatgattggagtaatatctgtggagcctcctggcatacccctttggtttgacatcactggtggcaactacgacagtcacttcgatgtggacaagggaactggaaccatcattgttgccaaacctcttgatgcagaacagaagtcaaactacaacctcacagtcgaggctacagatggaaccaccactatcctcactcaggtattcatcaaagtaatagacacaaatgaccatcgtcctcagttttctacatcaaagtatgaagttgttattcctgaagatacagcgccagaaacagaaattttgcaaatcagtgctgtggatcaggatgagaaaaacaaactaatctacactctgcagagcagtagagatccactgagtctcaagaaatttcgtcttgatcctgcaaccggctctctctatacttctgagaaactggatcatgaagctgtttcaccagcacacctcacggtcatggtacgagatcaagatgtgcctgtaaaacgcaactttgcaaggattgtggtcaatgtcagcgacacgaatgaccacgccccgtggttcaccgcttcctcctacaaagggcgggtttatgaatcggcagccgttggctcagttgtgttgcaggtgacggctctggacaaggacaaagggaaaaatgctgaagtgctgtactcgatcgagtcaggaaatattggaaatattggaaattcttttatgattgatcctgtcttgggctctattaaaactgccaaagaattagatcgaagtaaccaagcggagtatgatttaatggtaaaagctacagataagggcagtccaccaatgagtgaaataacttctgtgcgtatctttgtcacaattgctgacaacgcctctccgaagtttacatcaaaagaatattctgttgaacttagtgaaactgtcagcattgggagtttcgttgggatggttacagcccatagtcaatcatcagtggtgtatgaaataaaagatggaaatacaggtgatgcttttgatattaatccacattctggaactatcatcactcagaaagccctggactttgaaactttgcccatttacacattgataatacaaggaactaacatggctggtttgtccactaatacaacggttctagttcacttgcaggatgagaatgacaacgcgccagtttttatgcaggcagaatatacaggactcattagtgaatcagcctcaattaacagcgtggtcctaacagacaggaatgtcccactggtgattcgagcagctgatgctgataaagactcaaatgctttgcttgtatatcacattgttgaaccatctgtacacacatattttgctattgattctagcactggtgctattcatacagtactaagtctggactatgaagaaacaagtatttttcactttaccgtccaagtgcatgacatgggaaccccacgtttatttgctgagtatgcagcgaatgtaacagtacatgtaattgacattaatgactgcccccctgtgtttgccaagccattatatgaagcatctcttttgttaccaacatacaaaggagtaaaagtcatcacagtaaatgctacagatgctgattcaagtgcattctcacagttgatttactccatcaccgaaggcaacatcggggagaagttttctatggactacaagactggtgctctcactgtccaaaacacaactcagttaagaagccgctacgagctaaccgttagagcttccgatggcagatttgccggccttacctctgtcaaaattaatgtgaaagaaagcaaagaaagtcacctaaagtttacccaggatgtctactctgcggtagtgaaagagaattccaccgaggccgaaacattagctgtcattactgctattgggagtccaatcaatgagcctttgttttatcacatcctcaacccagatcgcagatttaaaataagccgcacttcaggggttctgtcaaccactggcacgcccttcgatcgtgagcagcaggaggcgtttgatgtggttgtagaagtgatagaggaacataagccttctgcagtggcccacgttgtcgtgaaggtcattgtagaagaccaaaatgataatgcgccggtgtttgtcaaccttccctactacgccgttgttaaagtggacactgaggtgggccatgtcattcgctatgtcactgctgtagacagagacagtggcagaaacggggaagtgcattactacctcaaggaacatcatgaacactttcaaattggacccttgggtgaaatttcactgaaaaagcaatttgagcttgacaccttaaataaagaatatcttgttacagtggttgcaaaagatggagggaacccggccttttcagcggaagttatcgttccgatcactgtcatgaataaagccatgcctgtgtttgaaaaacctttctacagtgcagagattgcagagagcatccaggtgcacagccctgtggtccacgtgcaggctaacagcccggaaggcctgaaagtgttctacagcatcacagacggagaccctttcagccagttcactattaacttcaatactggagttatcaatgtcatagctcctctggactttgaggcccacccggcatataagctgagcatacgcgcaactgactccttgacgggcgctcatgctgaagtatttgtggacatcatagtagacgacatcaatgataaccctcctgtgtttgctcagcagtcttatgcggtgaccctgtctgaggcatctgtaattggaacgtctgttgttcaagttagagccaccgattctgattcagaaccaaatagaggaatctcataccagatgtttgggaatcacagcaagagtcatgatcattttcatgtagacagcagcactggcctcatctcactactcagaaccctggattacgagcagtcccggcagcacacgatttttgtgagggcagttgatggtggtatgcccacgctgagcagtgatgtgattgtcacggtggacgttaccgacctcaatggtaatccaccactctttgaacaacagatttatgaagccagaattagcgagcacgcccctcatgggcatttcgtgacctgtgtaaaagcctatgatgcagacagttcagacatagacaagttgcagtattccattctgtctggcaatgatcataaacattttgtcattgacagtgcaacagggattatcaccctctcaaacctgcaccggcacgccctgaagccattttacagtcttaacctgtcagtgtctgatggagtttttagaagttccacccaggttcatgtaactgtaattggaggcaatttgcacagtcctgctttccttcagaacgaatatgaagtggaactagctgaaaacgctcccctacataccctggtgatggaggtgaaaactacggatggggattctggtatttatggtcacgttacttaccatattgtaaatgactttgccaaagacagattttacataaatgagagaggacagatatttactttggaaaaacttgatcgagaaaccccggcggagaaagtgatctcagtccgtttaatggctaaggatgctggaggaaaagttgctttctgcaccgtgaatgtcatccttacagatgacaatgacaatgcaccacaatttcgagcaaccaaatacgaagtgaatatcgggtccagtgctgctaaagggacttcagtcgtaaagtctgcaagtgatgccgatgagggctccaatgccgacatcacctatgccattgaagcagactctgaaagtgtaaaagagaatttggaaattaacaaactgtccggcgtaatcactacaaaggagagcctcattggcttggaaaatgaattcttcactttctttgttagagctgtggataatgggtctccatcaaaagaatctgttgttcttgtctatgttaaaatccttccaccggaaatgcagcttccaaaattttcagaacctttctatacctttacagtgtcagaggacgtgcctgttggaacagagatagatctcatccgagcagaacatagtgggactgttctttacagcctggtcaaagggaatactccagaaagcaatagggatgagtcctttgtgattgacagacagagcgggagactgaagttggagaagagtcttgatcatgagacaactaagtggtatcagttttccatactggccaggtgcactcaagatgaccatgagatggtggcttctgtagatgttagtatccaagtgaaagatgcaaatgacaacagcccggtctttgaatctagtccatatgaggcattcattgttgaaaacctgccagggggaagtagagtaattcagatcagggcatctgatgctgactcaggaaccaacggccaagttatgtatagcctggatcagtcacaaagtgtggaagtcattgaatcctttgccattaacatggaaacaggctggattacaactttaaaggaacttgaccatgaaaagagagacaattaccagattaaagtggttgcatcagatcatggtgaaaagatccagctatcctccacagccattgtggatgttaccgtcaccgatgtcaacgatagtccaccacgattcacggccgagatctataaagggactgtgagtgaggatgacccccaaggtggggtgattgccatcttaagtaccacggatgctgattctgaagagatcaacagacaagttacatatttcataacaggaggggatcctttaggacagtttgccgttgaaactatacagaatgaatggaaggtatatgtgaagaaacctctagacagggaaaaaagggacaattaccttcttactatcacggcaactgatggcaccttctcatcaaaagcgatagttgaagtgaaagttctggatgcaaatgacaacagtccagtttgtgaaaagactttatattcagacactattcctgaagacgtccttcctggaaaattgatcatgcagatctctgctacagacgcagacatccgctctaacgctgaaattacttacacgttattgggttcaggtgcagaaaaattcaaactaaatccagacacaggtgaactgaaaacgtcaaccccccttgatcgtgaggagcaagctgtttatcatcttctcgtcagggccacagatggaggaggaagattctgccaagccagtattgtcgtcacgctagaagatgtgaacgataacgcccccgaattctctgccgatccttatgccatcaccgtgtttgaaaacacagagccgggaacgctgctgacaagagtgcaggccacagatgccgacgcaggattaaatcggaagattttatactcactgattgactctgctgatgggcagttctccattaacgaattatctggaattattcagttagaaaaacctttggacagagaactccaggcagtatacaccctctctttgaaagctgtggatcaaggcttgccaaggaggctgactgccactggcactgtgattgtatcagttcttgacataaatgacaacccccctgtgtttgagtaccgtgaatatggtgccaccgtgtctgaggacattcttgttggaactgaagttcttcaagtgtatgcagcaagtcgggatattgaagcaaatgcagaaatcacctactcaataataagtggaaatgaacatgggaaattcagcatagattctaaaacaggggccgtatttatcattgagaatctggattatgagagctctcatgagtattacctaacagtagaggccactgatggaggcacgccttcactgagcgacgttgccactgtgaacgttaatgtaacagatatcaacgataatacccctgtgttcagccaagacacctacacgacagtcatcagtgaagatgccgttcttgagcagtctgtcatcacggttatggccgatgatgccgatggaccttccaacagccacatccactactcaattatagatggcaaccaaggaagctcgttcacaattgaccccgtcaggggagaagtcaaagtgaccaaacttctcgaccgagaaacgatttcaggttacacgctcacggttcaagcttctgataatggcagtccacccagagtcaacacgacgaccgtgaacatcgatgtgtccgatgtcaatgacaacgcgcccgtcttctccaggggaaactacagtgtcattatccaggaaaataagccagtgggcttcagcgtgctgcagctggtagtaacagatgaggattcttcccataacggtccacccttcttctttactattgtaactggaaatgatgagaaggcttttgaagttaacccgcaaggagtcctcctgacatcatctgccatcaagaggaaggagaaagatcattacttactgcaggtgaaggtggcagataatggaaagcctcagttgtcatctttgacatacattgacattagggtaattgaggagagcatctatccgcctgcgattttgcccctggagattttcatcacctcttctggagaagaatactcaggtggcgtcattgggaagatccatgccacagaccaggacgtgtatgatactctaacctacagtctcgaccctcagatggacaacctgttctctgtttccagcacagggggcaagctgatagcacacaaaaagctagacatagggcaataccttctcaatgtcagcgtaacagatgggaagttcacgacggtggccgacatcacagtgcatatcagacaagtcacacaggagatgttgaaccacaccatcgcgatccgctttgccaacctcactccggaagaattcgttggtgactactggcgcaacttccagcgagctttacggaacatcctgggtgtgaggaggaacgacatacagattgttagtttgcagtcctctgaacctcacccacatctggacgtcttactttttgtagagaaaccaggtagtgctcagatctcaacaaaacaacttctgcacaagattaactcttccgtgactgacattgaggaaatcattggagttaggatactgaatgtattccagaaactctgcgcgggactggactgcccctggaagttctgcgatgaaaaggtgtctgtggatgaaagtgtgatgtcaacacacagcacagccagactgagttttgtgactccccgccaccacagggcagcggtgtgtctctgcaaagagggaaggtgcccacctgtccaccatggctgtgaagatgatccgtgccctgagggatccgaatgtgtgtctgatccctgggaggagaaacacacctgtgtctgtcccagcggcaggtttggtcagtgcccagggagttcatctatgacactgactggaaacagctacgtgaaataccgtctgacggaaaatgaaaacaaattagagatgaaactgaccatgaggctcagaacatattccacgcatgcggttgtcatgtatgctcgaggaactgactatagcatcttggagattcatcatggaaggctgcagtacaagtttgactgtggaagtggccctggaattgtctctgttcagagcattcaggtcaatgatgggcagtggcacgcagtggccctggaagtgaatggaaactatgctcgcttggttctagaccaagttcatactgcatcgggcacagccccagggactctgaaaaccctgaacctggataactatgtgttttttggtggccacatccgtcagcagggaacaaggcatggaagaagtcctcaagttggtaatggtttcaggggttgtatggactccatttatttgaatgggcaggagctccctttaaacagcaaacccagaagctatgcacacatcgaagagtcggtggatgtatctccaggctgcttcctgacggccacggaagactgcgccagcaacccttgccagaatggaggcgtttgcaatccgtcacctgctggaggttattactgcaaatgcagtgccttgtacatagggacccactgtgagataagcgtcaatccgtgttcctccaacccatgcctctatgggggcacgtgtgttgtcgacaacggaggctttgtttgccagtgtagaggattatatactggtcagaggtgtcagcttagtccatactgcaaagatgaaccctgtaagaatggcggaacatgctttgacagtttggatggcgccgtttgtcagtgtgattcgggttttaggggagaaaggtgtcagagtgatatcgacgagtgctctggaaacccttgcctgcacggggccctctgtgagaacacgcacggctcctatcactgcaactgcagccacgagtacaggggacgtcactgcgaggatgctgcgcccaaccagtatgtgtccacgccgtggaacattgggttggcggaaggaattggaatcgttgtgtttgttgcagggatatttttactggtggtggtgtttgttctctgccgtaagatgattagtcggaaaaagaagcatcaggctgaacctaaagacaagcacctgggacccgctacggctttcttgcaaagaccgtattttgattccaagctaaataagaacatttactcagacataccaccccaggtgcctgtccggcctatttcctacaccccgagtattccaagtgactcaagaaacaatctggaccgaaattccttcgaaggatctgctatcccagagcatcccgaattcagcacttttaaccccgagtctgtgcacgggcaccgaaaagcagtggcggtctgcagcgtggcgccaaacctgcctcccccacccccttcaaactccccttctgacagcgactccatccagaagcctagctgggactttgactatgacacaaaagtggtggatcttgatccctgtctttccaagaagcctctagaggaaaagccttcccagccatacagtgcccgggaaagcctgtctgaagtgcagtccctgagctccttccagtccgaatcgtgcgatgacaatgggtatcactgggatacatcagattggatgccaagcgttcctctgccggacatacaagagttccccaactatgaggtgattgatgagcagacacccctgtactcagcagatccaaacgccatcgatacggactattaccctggaggctacgacatcgaaagtgattttcctccacccccagaagacttccccgcagctgatgagctaccaccgttaccgcccgaattcagcaatgcagtttgaatccatccaccctcctagagacatgcctgccgcgggtagcttgggttcttcatcaagaaaccggcagaggttcaacttgaatcagtatttgcccaatttttatcccctcgatatgtctgaacctcaaacaaaaggcactggtgagaatagtacttgtagagaaccccatgccccttacccgccagggtatcaaagacacttcgaggcgcccgctgtcgagagcatgcccatgtctgtgtacgcctccaccgcctcctgctctgacgtgtcagcctgctgcgaagtggagtccgaggtcatgatgagtgactatgagagcggggacgacggccacttcgaagaggtgacgatcccgcccctggattcccagcagcacacggaagtctga

SEQ ID NO: 22969 - DNA, 435 bp, Homo sapiens
  SIMILAR (242)..(322): 461254mologous to Bos taurus zinc transporter 4,accession number AF103904,Smith-Waterman Score=60.
  misc_feature (1)...(435): n = a,t,c or g
gcgaagatgggttccttagctctccaattgccangattttccctccccattcatcatgagggagtttctcaaacccaggagtttatatttattttttagaaaaatacacacttttcaggagaaacctgagcatgattttggantctccacnctccccccagtctctgcacccgggattcagctcaagggattcagtgtcttcatttttacaaaagttcccccaagaaatcagcaaccagcctctgtttcatctgggagcccctcccttggccccctgtgtggattttcaggaagagcctccctttctttgcgtctccctttctttaattaacattttcaaaagtaataaattcttactgacgacttgtaacttagtcatattttatacttgtagcctttaataaagaccatttaaaaaatgaaaaaaaaaaaaaa

SEQ ID NO: 22970 - DNA, 2720 bp, Homo sapiens
  SIMILAR (406)..(471): 361254mologous to Lycopersicon esculentum extensin (class II),accession number X55686,Smith-Waterman Score=41.
  misc_feature (1)...(2720): n = a,t,c or g
tcaatattgccagatttttttcttttttggtagaaccagatatatatgctattttcagtgatttgataacagaagttttccatttggaatttttaaggtctgttaaataattcaggagatcttgtaaataaaacttctgttcccaagctccacccaactttccccctcctcaaagggatgtgtttcaaccatgtcacaaaaatccatataagggatttccatctccttcttccattattccccttcccccctccgctttttaccgtaatgggttccttttggtgggtgattgagggtgatgttatcagccatgacatcagcatgctgggctgtgaccccggaaagactggcccccagcgacgttctcagccagcgctcgcagctgtccggggcttctctgggcagaagccatgtctctcacatcaatgtgcccagcctccaccctcaacgccatttccaggggaacagactgcgggtatgtaggcagtgtagtcttttaacctgctctggattacatatttcagagtatgggattgttgtttaaaaagagttgtatgtttaaaagaagttttgtactaagcttttcaattattttgtatctagattatcaacaatgggggctaccactttccttggttttatatccatttcctcttgggaagttcttgttgcttatgtgacctgttggttggttncccggactgggcacctgcaggagtcagggcagacgggcagatgttggctggaggtcagggctcttctgcttagttgtgttagagtcttccagcatgggactgatgggagcagtgggcattctttatcccaagggctagccaggttgcgtcatgacggaccttccccagccctgaccaccaccagaagtggaagagtggagtttgcggtcaactcagcagtgcccatggagacctgcgtggtgtcagagcagcagcatctcttggagctggtgcagacaccaaggctgcccagtggtacaacgtggtccacctcccctagggaagctgctgcactcagaggctgtcctgcccagtggcccctgagccgtgtgagcctgcaggaggcgtttgagcagagcctcaagcccggtatggcgccatctccatgttgccatcactgcgttctcacctgaagccttaatctttgcgacacctgccagtgagcgctcggtttcaataccaaagtgtgtcttcttctttttttttttttttttaaatgcctgtttcataggaccttctgaaatggatttccagaatattttatctgggctccaaaataaaggcacatagcaactcacctcaacccctcatcatctccagggaaagtttcttgccaaagctgtggcatagccaacttttgatttggttcttgccaattgttttatgtccctaaacctcatttggatccttggggtatagttttatctttctgcttcagtgatttactgtaacttttcaaatattggttctttgcgctaccatttaagtatagttgatatatgtgagggcaaaaaaagggtttcagcatgggtgggtgaggggaaaaagggagcttaggaaatcccagttggggcacagcctgggggcaagcgccagttccccctcagggcttaacgggcactgtttcacacagggatcctcaggaatcagccgggccacctgcctccaccttctgcctgggagggcatgggggctgttgtaggaacctatggtaggcaaatgtatatgtatgagtttgtattctgtagtgttggtgtagcacagaagaaagacctgtgtcctagagagtaggccaaggtgatctgcctcttctattgggagaaattctaatttctttcccactttctcaacaagcccaatattccctccaagttcttcttgggtgctgagggctgtaggaattattgaaagccctctgcctcacttagtatcctctggggcccagcacccagcaataactctaaataatgtttccttaatggtatagccctcctgagattaaaatggtaaaatcaaaaattaggaaatcttggaagggagtcctcaagttgtattgctttggctgtgcttttgggaagaagggacggcctggaggacacaggctcatgtgtgggtcttcatcctgcctgaccgggcagaatcttcctctaacaccttgggcaaaagtctatgcggaagatgggtttcttaagctctcccatttgccatggattttcctcccaattcatccatgaggggagtttctcaaaaccagggagtttagtatttattttttagaaaaatacaccacttttccaggagaaaacctggagcatggattttgggattcttccacctcccccccagtcctcctgcaccctgggattccagcctcaaggattcagtgtcttccatttttacaaaagttccccccaagaaatcagcaaccaagcctctgtttcaatctggggagcccctccccttgggccccctgggttttgggggtgctgccctactggggaacagcggggggtctgtcacccgtctgagccgcacccccctgtggtggatttcaggaagaagcctccctttctttgcgtctccctttctttaattaacattttcaaaagtaataaattcttactgacgacttgtaacttagtcatattttatacttgtagcctttaataaagccgatttaaaaaatgctaaaaaaaaaaaaaaaaa

SEQ ID NO: 22971 - DNA, 2409 bp, Homo sapiens
  SIMILAR (787)..(1194): 671254mologous to Mus musculus G4,accession number AF109719,Smith-Waterman Score=453.
cccaaggccgcggccccgacgctgggcccgggagcggtccccgcgcacagcgcccggacgcgtaggtcccgaagtaggcccgcgctttgcttcgtaactggggatctctgaggacatcttagttctgaccttgtggaggccgcgtctctgctgcgtgttcgcgggccagtcgggccactttgtagaaatcatagccctctaaatcaagggacgaacgctgctggctggagtttgctggacactttcattccacctcctaacaaagagaattcctattccttgaggtcccttggggcagcagttaaagactacacgatccaggagcacctaggacctggggccaccttcctgcccgctttattggatggagcactgcctccccagtttctgggacaccttggggtgtggccttggtgagtgaaacttggggtgctgcctgctgggaaggaaatccggaaacgcagagaggactctctggtggtgacccaggccttgtcagatctgagattcttggaatctcagattgtgggggtgtggatggtgaatgaatttgggtatgcccccctttaccccagaactgaagaggaagcaaactacttgccacacttgaggctgcatgactattcagagaagggaggagccacttctgaattcagagtaggactgcatcaccaggcaaatacctgttctgagccagaaagactctggcttctgaggagatcctgagagtctgagtagtgccaggaagcagcctcagaatttgggggcccattacacaccccagccatgttcctgcgacggcttggtggctggctacctcgcccttggggccgccggaaaccaatgaggcctgacccgccttacccagaacccagacgggtggacagctcctcggagaattcaggaagtgactgggatagtgccccagaaaccatggaagatgtggggcatcccaagactaaggactcgggggcattgagggtttctagggctgcttccgaaccaagcaaggaggagccccaagttgagcagctagggagcaaaagaatggattccctcaagtgggaccagcctatctctagcactcaagagtctgggagactggaggctggaggggccagtcccaaactcagatgggatcatgtggattcaggtggcaccaggagaccaggggtgtcccctgaagggggactcgagcgtccctgggccaggagccccattggagaaacctggtaggcgtgagaagctgttgggctggctgcggggggaaccaggagctccctcccggtacttggggggcccagaagagtgtctgcagatctccaccaacctgaccctgcatcttctggagctgctggcctctgccctgctggccctgtgctcacgaccactgcgggcagccttggacacactgggcctgcgtggaccgctgggcctctggctacatggcctactgtccttcctggctgccctgcatgggctccatgctgttctgagcctacttactgcccaccctttgcacttcgcctgcctctttggtctcctgcaggccttggtgctggctgtcagcctccgggagcccaatggggatgaggcggccactgactgggagagtgaggggttggagagggaaggtgaggagcagaggggagacccgggaaaggggctgtgaccgtggggtgggggcaaagggtgaagagagtgtgggctttaggagaaaagtgtgaggcatgacccaaattgtaagcatagggacctcagggatggggaagaaacccgagtacgagggtgcagggccccccttcatacacaggagagaacagaactatttagggtggttgtgtttatggacagtgagggcactgctcttggacttcaccagctgttatttttgcttttacttttctcccaccttcagtttttttttttttttccacctccactttttaaaagcaaaaaaaaaaaaaaagtatgatggtggtgaataaagaccaaagggtcctctctacctttgaaaactctcctggggtggaggagaccagggcaggatagacagacctctgcagtaagagagtggttgggaaacccagggtgttccttggatctcaggatctgagccatcgagggaagagtggggctgctaggcaagtggattagggggtctggatagggccccacaggtgacagggagcctgcagggcggatctggtgatcatgggagccagagggagtggggacagtgcaggcagtattggcaggagggccagtgcagaagggctggtagctcaggcagtgtgggggaagcactgaagcctgtagtccccacttgggggctaggggtttgctcactcagcaataaataactgtgtcacatcaaatcctaaatataccactacaaagtgagagtta

SEQ ID NO: 22972 - DNA, 2659 bp, Homo sapiens; identical to SEQ ID NO: 19056
  SIMILAR (40)..(1536): 221254mologous to Sus scrofa gastric mucin,accession number U10281,Smith-Waterman Score=288.

SEQ ID NO: 22973 - DNA, 1880 bp, Homo sapiens
  SIMILAR (1714)..(1809): 591254mologous to Homo sapiens NADH:ubiquinone oxidoreductase B15 subunit,accession number AF044957,Smith-Waterman Score=93.
aacaactttgacctttctacaaaacttctaatagtgtgaaatgtctgaattaatgcttttcacactaggtcagcttaaaaaacttacagttcagctagcctaccccctccttcatcttcctacagcttatttgtagcctggaaagactattttggtgatagcattagaaagggtcctggaaacaaaatacaaagcatgatagagcatatgaaatctgtttctcttcattgggaatactgcatggttctgatggtcacacttgacaatgaagctaaaaacagtccagagaagaatagatgaaaatggcaaaggagaaaaagtggcttctctgacagttagattaggttagattagttagattaagattagaattcctaaataaacagaaagctaattagtgatatgagccttctacattctgaaggatttgaacaagatcattagaattcaaaaaacaccagaaatgaaagatctttcctgaagctgtttaggaatattcatgatatacccttaactgttctagaggaacaaaatgcgtctgtgctccttcacaaaagtccctatggaatttgtttctcaatgtgatccttcttaagttctataactttttgttttcattaattttagggaaaatcctgccttgcttcgttggggcctatgcaaggaacaataaatgtctatcctaaatttcagacccactcctaaaaactcactcatgggagctctgtgtggatttgggcccctcatcttcatttattatattatcaaaactgagagggtaagtattcagaccagatgtttagtatttgagtgataggttcactttctagggaccagctgcagctccttctcttgaagattgccaccagtgcccctcccaccttgggggctgtcctctgccttcccttcctctcttcttttatctttattccttttccagcagggagttaaaacaggaaagttttcagtcacctttgtctatttttgttagttcatttgttttttaaaaagatgatgtttattgggttaagtattagcagaatacataaatcatttagtacgtttcctgtttgcgtgaattctatttatgttggtcacattttgcaaattaatgttaaaacctattaatactctacggacagagaagcacaagctgcctgtgtggggaatagctgccgtcagcagcctgggtatatgattggagagaaagtcaagctgatctttgggcaccaaaccattccacatctgggtacttaaaccctgagcttgcagcccccaggtttgtgttgccacttggagcccactcgtctagctttgtctttaactgggcccatcttgcattcccattaggagttcgtgttatttttgattatctgggtgaatgatctacttaacagaaaggtaagtccacattttcccagaaagtgtttgcattttgctttcaatggaatggttttatgggataatatatttctaatgactaaaatgtgagtaagatgtttttgaataggagcattttcttactgtgtctttagttcctcggattactgtttcttcgcacactccctggggctttagacagtgggattgcaattaggtttggagtgtttcattctgtttgtcagttgtacggtgggttgtgcccaaaatgcagtttttccttaccttttttatttatttatttttatctaatatagccaactggcagaatatattgtctttaatgtacttttttttctgtctttacaggataggaaaaaaaaacttatccaggaaggaaaattggatcggacatttcccctctcatattaagtctggcaatgatgacttatatgtattcctgcctaaataaatcatcttattaatcattaaaaaaaaaa

SEQ ID NO: 22974 - DNA, 939 bp, Homo sapiens
  SIMILAR (313)..(936): 821254mologous to Homo sapiens Na K-ATPase beta-3 subunit,accession number AF005896,Smith-Waterman Score=881.
atgaaccagttctggaatagacagtgctggtggctgcacaacattgtgaatgtgtataacgccactcaatcatacactcaaaatggttacagtagtaaacattttgttatgaaaatcagagattctaaggacgccatgctcttccgcatcaagcaggaaagagaaagaactggaggctcatctgtaaaagattattacggtccaggcctggaagaggcacacatcacgagttcacatcccactggccagaactcagctgcttgggaagctgagcatacagcaacaaggtgccatcttggaatcaaaaagcagccttcaccaaccaaacctgctggtaccttgatcttcgacttcccagctgtgaaaactgtgagaaataagtttgtgttctttataaattacccagtctcagggtacactgaagaccttaagaagtttctaaaaccatatactttagaagaacagaaaaacctcacagtctgtcctgatggagcactttttgaacagaagggtccagtttatgttgcttgtcaatctcccatttcgttacttcaagcatgccgtggtatgaatgatcttgatttcggctattctcaaagaaacccttgtattcttgtgaaaatgaacagaataattggattaaagtctgaaggagtgccaaggatagattgtgtttcgaagaatgaagatataccaaatgtagcagtttatcctcataatggaattatagacttaaaatatttcccatattatggggaaaaactgcatgtggggtatctacagccattggttgctgttcaggtcagctttgctcctaacgatactgggaaagaagtaacagttgaatgcaagattgatggatcagccaaccttaaaagtcaggatgatcgtgacaagtttttgggacgagttatgttcaaaatcacagcatgtgcatag

SEQ ID NO: 22975 - DNA, 625 bp, Homo sapiens
  SIMILAR (250)..(432): 621254mologous to Homo sapiens Na K-ATPase beta-3 subunit,accession number AF005896,Smith-Waterman Score=165.
ggaggagtttgagattagcctgggcagggagaccctgtctctacaaaaaaatttaaaaattagtgggctgtggcggcacgtgcctatagtcccagctacttaggaaactgaggtgggaggattggttgaggcttcaatgagccataattgcaccactgcactgcagcctgggcaacactctcaaaaagaaaatttacagaataagccaattcctggtagagagaagtattaagtttccatagagtttgaattaatatattttccttttattgccaggttgggtatctacagccattggttgctgttcaggtcagctttgctcctaacaacactgggaaagaagtaacagttgagtgcaagattggatggatcagccaacctaaaaagtcagggatgatcgtgacaagtttttggggacgagttatgttccaaaatcacagcaccgtgcatagtatgagtagggtatcttccacagagtaaatgttgtgttgtctggccttcattttgtaacagctggaccttccattctagaattatgagaccaccttggagaaaggtgtgtggtacatgacatctgggttacatcataacgtgcttacagatcatagtggtcagcgtcctctgg

SEQ ID NO: 22976 - DNA, 1424 bp, Homo sapiens
  SIMILAR (46)..(180): 641254mologous to Gallus gallus (Na+,K+)-ATPase-beta-2 subunit,accession number L13208,Smith-Waterman Score=158.
agctcctctcgcccgtccgcgcgcacaccatgacgaagaacgagaagaagtccctcaaccagagcctggccgagtcggaagctcttcatctacaacccgaccaccggagaattcctggggcgcaccgcagcgagctggggtttgatcttgctcttctacctagttttttatgggttccttggctgcactcttctcattcacgatgtgggttatgcttcagactctcaacgatgaggttccaaaataccgtgaccagattcctagcccaggactcatggtttttccaaaaccaagtgaccgcattggaatatacattcagtaggtctgatccaacttcgtatgcagggtacattgaagaccttaagaagtttctaaaaccatatacttttagaagaacagaagaacctcacagtctggtcctgatgggagcactttttgaacagaagggtccagtttatgttgcatgtcagtttccctatttcattacttcaagcatgcagtggtatgaatgatcctgattttggctattctcaaggaaacccttgtattcttgtgaaactgaacagaataattggatttaaagcctgaaggagtgccaaggatagatttgtgtttcaaaagaatgaaggatataccaaatgtagcagtttattcgtcataatggaatgatagacttaaaatatttcccatattatgggaaaaaaactgcaatgtttggggtatctaccagcccattgggttgctggttcaggtcagctttgccccctaacaaccactggggaaagaagtaacagttgaagtgcaaagattgatggatcgagccaacctaaaaaagtccaggatgatccgtgacaaagtttttggggacgagtttatgttccaaatccacagcaccgtgcactagtatgagtaggatatctccacagagtaaaatgttgtgttgtctgtcctccattttgtaaacagctgggaccttccctttctaggattatgagaccaccttgggaggaaaggtgtgtgggtacatggacattggggttacatcataacgttgcttcccagattcatagtggttcagtggtcctctggaagtaactggcctgttgcctctgctgccctttgaaccagtgtacagtcgccagatagggaccggtgaacacctgattccaaacacgtaggatgggggtcttgtcctctttttatgtggtttaattgccaagtgtctaaagcctaataatgccgtgctatgtaaatattttatggatataacaactgtcgatattttgatgtcaacagagttttagggataaaatggtacccggccaacatcaagtgactttatagctgcaagaaatgtggtatgtggagaagttctgtatgtgaggaaggaaaaaaagaaaataaaagtgtgtttgaaaaatatt

SEQ ID NO: 22977 - DNA, 1089 bp, Homo sapiens
  SIMILAR (644)..(928): 351254mologous to Bos taurus NADH dehydrogenase,accession number X63216,Smith-Waterman Score=84.
ttttttttttttttttttttgtacttcaaattatcttcttggtaatttttaatagattttgctaactccttggtaacttttattacttggtaaaacaaaactgatgaaagtggctgacataccggggacgtgagcagaacggcttggccacttccttaacatggccccgggttcacccgctagtccggaactacagtttctctgccacagtgtctgcgcctgtccacttgcaggcattaattttggtgaatatgaagagagttaatataaccagtgtgtcctcttctccatggcagcgcccagggacagacctgcagtgaccaccacctgcccctctctgccaggcccaaccacgggctttcttctcagagctgagctgatgtggccgtctggctgacttgactggggcgcctgaagaggccgcgtcccgaggcatgctgggacctgtagtccgcgtgtctcctgaagccgcgactcgaggagagggaccccgctggccggagggagagggagagacttcgctgggcagatgggacaccgtgtgcagggccgtcatggtagtaggggccgcctgccctcgggagacgcacgcgtgaatgcggagcgggctgagccagtcggcgccggcgcgggcggtccaggcggaggaagcagcgtgcgcggtttttgtggacgctcctggagcgaggcggggggcggcggcgtgccggtggtggtgtgcacaattgagcccccggtatagacagttccccccagctgacccagatccccaggtgttcccagagcgagttccttcagcggactcatgtggttctggattttcttggcgcttttggcatgaccccaaaagaggtgctgggtcactttcccgtatccctgatccttcccagtggacagatggaagaattaaggtatccctcctgatgattgaagacttgaaggtgttagactcagcctcactctgtaacaagaggccaggtgagaatttcaaggattatcgacttcatattggcacattaaagttacaaattaaagtggcttggtcaagaacaaaaaaaaaaaaaaaaaaaaaaaaaaaagtcgtatcga

SEQ ID NO: 22978 - DNA, 453 bp, Homo sapiens
  SIMILAR (16)..(300): 961254mologous to Homo sapiens 5T4 oncofetal antigen,accession number Z29083,Smith-Waterman Score=486.
gttacgattccgacgagcctggctgagttgcaaggtctaccccacattagggttttcctggacaacaatccctgggtctgcgactgccacatggcagacatggtgacctggctcaaggaaacagaggtagtgcagggcaaagaccggctcacctgtgcatatccggaaaaaatgaggaatcgggtcctcttggaactcaacagtgctgacctggactgtgacccgattcttcccccatccctgcaaacctcttatgtcttcctgggtattggttaagccctgataggcgctattttcctccactatagaaacaacggacctttgactataagcagtgaagggggattggcttccttgttatgtaaagattctcggggggttccgttattgtaagaacgacaaacagttgcggatagggatttaccctcttcttttttttggaactgcttcaac

SEQ ID NO: 22979 - DNA, 2338 bp, Homo sapiens
  SIMILAR (339)..(1595): 961254mologous to Homo sapiens 5T4 oncofetal antigen,accession number Z29083,Smith-Waterman Score=2075.
tccctcagaggatccagcgaggggtgccaacaagaggcgaagaggtggcaccagggcggcggcaggaagaggagcgggagcaggagcgcggagcggagcgtcccgacccgccgtgcgtactttctggagggaaggggcgggggaatcggcccctgagggaagcgcccggtggcgagggggttagccaagttccggctgcggcgccactccctcggttccacgagaggaaagttttttttttccagacgcttccgccggctcgcgccctccgggcccagcctcccgagccttcggagcgggcgccgtcccagcccagctccggggaaacgcgagccgcgatgcctggggggtgctcccggggccccgccgccggggacgggcgtctgcggctggcgcgactagcgctggtactcctgggctgggtctcctcgtcttctcccacctcctcggcatcctccttctcctcctcggcgccgttcctggcttccgccgtgtccgcccagcccccgctgccggaccagtgccccgcgctgtggcatgtcgctccgaggcagcgcgcacagtcaagtgcgtctaaccgcaatctgaccgaggtgcccacggacctgcccgcctacgtgcgcaacctcttccttaccggcaaccagctggccgtgctccctgccggcgccttcgcccgccggccgccgctggcggagctggccgcgctcaacctcagcggcagccgcctggacgaggtgcgcgcgggcgccttcgagcatctgcccagcctgcgccagctcgacctcagccacaacccactggccgacctcagtcccttcgctttctcgggcagcaatgccagcgtctcggcccccagtccccttgtggaactgatcctgaaccacatcgtgccccctgaagatgagcggcagaaccggagcttcgagggcatggtggtggcggccctgctggcgggccgtgcactgcaggggctccgccgcttggagctggccagcaaccacttcctttacctgccgcgggatgtgctggcccaactgcccagcctcaggcacctggacttaagtaataattcgctggtgagcctgacctacgtgtccttccgcaacctgacacatctagaaagcctccacctggaggacaatgccctcaaggtccttcacaatggcaccctggctgagttgcaaggtctaccccacattagggttttcctggacaacaatccctgggtctgcgactgccacatggcagacatggtgacctggctcaaggaaacagaggtagtgcagggcaaagaccggctcacctgtgcatatccggaaaaaatgaggaatcgggtcctcttggaactcaacagtgctgacctggactgtgacccgattcttcccccatccctgcaaacctcttatgtcttcctgggtattgttttagccctgataggcgctattttcctcctggttttgtatttgaaccgcaaggggataaaaaagtggatgcataacatcagagatgcctgcagggatcacatggaagggtatcattacagatatgaaatcaatgcggaccccagattaacgaacctcagttctaactcgggatgtctggaggaaatattagaggacagaccaaggacaactctgcatgagatgtagacttaagctttatcccctactaggcttgctccactttcatcctccactatagatacaacggactttgactaaaagcagtgaaggggatttgcttccttgttatgtaaagtttctcggtgtgttctgttaatgtaagacgatgaacagttgtgtatagtgttttaccctcttctttttcttggaactcctcaacacgtatggagggatttttcaggtttcagcatgaacatggggcttcttgctgtctgtctctctctcagtacagttcaaggtgttagcaagtgtacccaccacagataggcatttcaacaaaagctgcctcaacttttttcgagaaaaatacctttattccataaatatccagttttattctcatgtacctaagatgtggagaaaataattgcattccatgaaactgcctgcagacgttagcaggctctttcaaaaataactccatggtgcacaggagcacctgcatccaaagagcatgcttacattttactgttctgcatattacaaaaaataacttgcaacttcataacttctttgacaaagtaaattacttttttgattgcagtttatatgaaaaatgtactgattttttttttaataaactgcatcgagatccaaccgactgaattgttaaaaaaaaaaaaaaataaagattcttaaaagaattaaaaaaa

SEQ ID NO: 22980 - DNA, 994 bp, Homo sapiens
  SIMILAR (608)..(393): 361254mologous to Caenorhabditis elegans coded for by C. elegans cDNA yk120g12.5; Similar to cuticular collagen,accession number U53333,Smith-Waterman Score=92.
  misc_feature (1)...(994): n = a,t,c or g
ccaggagacccatcggctctaccgcctgaagctggaggagctgaccaaacttcagaacaattgcaccagctccatcacgcggcaaaagaagcggctccaggagctggccctcgccctgaagaaatgcaaaccctccctcccagcagaggccgagggggccgcacaggagctggagaaccagatgaaagagcgccaaggcctcttctttgacatggaggcctatttgcctaaaaagaaaggattgtacctgagcctggttctggggaacgtcaacgtcacgctcctgagcaagcaggctaagtttgcctacaaggacgagtatgagaagttcaagctctacctcaccatcatcctcatcctcatcatcttcactatgccgcttcctgctcaactccagggtgacagatgctgccttcaacttcctgctggtctggtactactgcaccctgaccatccgggagagcatcctcatcaacaacggctcccggtggggcagggcgggccctgagggaggggagcatggaatggggtgccagggaccctccgggaaaggcagggaacagggcgctggggggtgatggtgggtcttttgttccagggttcaaaggctggtgggtgttccatcactacgtgtccaccttcctgtcgggagtcatgctgacgtggcccgacggtctcatgtaccagaaattccggaaccaattcctctccttttccatgtaccagagcttcgtgcagtttctccagtactactaccagagcggctgcctctaccgcctgcgggcgctgggcgagcggcacaccatggacctcactgtgggtgagtcgggagtggccctggcatctggacattcccctttcctcccatcccgggtctgagtggtgagcgcccctctgtccctggccgtcctgtgccctgaccttcctccccgcagagggcttccagtcctggatgtggcggngcctcaccttcctgctgccttttttttcttgg

SEQ ID NO: 22981 - DNA, 1273 bp, Homo sapiens
  SIMILAR (11)..(784): 251254mologous to Leishmania major proteophosphoglycan,accession number AJ243459,Smith-Waterman Score= 129.
atggcgccactgcactccatcctgggcaacagagtgggactctgtcaggccagtgtcagggcctgcccgggcgccacagtctccagccagtgccgggcatccctgcggtccaggctggcctggagagggtcagagctgcccgcgaaccggggacgcacgtggcccgggccggggggcctccgcctgcaggccgcccctcgtctggcctacctgggccgagctacgctgctcgttctcacaccctactatgacctaccacccaacgtccgattcactagtatgcctgcatccccacacacgtacttcttggttctcggcgctcccatcttcttactactacgctctacgtggtcgtactatcacgcatgcaggttcgagtatgcaacgccgaatgatcgaaataccacctatctagctatctccggtcctacgaggaggacgtacgacgtagctacgtttgcctacaaggacgagtatgagaagttcaagctctacctcaccatcatcctcatcctcatctccttcacttgccgcttcctgctcaactccagggtgacagatgctgccttcaacttcctgctggtctggtactactgcaccctgaccatccgggagagcatcctcatcaacaacggctcccggcccgacggtctcatgtaccagaaattccggaaccaattcctctccttttccatgtaccagagcttcgtgcagtttctcccagtactactaccagagcggctgcctcctaccgcctgcgggcgctggggcgagcggcacaccatgggacctcactgtggagggcttccagtcctgggatgtggcggggcctcaccttcctgctgccttttctttttctttggacaattctgggcagctttttaacgcgctgacgttgttcaaacctgggcccagggaccctcagttgcaaggagtgggcaggtgcttatgttgcggctttcccttccttctccattttcctcggcaatttcttcaccaccctgagggttgtgcaccacaagtttcacagtcagcggcacgggagcaagaaggatttgaggctggggctttccccttgccggcccagaaggggttttcttgttcctgtgtgtttttgggaaggggattgggaaggcgccccttcgagtgtgcgtgtatcagggggtctcttctattctcccttgggttttatggggcgctgtgggcctggaaaggaagaccctgggcccagttgccctcaattaaagagaaggcccagaggtgaaaaaaaaaa

SEQ ID NO: 22982 - DNA, 398 bp, Homo sapiens
  SIMILAR (380)..(303): 881254mologous to Homo sapiens putative RPE-retinal G protein -coupled receptor,accession number U14910,Smith-Waterman Score=104.
gtgcccagaaggcagaagacagccacacgaagagcaccagagagacggctgagttccaggccagctggctacgggtgcagtagtggtgataacgcccccatgcgatggctgcactgctgcagatgctggccaacgctgtcacaaagccctggaagccgtgagcctggcagccgtccgagccgtagggccagcgccggagaaggctggatgtggctgcaacgagggcattcaggctgatcccactgtccgcaagagccaagctcagcaccagtaggtggcagggagtccgcagctccggggtcttcccccagtagcaccatcccctcagccagcacctcgagctccccgaagccggtgggcaaagcaatggtctctgccatcctcaccggacgcgtggg

SEQ ID NO: 22983 - DNA, 386 bp, Homo sapiens
  SIMILAR (1)..(381): 581254mologous to Saccharomyces cerevisiae MSP1 protein,accession number X68055,Smith-Waterman Score=389.
gaatttattattgctgctcatcttgtagaccctcttaagatgcatgttacttggagtgatatagcaggtttagatgatgtcattacggatctgaaagacacagtcatcttacctatcaaaaagaaacatttgtttgagaattccaggcttctgcagcctccaaaaggtgttcttctctatgggcctccaggctgtggtaaaacgttgattgccaaggccacagccaaagaagcaggctgtcgatttattaaccttcagccttcgacactgaccgataagtggtatggagaatctcagaaattggctgctgctgtcttctcccttgccataaagctacaaccatccatcatctttatagatgaaatagactcctttctacgaaaccg

SEQ ID NO: 22984 - DNA, 580 bp, Homo sapiens
  SIMILAR (31)..(579): 551254mologous to Homo sapiens putative zinc finger protein,accession number AF251039,Smith-Waterman Score=579.
tcaagactatgatgccagcaagatactatagatcttttaaaaagtctgccattgccagaatattgtaatccagaaggaaaattcaatttggcctctcatttgccaggattttttgtacgtcctgatctaggacccaggttgtgcagtgcctatggtgtagttgctgctaaagatcatgatataggaacaacaaatctccatattgaagtttctgatgttgtaaatatactagtttatgttggcatagcaaaaggaaatggcattctctcaaaagcaggaattctcaagaaatttgaggaagaagatttggatgacattttaaggaaaagattgaaggactcaagtgaaatacctggtgctctgtggcatatttatgctgggaaagatgttgacaagataagggaatttcttcaaaagatttcaaaagaacaaggccttgaagttctaccagaacatgatccaatacgtgaccaaagttggtatgtgaacaaaaagctccgtcaaaggctgcttgaagaatatggagtcagaacctgtactcttattcagttccttggggatgctattgttttgccagcgg

SEQ ID NO: 22985 - DNA, 1414 bp, Homo sapiens
  SIMILAR (39)..(914): 1001254mologous to Homo sapiens 16-DEC-1994 Human retinaldehyde binding protein cDNA,accession number Z55843_cd1,Smith-Waterman Score=1527.
agagacagctgggccactggcagtgagggagagtgaggatggcagagaccagtgccctgcccactggcttcggggagctcgaggtgctggctgtggggatggtgctactggtggaagctctctccggtctcagcctcaataccctgaccatcttctctttctgcaagaccccggagctgcggactccctgccacctactggtgctgagcttggctcttgcggacagtgggatcagcctgaatgccctcgttgcagccacatccagccttctccggcgctggccctacggctcggacggctgccaggctcacggcttccagggctttgtgacagcgttggccagcatctgcagcagtgcagccatcgcatgggggcgttatcaccactactgcacccgtagccagctggcctggaactcagccgtctctctggtgctcttcgtgtggctgtcttctgccttctgggcagctctgccccttctgggttggggtcactacgactatgagccactggggacatgctgcaccctggactactccaagggggacagaaacttcaccagcttcctcttcaccatgtccttcttcaacttcgccatgcccctcttcatcacgatcacttcctacagtctcatggagcagaaactggggaagagtggccatctccaggtaaacaccactctgccagcaaggacgctgctgctcggctggggcccctatgccatcctgtatctatacgcagtcatcgcagacgtgacttccatctcccccaaactgcagatggtgcccgccctcattgccaaaatggtgcccacgatcaatgccatcaactatgccctgggcaatgagatggtctgcaggggaatctggcagtgcctctcaccgcagaagagggagaaggaccgaaccaagtgagcctgccaccctggagtgagccccaggccaggaggctgttccaggagtcctgcccagcagcctcagtggccaagcccagacactcacccaccttccccagtggccccgtggatcctggtcctaggctggacacaggattcagaaagacaccaggctgcacagaaagagccagatggacctgagtgtcggtcacagccccctacactcaaggctgagaggcctcaggaaagtcattcctttttaaaaataataataaatgtaagggggtacagtgcagttttgttacatggatagattgcctagtggtgaagtctgggcttttagtgtaaccatcaccctaataatatacgttgtacccattaagttatttctcatccctcaccccctcccaccttgtcacccttctgagtctccaatgtctattattccacactccatgtccacgtgtacacattatttagctcccacttacaagtgagaacatgtggtatttgactttc

SEQ ID NO: 22986 - DNA, 2057 bp, Homo sapiens
  SIMILAR (608)..(670): 711254mologous to Homo sapiens acidic ribosomal phosphoprotein (P1),accession number M17886,Smith-Waterman Score= 65.
cataatgtagaatcagtgggacccctgagctggttttcctgcaactagatggtcccatcccagagcctgtggactggggagggggctggtaccggagaaggctggatgtggctgcaacgagggcattcaggctgatcccactgtccgcaagagccaagctcagcaccagtaggtggcagggagtccgcagctccggggtcttgcagaaagagaagatggtcagggtattgaggtatctggatgatattaattgtacctcaaacttcagcatcatgcaatatacccatgtaacaaacttgcacatgtacccactgaatcgttcccacaactctgagtactgcagacaaataggcaagagggacaggcaagcgtcccattgacctccttcttccaaggctccttctagtaagggaccagccaagattgtctgcatctactgggccctcattctgcaaagcaatgaggtgaccatcacggaggataaattcaataacctcattaaagcagctgctgtaactgtcgagcccttttggcctagcttctttgcaaaagccctggccagtgtcaatatcggcagcctcctttgcaatgcaggggttggtagatggctccagcagcctgcaccgcacaagcaggaggtcctgccacttccaccactgctgcctcagcttctttccgaaaccataacccccggattgcccccaaatttcgaggtgttttggcccacgaacaatatctttccgaaagggccacttgggtttgggcaccaaatccaaaccccaagagcttattttaactctggagcagggaatgcggtccttacccgcttttagaccagggggaaccttggtgccaccccaatcggggcatttttgaaggccctcgccaaaaagaggacccctgtctggctgctgccctgcagaatcctgggaaggaggcagtgccacctgcagcctcgagcggacaaggagagagggtgcatgggagagggctggtccgccggcagcagggtgactgtgcagcacagccagaggggtgcccaatagacactgcgagttaggagaccgcaccgggccagagtgccgctcaccagctgcttttgagagaatgccatttccttttgctatgccaacataaactagtatatttacaacatcagaaacttcaatatggagatttgttgttcctatatcatgatctttagcagcaactacaccttttggaggctgcagaagcctggaattctcaaacaaatgtttctttttgataggtaagatgactgtgtctttcagatccgtaatgacatcatctaaacctgctatatcactccaagtaaccttgcattcttgtttttgagccactggctgactgacactttttgaagatacacattctgatgatgtagaggccaaaatggtatttgataaagaggaaattacttctgaaccaccccagctggaaacactggtagtatcggcagcagatgtgattacatccgttttggtattacacatcgtatttacagcagacatgactgaactgggaacactgccctgtgagacagcctgaaagtttttttcagattttgtgtgaacactgtctgaattcacatttggcaaaatgattcttccagtttctccggcttctgctagtttgaggcaatctgttttatgtgccccagctgaagatctttcactaactcgatctttagaagctaactgcattgctggcatactatcagtttttgtactagaagatggacgcacaatgacagatgccatagcagcctgtaactttccgctgcttttctccacatgccattcagttttctctttgctgaggttattattaggtctccacatctccgtcaaactctgttctgaagaactcttaaaatttgcctgggagtcttttggttcgggtattagagttggaggcttctgtgattcttgaactttaccaccagcatttactggcatcaccggagttaaagttggaggggaaagactactatagctgccttcctttctttccaggctgtgatggattggtgggtg

SEQ ID NO: 22987 - DNA, 963 bp, Homo sapiens
  SIMILAR (1)..(636): 1001254mologous to Homo sapiens KIAA0633 protein,accession number AB014533,Smith-Waterman Score=1090.
atgaaggctcgtgctcccccacctcctggaaaggctgccactctgcatgtgcacagtgaccagaagcccccccacgatggggccctcgggtcgcagcagaacttggttcgcatgaaggaggcgctgagggccagcaccatggacgtcaccgtggtcctgcctagtgggctggagaagaggagcgtgctcaatgggagccatgcgatgatggacctactggttgaactttgccttcagaaccacctgaatccatcccaccatgcccttgaaattcggtcttcagaaacccaacaacctttgagttttaagccaaatactttgattgggaccctgaatgtgcatactgtgtttctgaaagaaaaagttcctgaagagaaggttaagcctggtccccctaaggtgcctgagaaatctgtgcgtttggtcgtgaattacctgcggacacaaaaagctgttgtgcgtgtgagccctgaggttcctctccagaatattctcccagtcatttgtgcaaagtgtgaggtcagcccagagcacgtggttctcctcagggacaacattgccggagaggagctggagctgtccaagtccctgaacgagctcgggataaaggagctctacgcgtgggacaacagaagagccctgaacatgtcctttatcctttgtctccctgcaaacttccacgacataagtaaaaggggaaaagttcgtctgagcaaaactcagtccgagccttccctgagctgtcaagctctgtacctaatagagggcttgctgcaactaactttacagcgcgtttgcacacatgcattggtgctgctgcaccatgttgcagtgggccctctgatttgggtactgtgcgatgtggagcctgctcagtgcctccactggagcctcctgcatgtaaccaagtgtcctggccctgccctggtggctaggatgtgcacctttgctcctacagcgtga

SEQ ID NO: 22988 - DNA, 5289 bp, Homo sapiens
  SIMILAR (2)..(3949): 1001254mologous to Homo sapiens KIAA0633 protein,accession number AB014533,Smith-Waterman Score=6861.
ccagccccttccgtccgccgcgctccgccgctgtcctccgccggcccgcgtgggaggacgatgggtcagcgcggaaaaagtgaatgagggcggcagcggtggcggcggtagccagcgcctgactcggcgggcccggagcaccgcccgcgtcccggcccccggcaccatggacgcgccgcgcgcctcggcggccaagcccccgaccgggaggaagatgaaggctcgtgctcccccacctcctggaaaggctgccactctgcatgtgcacagtgaccagaagcccccccacgatggggccctcgggtcgcagcagaacttggttcgcatgaaggaggcgctgagggccagcaccatggacgtcaccgtggtcctgcctagcgggctggagaagaggagcgtgctcaatgggagccatgcgatgatggacctactggttgaactttgccttcagaaccacctgaatccatcccaccatgcccttgaaattcggtcttcagaaacccaacaacctttgagttttaagccaaatactttgattgggaccctgaatgtgcatactgtgtttctgaaagaaaaagttcctgaagagaaggttaagcctggtccccctaaggtgcctgagaaatctgtgcgtttggtcgtgaattacctgcggacacaaaaagctgttgtgcgtgtgagccctgaggttcctctccagaatattctcccagtcatttgtgcaaagtgtgaggtcagcccagagcacgtggttctcctcagggacaacattgccggagaggagctggagctgtccaagtccctgaacgagctcgggataaaggagctctacgcgtgggacaacagaagagaaacctttaggaaatcatcacttggcaatgatgagacagataaagagaagaaaaaatttctgggatttttcaaagttaataaaagaagcaatagtaagggctgtttaacgacccccaactccccatccatgcactcacgttctcttacgctgggtccatccctctcgctgggcagcatctcaggggtgtccgtgaagtcggagatgaagaagcgccgagcccctcctcctccaggttcagggccacctgtgcaagacaaggcatcggaaaaggtatctcttgggtcacagattgatttacagaagaagaagcggcgagcgccagctccccctccaccacagccaccaccaccgagtcccctgatccccaaccgcactgaggataaggaggagaacaggaagagcacgatggtaagcctgcccctggggtctggcagccactgcagcccggatggagccccgcaggtgctgtcagaggcggaggagaccgtgtcagttggcagctgttttgcgtcggaggacacgaccgaggactcaggagtgatgagttccccctcagacatcgtctctctggactcgcagcaggacagcatgaaatacaaagacaagtgggccacagaccaggaagactgcagtgaccaggacctcgctggaaccccagacctgggtccccagaagagccccttgtgggagaagaatggctctgagaactcacatctgagaactgaaaaagctgtcacagcctcaaatgatgaagaagacctattaattgctggagagttccgtaaaacccttgcagaacttgatgaagacctggaagaaatggaagacagctatgaaacagacaccagctccctcaccagctccatccatggtgcatccaaccactgcccacaggatgccatgatccctcacggcgacacagatgcaatcccagtaacattcataggggaagtttcagatgatcctgtggattcggggttgttttccaatagaaacaacaatgctgggtctttcgactcggagggtgttgccagcaggagagactccctggcgccacttcaagctgagcacagccagccccatgaaaaggcaagggaggaagtacctgccctgcaccccgcttcccatgacgtcggaaaaggaatccgtgtggccttatctaacatctctaaagatgggaatctaatggaaacggcgcccagggtgacttcttttgcttcgaatcttcacacagacaacctaaatgcaaaagtgaaagacaaagtgtatggctgtgctgacggggagaggactcaagccacagagagagtgaattcccaaccggtgaatgaaaaggacagcaacgataaaaacgctgccttggcaccaacatcatggcaccaacgaggccaaaacccagggaaaagctacagacttaagcacggcctcacaacgtataaaatcattcctccaaagtcagagatgcgatgttacgacagagatgtgtccctctccaccggagccattaagattgacgagctggggaacttggtgagtcctcacgccaccggcatcaggatcatttccctgtcttcgtctgtgcctgaagcagaatctcagcccattgggaaagtcagagagttctggaggtgcaactctgtggaaaaacacctgggccgaccctcagagagctctgccaggggacccccctccacccctgtgcccacgcagacgcagaatccagagagcagactccaagcagaccccaagccaatatcgccccagcagaagtctgcccaccatgagggccggaaccccctaggggaggggagaaaccagccccccaccatgggcatgggtcacgtgagggtgccagcagctcacaccacagaagtcacatttctcaagcctcagagaagaacgtccagccagtatgtggcctctgccattgccaagcgcataggagccccaaaagtccatgctgatgtggtgaggccacacggttatgccgagaagggttatgcaggcaaggcgccagtgctggctgcaccacctgtcactgtgaaagatgacaggacatccagcccacactcagagacacaaggatggaaggatggtgcccagtggccctgtgtcactcctcccaacaaccacggggaagatttggcagtgggagcccctcctaggggggaggtcattggcccacacaggaagttgtctactcaggacagacctgctgctatccacagaagctcctgtttctcactggttcagtcttcccagagggatcgtgtttctgtgggacagagctgtggtttcagtggaaagcaaagcacaagtagccaggaggccagctcagcatctgagcccagacgcgcacctgatggtacagacccaccccctccacacacatctgacactcaggcctgcagcagggagctggtcaatggctctgtgcgcgccccaggccacggcgagccttcccaccctccaggagggtctggcacagaaagccacattctcctagaaagagaggaaaagcccagtgtgttctctacagatggaaatgaaacagacagtatttggccacccagcatttttgggccgaagaaaaaattcaaacctgttgtccagagaccagtcccaaaagacacatccctgcactctgccctgatggaagccatccactctgcgggagggaaggacagactacgcaagacggcagaacacaccggggagggcaggccagcgaaactgtcctacacggaggcagagggcgaacgatctgcactgctggcagctatccgcgggcacagcggcacctgcagcctgaggaaggtggcatcctctgcttctgaggagctccagagcttccgagatgccgcactctctgctcagggctcggaaagtcctctgctagaagaccttggtcttctgtccccaccagccattcccccaccaccccctccaccctcccaggctctctctgcaccaaggacggcctccaggttcagcacgggcaccctcagcaacaccgcagacgcaaggcaagccttgatggacgccatccgctccggcacaggggctgcgagactgagaaaggtgcccttgctcgtgtgaatgaacagaggccagagaattgcagaaacccacctgtaatatgcccacaggcgtcactcaaggagtctgcatagccaggaacatcaagttttggtgttactttcttgtctacaggccaaatgcgcacagttgattttcggtgtgttcctgtataacggcttgaaaggaaaggagaagatgctgtgtcgctgcgcagctcgtgtgccaaggaaatgtgttttgcctctgaatatcttaagttgctaataaacgattcttgttggcaggttaatgggactataaatgctggagcccagcactcacacttaattatatttatgggcaaagtaaaaagaatcatgccttagactgattttggacctttgagacttttaccacatacagatggatgaaactacttactgatttaagatcttttgaattttagaaaaaacatatgaatcagatggaacaatctgaatgtgatatgctccatgatgctgtgtgttttggtagtaagaaaaaaaattgggaggcttttcaaaggtggctttgttaggtagtaaaactgctggattcttcttcctcaaatatttggggctaacacttcacagagggtcacagtccatgatctgaccaactaagcttttaaaaatcaactattaccacccagaaaacagtcctacgtgatcatgtggccagggcatgcccgagtcctgcaagggtggcgggtggctgaggtcacaccaccactggagtggatgggcagtgccccacatggacagccattccccaggctatgaagtgacataggcctcccccacggtgcctgtgtacggagcctgatgacttcactgggagccttctggaatcctgcagagggtcaaggagcagggatgttggatgcccacctgtcaagagttcagatcaaagttgcgctgagagcatcacaattttggttcagccttgacgcgtttgtccaacagctcattggctccctttgtatgatatcgtggtcttctcacatggtgcccagtcaccaatatttataatgaggtctaactacagcagtagtttttcatatatatctctaaaacattttgttatattgaaaaaagtaatagaaatcaagatgtgttgatgaaataaaatgtgtatctgagtgagaaaacaagtatggtgaggtcactttaatgtttcacagcgatctcagatctaggcctcaggtagaatggaagctgttctgcattcactgattaacgttgctaaactcttggtgaggcacgagctaccagccaattgctcttcatcacagctatctgtcttttagtgccacaaataaaagaaaatcaaatctt

SEQ ID NO: 22989 - DNA, 1497 bp, Homo sapiens
  SIMILAR (1084)..(1284): 1001254mologous to Homo sapiens KIAA0633; similar to mouse cordon-bleu gene product,accession number AC005535,Smith-Waterman Score=340.
atgggtccaaaagcaggaactcgtcttatgatgtttcctgcagggtttgaaacttggtgtgacccttcccagtctcatgtaaaattcagctcgattgactacttttccactacacacttttctggagcacgtctttcacagcaagtaaggcattcgcctagctcagggcagaggatcacctatctgtatgttgccaaacaccatcctgctctcagcaaataccaagatattagaccctttcaaagcaacatctttgaagcaatgcagaatagagtttctccaattgtacaaagaataaaactaagacaatcagaccctctcagaatgtcaaacaaagagtcaggtggccctgaacctggaggaggaggggctcggcgcttcttcatctccgacttcacggacacccctgagatgctgcccagcgagagggatggacccagcgtaagagaacgagcagacatctccagtctttacagactggttttggcaagtaaggatctactcctagctcaccagactgatgttattgcctctggtatctcagtcaagctgagtttggagtcaggcaggcaggatcctgtgacagtggccacagcagaccgcagaagctcatttccagccaagccagggggagggagagatgcagtgcatggtgcaaacttcatcagggcaggtggaggaggaaaagattctagagccaggttggaaccttccaaattccagacaagcacactgaagcccagatgtgtctgtcagctgacaagacagccatgggatgtggttcccaaagcgagatggaacctgcagcatcagcatcgctgggaacttatgagagatgcgaatgttgggcccactccagacccccagaataagaaacgctggccaccagggcagggccaggacacttggttacatgcaggaggctccagtggaggcactgagcaggctccacatcgcacagtacccaaatcagagggcccactgcaacatagtgcagcagcaccaatgcatgtgtgcaaacgcgctgtaaagttagttgcagcaagccctctattagaaatctgtgcgtttggtcgtgaattactgcggacacaaaaagctgttgtgcgtgtgagccctgaggttcctctccagaatattctcccagtcatttgtgcaaagtgtgaggtcagcccagagcacgtggttctcctcagggacaacattgccggagaggagctggagctgtccaagtccctgaacgagctcgggataaaggagctctacgcgtgggacaacagaagagtgccttctgctgtccctatgcagggaccctggcctgcagaacacttcctgcaggttaatgagcaaccccctgctggctccccatcaccatgcccaagcagcagcagcagcagctctggtctgagaggtggcatgcaaactgcaaatgggcctgcttgtgcccttactcctacctgtgcccagacagactgtccctgcccgacctcgcactga

SEQ ID NO: 22990 - DNA, 528 bp, Homo sapiens
  SIMILAR (93)..(299): 381254mologous to Homo sapiens Ser/Arg-related nuclear matrix protein,accession number AF048977,Smith-Waterman Score=90.
atggagagagcagggctctatcagtgcagtctgatgggtaaggggcctaggcccgagacagtctgcgagcaagtgtgcgtgtatgagcccctgagcccgcccaccctgcaagtgcctggagactcactggggaagctagaaccaggggaggacgattttgttcacggctgtcacacccggcaccaagtgactaaacagacagtagttctgcccttcagccccagcaccggggacgacccgcgctgcgccagcgaaccccgcctcggaggagtccccgcccgggctctcaccgccacgcggcgcgagcccggccagcagacggcgcacctgctcggggagtggccttcggcggagacgagcctccgattggcgcggaggcaatgtacagtaagccatgatgggcagaggcaggaaatacttagagaactggaaagaataaaggagccggtgttctcttcgcagggcccggaattcttcctggcgctcagcaatttggcaatcttgaagaaccggctgaaatcaagatga

SEQ ID NO: 22991 - DNA, 421 bp, Homo sapiens
  SIMILAR (148)..(80): 471254mologous to Catharanthus roseus cytochrome P450,accession number X69784,Smith-Waterman Score=60.
ggcaagcaaaacaaggtcagagttggatggggagatttacaagtttttgaggacttgggctgacaaacttgaagaatggccagagcaaactctcgaggcaggtacacaagttggaaatcagacttctagtcacaagtggcaggcctggaaaccttgacaagtcatctcaagggatgatgtcgaccttggccgtagacaggtctgcattcttgatgtcaaccttggccataggtctgcattcttgtggtctgcccttggccatagacgggtctgcattcttcttgctgtctgccccagtggtgcaaaagtcttagagggggaagaacgtattgaaagctaaaggctttgacaatttatgtgttggtgataagctggtctttgttagcactgtcctagtgaggctgaaggaataagtttctct

SEQ ID NO: 22992 - DNA, 342 bp, Homo sapiens
  SIMILAR (40)..(324): 491254mologous to Homo sapiens PC4,accession number U12979,Smith-Waterman Score=210.
gaaaaactaaaggaacccgatgaacacagtgacacccgcagtttgtcagcaggactcgctagcgatggagcgtctggggaagaagccccacggcggaggaaaaggtacccgagacaacgacacgttatctgggctccgggggttgaagcaccaggcgacgacgcagagaggcgtcgcacgagaagccagtggacctgcgacacggcactccccattgggaaaatgaggtacgttagtgttcgcgattttaaaggcaaagtgctaattgatattagagaatattggatggatcctgaaggtgaaatgaaaccaggaagaaaaggccctcaacaaattggatga

SEQ ID NO: 22993 - DNA, 1020 bp, Homo sapiens
  SIMILAR (217)..(375): 581254mologous to Rattus norvegicus pR-ET2 encoded oncodevelopmental protein (putative); putative,accession number K02816,Smith-Waterman Score=145.
agtgggtattcattcctagcacgttcaaccccaagcaaaacaaggtcagagttggatggggagatttacaagtttttgaggacttgggctgacaaacttgaagaatggccagagcaaactctcgaggcaggttgtgtccaaaatcttagctcggaagatggagacaggatcaggtaccacatggtcttgagtgtaggagccagtctgaatggtcctgcactgatagcagacagcactcttcatcagtactcagactccaggcgccaggaaattgggaaaatgaggtacgttagtgttcgcgattttaaaggcaaagtgctaattgatattagagaatattggatggatctgaagcgcctacctcgaaagccgagaactggagaagcaggttccgggagccttagcagcccgggcgcagacacccccgtggaggctgcagtaacctggcgactgggacttgggagtgtagatgtgggttccttccgagcgtggcagcgtggcaagtccgcagccgttggacacacggtgagtccgaggtggccaagatggcaaggcggtgacagcagcgcattatcgatggcttctctgtccactctcacctgttcctggggccttcgctacagtgcgctgtcccctacgaccagcgcccagagggaggagggatcggcgctataccggcatctcagtccgccttccctcagattctaccctaccgtaaaatgggccacactggcgattacacgtccgcgtccccccgctccccgaagccatagccaccatcctcagcctcgagctctttgtccagtttgggttttattccaacacccaaagacccatggagaaaacttgggggacaggtggaaagaaggttcagcgctcgtttcttcaaaaggcactcccgcaaagcttagctctgggcgcattagaaatgcgttgcagaacactctgggagaagtgagtgtcgccagaattcagacacacaggggcatttttgtggaaaccacagaagctcgtttataa

SEQ ID NO: 22994 - DNA, 751 bp, Homo sapiens
  SIMILAR (100)..(432): 611254mologous to Homo sapiens PC4,accession number U12979,Smith-Waterman Score=292.
gcccctattgagtgtggcggaattccgtcacttccggttctctgtcagtcgcgagcgaacgaccaagagggtgttcgactgctagagccgagcgaagcgatgcctaaatcaaaggaacttgtttcttcaagctcttctggcagtgattctgacagtgaggttgacaaaaagttaaagaggaaaaaggcaagtttgcttcagaaaaccctgtaaagaaaccaaaagacaggtgagacttctgagagccctgtcatctttctaaacagagccagccagcagcagagatgataacatgtttcagattgggaaaatggaggtacgttagtgttccgcgattttaaaggcaaaagtgcctaatttgatattagagaatattggatggatcctgaaggtgaaatgaaaccagaaagaaaaggtatttctttaaatccactaacaatgggagcccagcttgaaggaacagatttctggaccattgattgatgccagtaagaaaacttgtaaaatttccgagcccatattaattaaaccctgtactgttccagttgttttaatctgtctggttacagtggctgtgtgtttctgaatgtgtctccaagctattggatgtttggattgcagagggatttgtaaggtggaatacttttttttaatgtgcattattaaaaatattgagtgaagctaattgtcaactttattaaggattactttgtctgcccaccacctagtgtaaaataaaatcaagtaatac

SEQ ID NO: 22995 - DNA, 921 bp, Homo sapiens
  SIMILAR (502)..(687): 871254mologous to Homo sapiens Human secreted protein sequence encoded by gene 61 SEQ ID NO:325,accession number Y91652,Smith-Waterman Score=288.
ctagagagtatagggcagaaggatggcagatgagtgactccacatccagagctgcctccctttaatccaggatcctgtccttcctgtcctgtaggagtgcctgttgccagtgtggggtgagacaagtttgtcccacagggctgtctgagcagataagattaagggctgggtctgtgctcaattaactcctgtgggcacgggggctgggaagagcaaagtcagcggtgcctacagtcagcaccatgctgggcctgccgtggaagggaggtctgtcctgggcgctgctgctgcttctcttaggctcccagatcctgctgatctatgcctggcatttccacgagcaaagggactgtgatgaacacaatgtcatggctcgttacctccctgccacagtggagtttgctgtccacacattcaaccaacagagcaaggactactatgcctacagactggggcacatctttaattcctggaaggagcaggtggagtccaagactgtaattctcaatggagctactgctggggagaactagggtgtgggaatatttgaagacgaccattgacaactgccatttccaagaaagcacagagctgaacaatactttcacctgcttcttcaccatcagcaccaggccctggatgactcagttcagcctcctgaacaagacctgcttggagggattccactgagtgaaacccactcacaggcttgtccatgtgctgctcccacattccgtggacatcagcactactctcctgaggactcttcagtggctgagcagctttggacttgtttgttatcctattttgcatgtgtttgagatctcagatcagtgttttagaaaatccacacatcttgagcctaatcatgtagtgtagatcattaaacatcagcattttaagaaaaaaaaaaaaaaaaaa

SEQ ID NO: 22996 - DNA, 455 bp, Homo sapiens
  SIMILAR (271)..(384): 971254mologous to Homo sapiens ribosomal protein L26,accession number X69392,Smith-Waterman Score=181.
tgaaaaagaaacaaatcttataatgaagcacagaagaggctttaagaattactgataccatcttgccttttctcctttgttgggaggaaattagtaaataagccaggtttgatggctaaagagtgatttctggagttttttaaaagttaaaatcttttcttattaggcatccacctaccccaggtttgggaaatggtattgaatgttgggctttcccttgtgttttagtgattatttaaagcttgggagtgtttttttcttatttttctgcaggtggttatcactaggctaaaactggacaaagaccgcaaaaagatcctcgaacggaaagccaaatctcgccaagtaggaaaggaaaagggcaaatacaaggaagaaaccatttgagaagatgcaggaataaagtaatcttatatacaagctttgattaaaacttgaaacaaaaaaaaaaaaaa

SEQ ID NO: 22997 - DNA, 758 bp, Homo sapiens
  SIMILAR (646)..(714): 691254mologous to Gallus gallus ribosomal protein L26,accession number L34018,Smith-Waterman Score=78.
atcgagaccctagaccagcgcggtggaattccaccgaagcgggagcggccaaaatgaaagtttaaatccctttgtgacttcccgaccgaaagcaagaattcgcaaaaggcattttcaaatgcaccccttccccccacattccgaagggaagattattgtccttcccccctctttccccaaagagcctgagaccagaaggtaccaaccgtgccgattcccatgcccccatcccgaaaaggatgaatagaagttcaggggtttttttttggttgtacgtgggacacctataaagggtcagccaaattggccaaagtagtccccaggtttacagggaagaaatatgttatctacattgaaccgggttgcagcgggaaaaaggcttaatggccacaactgtccaccgtagggcatttcaccccagcaagcttgggagtgtttttttcttatttttctgcaggtggttatcacctaggctaaaacttggacaaagacccgcaaaaagatccgtcgaacggaaagccaaaatctcgccaaagtaggaaaggaaaaagggcaaatacaattaagaaaccattgcagcaagatgcagggaataaaagtaatacttatataacaagcaaagaaataaaactttgaaacgtcgaggaaaaaaacagaaaaaagatactagaacggaaagccaaatcttgccaaataagaaaaggaaaagggcgaatacaaggaagaaaccatcgggacgatgcgggagtgcggtcttc

SEQ ID NO: 22998 - DNA, 1326 bp, Homo sapiens
  SIMILAR (314)..(556): 921254mologous to Homo sapiens Similar to x 006 protein,accession number BC001294,Smith-Waterman Score=410.
atcgtctttttactttatttagaaacctgtttggaggttatggatgataaacccaatcctgaagccctaagtgacagttcagagcgtcttttctcctttggcgtcatcgcagatgttcaatttgcagacttagaagatggctttaatttccaaggaaccaggcggcgatactacagacatagtcttcttcacttacagggtgccattgaagactggaataatgaaagcagcatgccctgttgtgtccttcagcttggagatatcatcgatggatataatgcacagtataatgcatccaaaaagtccctagaacttgtgttgtggcatgttcaagaggcgtaaaggtccagttcatcatacatggggaaaccatgaattctataacttcagtagagagtatttaacacactctaaacttaacactaagtttctagaagatcagattgtacatcatcctgagaccatgccttcagaagattattatgcttatcattttgtaccattccctaaattctggttcattttacttgatgcatatgacttgagtgtcttggggcgtgggatcagtcttctccaaaatacggaggcagtgtatggaagatattggaggggagccacaatcccaaatacggggaactggaatagttcctcaagggacttttctgaggccccagtttgttccagtttaatgggagggtttcagcccaggaacagctaaactggttgaatgaagtgctaacattctctgacacaaaccaagaaaaggtggtgattgtgagccatcttccccatttaccccggaccgccttttgacaatgtgtgcctggcctggaactacagagatgccctggcagtcatttggtctcatgagtgtgtggtgtgtttctttgcttggtcacacccatgatggtggctactctgaggatccttttggtgtataccacggtcaacctagaaggagttattgaaacagctccagacagccaacgctttggcacagttcatgtctatcctgacaaaatgatgttgaaagggagaggcagagttccagataggatttatgaattacaaggaaaggaagagccttcccattgttaagtctaatttattttaacttgatagaaaatgagctttgtgtttgtccctcctaaacaaaaaaataaaaatcctctgtctcattgtttagtattcagcttgcataacaaaatgtatttatagtttcagtgtgtgatggttgataaaatactcagaaatgttattttggatcatgtatccattgtaagttagaaacaaaccagggaggaaactgaggcaggggtgtatagt

SEQ ID NO: 22999 - DNA, 382 bp, Homo sapiens
  SIMILAR (2)..(160): 451254mologous to Homo sapiens Human Hydrolase protein-14 (HYDRL-14),accession number Y71116,Smith-Waterman Score=128.
aaacaatgggagcggccagtcctacgggcttgtcctgtatgagaagtccatctgctccggaggccgcctccgtgcccacgctcatgacatggcacaggtgtttttggatgagacaatgatagggattctgaatgagaataataaggacctgcacattcctgaactcagggaataactggatctgtcagcatcaataactcttccctggagggctttaccatctattccctggagatgaaaatgagcttctttgagaggctccgctctgccacctggaagcctgtcccagacagccaccagggcccggccttctactgtgggaccttgaaggctggcccttctcccaaggacaccttcctgagcctgctgaactggaattatg

SEQ ID NO: 23000 - DNA, 488 bp, Homo sapiens
  SIMILAR (63)..(278): 941254mologous to Homo sapiens acyl-Coenzyme A dehydrogenase- 8 precursor,accession number AF126245,Smith-Waterman Score=358.
cccacgcgtccgggaggtcgaaggcgttcagactcttagctgaacgcggagctgcggcggctatgctgcggagcggctgccggcgtttcggagcgcgcctcggctgcctgcccggcggtctccgggacctcgtccagaccggccaccggagcttgacctcctgcatcgacccttccatgggacttaatgaagagcagaaagaatttcaaaaagtggcctttgactttgctgcccgagagatggctccaaatatggcagagtgggaccagaagcatgtgtgcctggatgattgatagcttcggaaatgaggaacagaggcacaaattttgcccaccgctctgtaccatggagaagattgcttcctactgcctcactgaaccaggaagtgggagtgatgctgcctctcttctgacctccgctaagaaacagggagatcattacatcctcaatggctccaggccttcatcaggggtgctggggagtcagac

SEQ ID NO: 23001 - DNA, 477 bp, Homo sapiens
  SIMILAR (179)..(6): 511254mologous to Homo sapiens Amino acid sequence of protein PRO236,accession number Y13374,Smith-Waterman Score=159.
ggcttccaggtggcagagcggagcctctcaaagaagctcattttcatctccagggaatagatggtaaagccctccagggaagagttattgatgctgacagatccagttattcctttctgctcattctgtatttgccatgaaaaattgactcgtccttgattctccaccaggatcctcaggtatcggcagtcctgctgggacaggccaggtcatggagaccacgcagccatggagggcgtctacccgacaacccgttttttcactgagtcccacatggagagacacatgggagaacaggaggctccagggcccagcagtcttcccttcacctaaggactgccttgtgttcctatagtcaatcttccctttcccctctgctgatcctacctgagttcaggaatgtgcaggtccttattattctcattcagaatccctatcattgtctcatccaaagaattccaccgctctggacgagta

SEQ ID NO: 23002 - DNA, 906 bp, Homo sapiens
  SIMILAR (798)..(769): 501254mologous to Plasmodium lophurae histidine-rich protein,accession number M15317,Smith-Waterman Score=40.
atgcccacgggaatggcccatctgtgtcctctgcccctgaggcctcctgggcagctgcaagactgtgagctccatgggagcagggaccgtaccatcctcgtctttgttcctctgcggtgcttcacgcagagcttcgtgaacactccagcagcatctgttgcaacagctatgtctgggcacctgcgcctcagagttgatccaggtcttgatttccacctggctgaccatcagagctccctcttggcctttgtcgagtgtgacctgtggagcaggacctctgacggacagggtgccttatcggagagactgcggagcttcagcatgcaggacctcaccaccatcaggggagacggcgcccctgctccctcgggccccccaccaccggggtctgggcgggccagcggcaaacacggccagcctaagatgtccaggagtgcttctgagagcgctagcagctcagggctgcagggtgcaaggactgactttgtgtgccagtgtgtacctgctgctccacctgcaggacctggaaagggccataataatcctgggaaggatgatgaggatgatgatgatgatgatggtggtggtggtggtggtgatgatggtggtggtggtggtggtggtggtggtggtggtggtggtgatagcctggagcatccaggagaccccagggagagtggaggtctcccggttctggacagagactcctgttgctgccctcccagcgttggagaacatgcacaaagccattttggtttcagtcctgagattatagtgatgatggtgattttggaaatcgatgattgtctggtccaagcaaaagaccgaagttacgatgcccttgtgcacttcgggaagcggggcttgaacgtggccgccacagcggctgtgatggctgcttccaag

SEQ ID NO: 23003 - DNA, 1015 bp, Homo sapiens
  SIMILAR (332)..(922): 991254mologous to Homo sapiens HSPC144,accession number AF161493,Smith-Waterman Score=1042.
aaggatttccacctccacgctctgcccgaagccgaagaagctcatcgcaccgccgggccgggcgggtctcgcttccatgggacttaatgaagagcagaaagaatttcaaaaagtggcctttgactttgctgcccgagagatggctccaaatatggcagagtgggaccagaaggacaggaaggctgatggaaaagggggagcagtgacccaggaagttcaggcccagctgctggtgaagcacgggcagaagctagtctcccgattccagctcagcagcttttcctacgtggattccgtaaggaccacacagtccaaacaagagcatctccagacagacaagggactatcaggaaaacgcaccaaaactgagaactcaggtgaggcattagctaaagtggaggactccaaccctcagaagacttcagccactaaaaactgtttgaagaatctaagcagccactggctgatgaagtcagagccagagagccgcctagagaaaggtgtagatgtgaagttcagcattgaggatctcaaagcacagcccaaacagacaacatgctgggatggtgttcgtaactaccaggctcggaacttccttagagccatgaagctgggagaagaagccttcttctaccatagcaactgcaaagagccaggcatcgcaggactcatgaagatcgtgaaagaggcttacccagaccacacacagtttgagaaaaacaatccccattatgacccatctagcaaagaggacaaccctaagtggtccatggtggatgtacagtttgttcggatgatgaaacgtttcattcccctggctgagctcaaatcctatcatcaagctcacaaagctactggtggccccttaaaaaatatggttctcttcactcgccagagattatcaatccagcccctgacccagggccttcagatcccagctgtcaacagcctgctgtgtgacgtcactgaaagcctctgtgctctagtttcctcactgataaaggagggatactaa

SEQ ID NO: 23004 - DNA, 1552 bp, Homo sapiens
  SIMILAR (532)..(1023): 991254mologous to Homo sapiens acyl-Coenzyme A dehydrogenase- 8 precursor,accession number AF126245,Smith-Waterman Score=834.
atgtgtgcctggatgattgatagcttcggaaatgaggaacagaggcacaaattttgcccaccgctctgtaccatggagaagtttgcttcctactgcctcactgaaccaggaagtgggagtgatgctgcctctcttctgacctccgctaagaaacagggagatcattacatcctcaatggctccaaggccttcatcagtggtgctggtgagtcagacatctatgtggtcatgtgccgaacaggaggaccaggccccaagggcatctcatgcatagttgttgagaaggggacccctggcctcagctttggcaagaaggagaaaaaggaagagacgcttagagaagacctggtgttggccacaagtctcagtaatggaaggcgtgtggtcccttttgcttctttgattaaaaataaagtaaaactcattggagatgattgtgggtatttcagcaacccaagaaggacacttaggtactggaaggccgccctacctgctggattgttgggcaaccacgcagtccctgatttttgccaggtggggtggaactcccagccaacacgagctgtgatcttcgaagactgtgctgtccctgtggccaacagaattgggagcgaggggcagggcttcctcattgccgtgagaggactgaacggagggaggatcaatattgcttcctgctccctgggggctgcccacgcctctgtcatcctcacccgagaccacctcaatgtccggaagcagtttggagagcctctggccagtaaccagtacttgcaattcacactggctgatatggcaacaaggctggtggccgcgcggctgatggtccgcaatgcagcagtggctctgcaggaggagaggaaggatgcagtggccttgtgctccatggccaagctctttgctacagatgaatgctttgccatctgcaaccaggccttgcagatgcacgggggctacggctacctgaaggattacgctgttcagcagtacgtgcgggactccagggtccaccagattctagaagagctgttctggcaggggcctggagtccagagccgcagcttcgtccctttcggggggcctcagatcgctctgctgctgcccttttcctctggagatctgcgagaaggcctgtgctggaatcgcctggagggcatgggagcgcagattgcgggcctcaaccccagagcttctgctccagagggtctagtgtgggcctgggaatttgtatctgcaacaagtcttcaataccgccaggcaggccctgtcatcgcggtgcaagtggagaatgagtatggctcattcaataaggataaaacatacatgccgtatctccacaaggccctgctgagaagagggattgtggagcttctcttgacctctgatggtgagaaacatgtgctgagtggccacaccaaaggagtgttggccgccatcaatttgcaaaaacttcaccaggatactttcaatcagcttcataaagtccagaactggaattatggatttgtgttcatcaatggacgtaaccttgggcgatattggaatattgggc

SEQ ID NO: 23005 - DNA, 1034 bp, Homo sapiens
  SIMILAR (3)..(1031): 531254mologous to Homo sapiens Human Hydrolase protein-14 (HYDRL-14),accession number Y71116,Smith-Waterman Score=969.
ggggagatacgcaccatgttaacgatgcaaaggaggttgaacatgctgtttctgttttcatcaaatatgagatctccttcaatgtatatatgttccatggtggaaccaactttggtttcatgaacggggccacatatttcgggaagcactcgggcattgtcaccagctatgactatgatgcagtgctcacggaggctggagattacacagaaaaatatctgaagcttcaaaaactctttcaatctgtctcagcaactcccctgccccgagtacccaaacttcctcccaaggctgtgtatccccccgagagaccgacgctgtacctcccgctgtgggacgccctatcctacttaaatgagccagtcaggtcgcgtcagcccgtcaacatggagaaccttcccataaacaatgggagcggccagtcctacgggcttgtcctgtatgagaagtccatctgctccggaggccgcctccgtgcccacgctcatgacatggcacaggtgtttttggatgagacaatgatagggattctgaatgagaataataaggacctgcacattcctgaactcagggactgccgatacctgaggatcctggtggagaatcaaggacgagtcaatttttcatggcaaatacagaatgagcagaaaggaataactggatctgtcagcatcaataactcttccctggagggctttaccatctattccctggagatgaaaatgagcttctttgagaggctccgctctgccacctggaagcctgtcccagacagccaccagggcccggccttctactgtgggaccttgaaggctggcccttctcccaaggacaccttcctgagcctgctgaactggaattatggattcgtgttcatcaatggacgtaaccttgggcgatattggaatattgggcctcagaaaacactgtaccttcctggagtttggcttcatccagaagacaatgaggtcatcttgtttgagaagatgatgagtggctcagatatcaaatctacagacaagcccacgctgtaa

SEQ ID NO: 23006 - DNA, 1773 bp, Homo sapiens
  SIMILAR (970)..(1755): 511254mologous to Homo sapiens Human Hydrolase protein-14 (HYDRL-14),accession number Y71116,Smith-Waterman Score=721.
cggacgcgtgggcggaggtctttggcgttcttactcttagctgaacgcggagctgcggcggctgtgctgtggagcggctgccggcgtttcagggcgcgcctcggatgcctgcccggcggtctccgggtcctcgtccagaccggccaccggagcttgacctcctgcatcgacccttccatgggacttaatgaagagcagaaagaatttcaaaacgcggcctttgactttgctgcccgagagatggctccaaatatggcagagtgggaccagaaggagctgttcccagtggatgtgatgcggaaggcagcccagctaggcttcggaggggtctacatacaaacagatgtgggcgggtctgggcatgtacgacttgatacctctgtcatttttgaagccttggctaacaggctgcaccagcaccacagcctatatgaaggcatccacaatgccctcagagccagcattcttttgtccaagagggaggaacgcactataaagctggccatttatgctgtaggcagtggggaccccgggcctgcttaccgccaggcaggccctgtcatcgcggtgcaagtggagaatgagtatggctcattcaataaggataaaacatacatgccgtatctccacaaggccctgctgagaagagggattgtggagcttctcttgacctctgatggtgagaaacatgtgctgagtggccacaccaaaggagtgttggccgccatcaatttgcaaaaacttcaccaggatactttcaatcagcttcataaagtccagaaaaaaagtcaaaagaaaaatgccactattaccaccaataacaccaacaataataccaccaccaccaccaacaataatgccagcaacaataccaccaccatcacatcaccaccaccaccaccaccaccaccaccaccaccaccaccaccaccaacaccaccaccaccactaccaaataaaacttttctggtctcttcaactcccctgccccgagtacccaaacttcctcccaaggctgtgtatccccccgtgagaccgtcgctgtacctcccgctgtgggacgccctatcctacttaaatgagccagtcaggtcgcgtcagcccgtcaacatggagaaccttcccataaacaatgggagcggccagtcctacgggcttgtcctgtatgagaagtccatctgctccggaggccgcctccgtgcccacgctcatgacatggcacaggtgtttttggatgagacaatgatagggattctgaatgagaataataaggacctgcacattcctgaactcagggactgccgatacctgaggatcctggtggagaatcaaggacgagtcaatttttcatggcaaatacagaatgagcagaaaggaataactggatctgtcagcatcaataactcttccctggagggctttaccatctattccctggagatgaaaatgagcttctttgagaggctccgctctgccacctggaagcctgtcccagacagccaccagggcccggccttctactgtgggaccttgaaggctggcccttctcccaaggacaccttcctgagcctgctgaactggaattatggattcgtgttcatcaatggacgtaaccttgggcgatattggaatattgggcctcagaaaacactgtaccttcctggagtttggcttcatccagaagacaatgaggtcatcttgtttgagaagatgatgagtggctcagatatcaaatctacagacaagcccacgctgtaaaactgtgtctgaaca

SEQ ID NO: 23007 - DNA, 492 bp, Homo sapiens
  SIMILAR (2)..(253): 981254mologous to Homo sapiens Human PKD1 protein fragment 13,accession number W39182,Smith-Waterman Score=419.
  misc_feature (1)...(492): n = a,t,c or g
ggaccggccacctcgtagctgtttcactcgcatccagagggccacctgctgcgttctcctcatctgcctcttcctgggcgccaacgccgtgtggtacggagctgttggtgactctgcctacagcacggggcatgtgtccaggctgagcccgctgagcgtcgacacagtcgctgttggcctggtgtccagcgtggttgtctatcccgtctacctggccatcctctttctcttccggatgtcccggagcaaggttatcaatactctggctgaccatcgtcatcgtgggactgactttggtggaagtccttggttacttatcattactgtgtttctgagaagctataaatttgccatctccctctgcacaagttacctttgtgagtctttcctgaagactatcttcccgtctcanaatggacatgatggatccacggatgtacagcagagagccaggaggtccaactgccgtagacaggaaggaattaaaattgt

SEQ ID NO: 23008 - DNA, 487 bp, Homo sapiens
  SIMILAR (53)..(487): 941254mologous to Homo sapiens PKD1,accession number AC005600,Smith-Waterman Score=744.
  misc_feature (1)...(487): n = a,t,c or g
ggcggatccggggnattgannaatcggagaccctagtcagngngcnggaattctcaccgccttcggcgccagcctcttcatgcccccaagccatgagccgacagcggatgtaaactacatcgtcatgctgacatgtgctgtgtgcctggtgacctacatggtcatggccgccatcctgcagaagctggaccagttggatgccagccggggccgcgccatccccttctgtgggcagcggggccgcttcaagtacgagatcctcgtcaagacaggctggggccggggctcaggtaccacggcccacgtgggcatcatgctgtatggggtggacagccggagtggccaccggcacctggacggcgacagagccttccactgcaacagtctggacatcttccggatcgccaccccgcacagcctgggtagcgtgtggaagatccgagtgtggcacgacaacaaagggctcagccctgcctggttcctgcag

SEQ ID NO: 23009 - DNA, 459 bp, Homo sapiens
  SIMILAR (358)..(2): 961254mologous to Homo sapiens Human secreted protein, SEQ ID NO: 6338,accession number G02257,Smith-Waterman Score=620.
ccgctgagggtagagctgagggtggaaggggagtgagcagacactcgggaggtgtcttgagattatcatccgctgagggtggaaggggatagagcacacactcggaaggtgtcttgaggctcagggagttatcaattatagaatgttgttgagttggaggaggtggctggtggcccatcctgttttttaaagtttcagctgtgaggtagggccagtagggcaatcctgaagaatgacgatgctccactgccgccattctgacccggttgcaaagaggctttcttgcagaaggggtgattttgcatctgtagtagtcctctgcccgccgccgcaacgcttgcgcacgttgaaacatttcctgttctttggcggtcttcctctttccattgattttgtcatgacggttgacttttgttgtcaccttcatcttacggattttagctcgaactttggtttcca

SEQ ID NO: 23010 - DNA, 341 bp, Homo sapiens
  SIMILAR (189)..(242): 881254mologous to Homo sapiens Human PKD1 protein fragment 13,accession number W39182,Smith-Waterman Score=82.
  misc_feature (1)...(341): n = a,t,c or g
aaggtggctgggagcccgagccccacacctgccgggcagcaggtgctggacgtcaacagctgcctggactcatccgtgctggacagctccttcctcacgttctcaggcctccacgctgaggtgagggctctactgggggtcctgccgccttggcgcanttgggactcaagaccctgtgcacctntcagcaggcctttgctggacagatgaagagtgacttgtttctggatgattctaagagtgaccttgaggaaccctgggagctcaggaaggaaggagcacccagaagcagggacagggagctngtttggggaggaccagaaatcaggttatcaatactt

SEQ ID NO: 23011 - DNA, 210 bp, Homo sapiens
  SIMILAR (1)..(165): 921254mologous to Homo sapiens Human PKD1 protein fragment 8,accession number W39177,Smith-Waterman Score=264.
agggaggctggcgggtgtgcgctgaactttgggccccgcgggagcagcacggtcaccattccacgggagcggctggcggctggcgtggagtacaccttcagcctgaccgtgtggaaggccggccgcaaggaggaggccaccaaccagacgttccacgtacagtcttcaagccacatatgctctagtggcaaaagctacacagtcccctag

SEQ ID NO: 23012 - DNA, 3012 bp, Homo sapiens; identical to SEQ ID NO: 17049
  SIMILAR (316)..(1962): 991254mologous to Homo sapiens polycystic kidney disease 1 protein,accession number L33243,Smith-Waterman Score=2862.

SEQ ID NO: 23013 - DNA, 298 bp, Homo sapiens
  SIMILAR (3)..(179): 861254mologous to Homo sapiens polycystic kidney disease- associated protein,accession number L39891,Smith-Waterman Score= 243.
gagacctcatccacctggccagctcagacgtgcgggcaccacagcgctcacagctgggagccgagtcaccatcgcggatggtggcgtcccaggcctacaacctgacctctgccctcacgcccatcgtcacgcgctcccgcgtgctcaacgaggagcccctgacgctggcgggcagtcaggctttgttaaatcatctttgctgtcgatatctgcggattccagcagcagcgttgccggacgatccccacacaactggtgaaaaagcgcggtgggattgtcgcgataagcgccttcgcag

SEQ ID NO: 23014 - DNA, 639 bp, Homo sapiens
  SIMILAR (7)..(468): 961254mologous to Homo sapiens Human PKD1 protein fragment 6,accession number W39175,Smith-Waterman Score=786.
  misc_feature (1)...(639): n = a,t,c or g
atgaccgtcaccctccacagccaggatgtcctcatgctccctggtgacctcgttggcttgcagcacgacgctggccctggcgccctcctgcactgctcgccggctcccggccaccctggtccccaggccccgtacctctccgccaacgcctcgtcatggctgccccacttgccagcccagctggagggcacttgggcctgccctgcctgtgccctgcggctgcttgcagccacggaacagctcaccgtgctgctgggcctgaggcccaaccctgggctgcggctgcctgggcgctatgaggtccgggcagaggtgggcaatggcgtgtccaggcacaacctgtcctgcagctntgacgtggtctccccagtggctgggctgggggtcatctaccctgccccccgcgacagccgcctctacgtgcccaccaacggctcagcctcggtgctccaggtggactctggtgccgcgccccagtatcacggggtaccgaaccgcttacagggctgggctggtgaatcacattcaggcctctgttgcctggaaacgcatcccaggcttcacactgattttacttgggagggaagggagatgagatatgagggcaaaggagttttgactgctgcccttctctcctag

SEQ ID NO: 23015 - DNA, 798 bp, Homo sapiens
  SIMILAR (31)..(489): 921254mologous to Homo sapiens PKD1,accession number AC005600,Smith-Waterman Score=751.
atgcgcctggggtcccaagtactcgggaggaccagagacccagtggggagttaccgtctgaacctctccagccacttccgctggtcggcgctggaggtgtccgtgggcttgtacacgtccctgtgccagtacttcagcgaggaggacgtggtgtggcggacagaggggctgctgcccctggaggagacctcgccccgccaggccgtctgcctcacccgccacctcaccgccttcggcaccagcctcttcgtgcccccaagccatatccgctttgtgtttccttcttcacaggagccaacagcggatgtaaactacatcgtcatgctgacatgtgctgtgtgcctggtgacctacatggtcatggccgccatcctgcacaagctggaccagttggatgccagccggggctgcgccatccccttctgtgggcagcggggccgcttcaagtacgagatcctcgtcaagacaggctggggccggggctcagggaacccacctcttagaatcatccagaaacaagtcactcttcatctgtccagcaaaggcctgctgagaggtgcacagggtcttgagtccaagctgcgccaaggcggcaggacccccagtagagccctcacctcagcgtggaggcctgagaacgtgaggaaggagctgtccagcacggatgagtccaggcagctgtcaacgtccagcacctgctgcccggcaggtgcctctccacttgtggctccctggctgctgaagctcagcagggacagctgtgtccagttccaggtggaggacagccggggcttctga

SEQ ID NO: 23016 - DNA, 1530 bp, Homo sapiens
  SIMILAR (318)..(653): 291254mologous to Homo sapiens polycystic kidney disease 1 protein,accession number L43619,Smith-Waterman Score=66.
atggtcatactcatcacgagaccttcctcacaaagcaatatcgtcatcgctatggctctatcacggccatgtcaaataggccacacctcctcctcctcatggacccggaaacgcacgagcgtagagcagtcccagacaacagacccagttggcccgtgtgcatccagtggacgtgcacagctgctccttcctgtctgccaggtcttggcctgtgtcctctccccgtgtgtcccccggtctgcaactgtcctgcctgtccttgtcacgagcactgtggggaggctccttgaggtgtggctgacgaagcggggagccctgcgtgtccaccctcatccgtcgtgcgggggtccacgggccatgaccgtcaccctccacggccaggatgtcctcatgctccctggtgacctcgttggcttgcagcacgacgctggccctggcgccctcttgcactgctcgccggctcccggccaccctggtccccaggccccgtacctctccgccaacgcctcgtcatggctgccccacttgccagcccagttgaagggcacttgggcctgccctgcctgtgccctgcggctgcttgcagccacggaacagctcaccgtgctgctgggcttgaggcccaaccttggactgcggctgcctgggcgctatgaggtccgggcagaggtggccaatggcgtgtccaggcacaacctctcctgcagctttgacgtggtctccccagtggctgggctgcgggtcatctaccctgccccccgcgacggccgcctctacgtgcccaccaacggctcagccttggtgctccaggtggactctggtgccaacgccacggccacggctcgctggcctgggggcagtgtcagcgcccgctttgagaatgtctgccctgccctggtggccaccttcgtgcccggctgcccctgggagaccaacgataccctgttctcagtggtagcactgccgtggctcagtgagggggagcacgtggtggacgtggtggtggaaaacagcgccagccgggccaacctcagcctgcgggtgacggcggaggagcccatctgtggcctccgcgccacgcccagccccgaggcccgtgtactgcagggagtcctagtggtcctgctggctggctcctcgggctacctggtgggctttaaattcctggaaagtcacggctctgacagtggctccgctaactcattccactgtctcatttcacaaaatgaatttaaaactctgctccctgacctcacacgagcccccaggtacagccccgtggtggaggccggctcggacatggtcttccggtggaccatcaacgacaagcagtccctgaccttccagaacgtggtcttcaatgtcatttatcagagcgcggcggtcttcaagctctcactgagcgcggactccgcgccccgcccccgctggcgtctgcagagcccccgggtgggacgtctgtctccagacccggggtttttcggctccccggggccgtgccaaccgcggctccaggcgttccttatttaa

SEQ ID NO: 23017 - DNA, 1388 bp, Homo sapiens
  SIMILAR (521)..(742): 971254mologous to Homo sapiens polycystic kidney disease- associated protein,accession number L39891,Smith-Waterman Score= 362.
  misc_feature (1)...(1388): n = a,t,c or g
atggcctctggcctactaggggctctggccctgacccacggccactcactcctcagagacgtctcccacaacctgctccgggcgctggacgttgggctcctggcgaacctctcggcgctggcagagctggatataagcaacaacaagatttctacgttagaagaaggaatatttgctaatttatttaatttaagtgaaataaacctgagtgggaacccgtttgagtgtgactgtggcctggcgtggctgccgcgatgggcggaggagcagcaggtgcgggtggtgcagcccaaggcatccacgtgtgctgggcatggctccgtggctggccagcatccgtttggcatccccccgctggacagtggcggtgctcagtgccggtgggtggggcagctctgtccttcccagccagccntgttgcgcttccggcgcctgctggtggctgagctgcagcgtggcttctttgacaagcacatctggctctccatatgggaccggccgcctcgtagctgtttcactacgcatccagagagccacctgctgcgttctcctcatctgtctcttcctgggcgccaacgccgtgtggtacggggctgttggagactctgcctacagcacggggcgtgtgtccaggctgaacccgctgagcgtcgacacagtcgctgttggcctggtgtccagcgtggttgtctatcccgtctacctggccatcctctttctcttccggatgtcccggagcaaggcacagcccgtgtacgaagtgagccgcagctcctacgtgtacctggagggccgctgcctcaattgcagcagcggctccaagcgagggggatacaccttcacgctgacgggtgctgggccgctctggcgaggaggagggctgcgcctccatccccctgtcccccaaccgcccgccgctggggggctcttgccgcctcttcccactgggcgctgtgcacgctctcaccaccaaggtgcacttcgaatgcatgggctggcatgacgcggaggatgctggcgccccgctggtgtacgccctgctgctgcagcgctgtcgccagggccactgcgaggagttctgtgtctacaagggcagcctctccggctacggagccgtgctgcccccgggtttcaggccacaattcgaggtgggcctggccgtggtggtgcaggaccagctgggagccgctgtggtcgccctcaacaggtctctggccatcaccctcccagagcccaacggcagcgcaatggggctcacagtctggctgcacgggctcaccgctagtgtgctcccagggctgctgcggcaggccgatccccagctcgtcatcgagtactcgctggccctggtcactgtgctgaacgagacttatacagaatcactttag

SEQ ID NO: 23018 - DNA, 1143 bp, Homo sapiens
  SIMILAR (487)..(681): 731254mologous to Homo sapiens nuclear pore complex interacting protein NPIP,accession number AF132984,Smith-Waterman Score=255.
  misc_feature (1)...(1143): n = a,t,c or g
tgacaagcacatctggctctccatatgggaccggccacctcgtagctgtttcactcgcatccagagggccacctgctgcgttctcctcatctgcctcttcctgggcgccaacgccgtgtggtacggggctgttggtgactctgcctacagcacggggcatgtgtccaggctgagcccgctgagcgtcgacacagtctgctgttggcctggtgtccagcgtggttgtctatcccgtctacctggccatcctctttctcttctggatgtcccggagcaaggtgggctgggagcccgagccccacacctgccgggcagcaggtgctggacatcgacagctgcctggactcgtccgtgctggacagctccttcctcacgttctcaggcctccacgctgaggttatcaatactctggctgaccatcagcatcgcgggactgactttggtggaagtccttcggtacttatcattactgtgtcactgagaagctataaatttgccatctccctctgcacaacttacctttgggttatcaatactctggctgaccatcgtcatcgtgggactgactttggtggaagtccttggttacttatcattactgtgtttctgagaagttataaatttgccatctccctctgcacaacttacctttgtgstgtctttcctgaagactatcttcccgtctcaaaatggacatgatggatccacggatgtacagcagagagccaggaggtccaactgccgtagacaggaaggaattaaaattgtcctgggaagacatctttactttatggagacaggtggaaaccaaagttcgagctaaaatccgtaagatgaaggtgacaacaaaagtcaaccgtcatgacaaaatcaatggaaagaggaagaccgccaaagaacatctgaggaaactaagcatgaaagaacgtgagcacagagaagaggagaggcaggtgtcagaggcagaggaaaatgggaaattggatatgaaagaaatacacacctacatggaaatgtttcaacgtgcgcaagcgttgcggccggcgggcagaggacttactacagatgcaaatcaccccttctgcaagaaagctctttgcancggtgcacttacaattngtattcctgggagttaaagaaatt

SEQ ID NO: 23019 - DNA, 4073 bp, Homo sapiens
  SIMILAR (1803)..(3515): 941254mologous to Homo sapiens PKD1,accession number AC005600,Smith-Waterman Score=2798.
gagcagagacccagcggggagttaccatctgaacctctccagccacttccgctggtcggcgctgcaggtgtccgtgggcctgtacacgtccctgtgccagtacttcagcgaggaggacatggtgtggcggacagaggggctgctgcccctggaggagacctcgccccgccaggccgtctgcctcacccgccacctcaccgccttcggcgccagcctcttcgtgcccccaagccatgtccgctttgtgtttcctgagccgacagcggatgtaaactacatcgtcatgctgacatgtgctgtgtgcctggtgacctacatggtcatggccgccatcctgcacaagctggaccagttggatgccagccggggccgcgccatccctttctgtgggcagcggggccgcttcaagtacgagatcctcgtcaagacaggctggggccggggctcaggtaccacggcccacgtgggcatcatgctgtatggggtggacagccggagcggccaccggcacctggacggcgacagagccttccaccgcaacagcctggacatcttccggatcgccaccccgcacaagcctgggtagcgtgtggaagatccgagtgttggcacgacaacaaagggctcagcctggccctgggtttcctgcagcaacgtcatcgtcagggacctgcagacggcacacaagcaccttcttcctggtcaatgactggctttcggtggagacggaggccaacgggggcctggtggagaaggaggtgctggccgcgagcgacgcagcccttttgcgcttccggcgcctgctggtggctgagctgcagcgtggcttctttgacaagcacatctggctctccatatgggaccggccgcctcgtagccgtttcactcgcatccagagggccacctgctgcgttctcctcatctgcctcttcctgggcgccaacgccgtgtggtacggggctgttggcgactctgcctacagcacggggcatgtgtccaggctgagcccgctgagcgtcgacacagtcgctgttggcctggtgtccagcgtggttgtctatcccgtctacctggccatcctctttctcttccggatgtcccggagcaaggtggctgggagcccgagccccacacctgccgggcagcaggtgctggacgtcgacagctgcctggactcatccgtgctggacagctccttcctcacgttctcaggcctccacgctgaggtgaggactctactgggggtcctgggctgggctgggggtcctgccgccttggcgcagcttggactcaagacactgtgcacctctcagcaggcctttgttggacagatgaagagtgacttgtttctggatgattctaagagtctggtgtgctggccctccggcgagggaacgctcagttggccggacctgctcagtgacccgtccattgtgggtagcaatctgcggcagctggcacggggccaggcgggccatgggctgggcccagaggaggacggcttctccctggccagcccctactcgcctgccaaatccttctcagcatcagatgaagacctgatccagcaggtccttgccgagggggtcagcagcccagcccctacccaagacacccacatggaaacggacctgctcagcagcctgtccagcactcctggggagaagacagagacgctggcgctgcagaggctgggggagctggggccacccagcccaggcctgaactgggaacagccccaggcagcgaggctgtccaggacaggactggtggagggtctgcggaagcgcctgctgccggcctggtgtgcctccctggcccacgggctcagcctgctcctggtggctgtggctgtggctgtctcagggtgggtcttgctggaagccctgtacttctcactggtggccaagcggctgcacccggatgaagatgacaccctggtagagagcccggctgtgacgcctgtgagcgcacgtgtgccccgcgtacggccaccccacggctttgcactcttcctggccaaggaagaagcccgcaaggtcaagaggctacatggcatgctgcggagcctcctggtgtacatgctttttctgctggtgaccctgctggccagctatggggatgcctcatgccatgggcacgcctaccgtctgcaaagcgccatcaagcaggagctgcacagccgggccttcctggccatcacgcggtacgggcatccggtgcactggtctgaggagctctggccatggatggcccacgtgctgctgccctacgtccacgggaaccagtccagcccagagctggggcccccacggctgcggcaggtgcggctgcaggaagcactctacccagaccctcccggccccagggtccacacgtgctcggccgcaggaggcttcagcaccagcgattacgacgttggctgggagagtcctcacaatggctcggggacgtgggcctattcagcgccggatctgctgggggcatggtcctggggctcctgtgccgtgtatgacagcgggggctacgtgcaggagctgggcctgagcctggaggagagccgcgaccggctgcgcttcctgcagctgcacaactggctggacaacaggagccgcgctgtgttcctggagctcacgcgctacagcccggccgtggggctgcacgccgccgtcacgctgcgcctcgagttcccggcggccggccgcgccctggccgccctcagcgtccgcccctttgcgctgcgccgcctcagcgcgggcctctcgctgcctctgctcacctcggtgtgcctgctgctgttcgccgtgcacttcgccgtggccgaggcccgtacttggcacagggaagggcgctggcgcgtgctgcggctcggagcctgggcgcggtggctgctggtggcgctgacggcggccacggcactggtacgcctcgcccagctgggtgccgctgaccgccagtggacccgtttcgtgcgcggccgcccgcgccgcttcactagcttcgaccaggtggcgcagctgagctccgcagcccgtggcctggcggcctcgctgctcttcctgcttttggtcaaggctgcccagcagctacgcttcgtgcgccagtggtccgtctttggcaagacattatgccgagctctgccagagctcctgggggtcaccttgggcctggtggtgctcggggtagcctacgcccagctggccatcctgctcgtgtcttcctgtgtggactccctctggagcgtggcccaggccctgttggtgctgtgccctgggactgggctctctaccctgtgtcctgccgagtcctggcacctgtcacccctgctgtgtgtggggctctgggcactgcggctgtggggcgccctacggctgggggctgttattctccgctggcgctaccacgccttgcgtggagagctgtaccggccggcctgggagccccaggactacgagatggtggagttgttcctgcgcaggctgcgcctctggatgggcctcagcaaggtcaaggaggtgggtacggcccagtgggggggagagggacacgccctgggctctgcccagggtgcagccggactgactgagcccctgtgccgcccccagttccgccacaaagtccgctttgaagggatggagccgctgccctctcgctcctccaggggctccaaggtatccccggatgtgcccccacccagcgctggctccgatgcctcgcacccctccacctcctccagccagctggatgggctgagcgtgagcctgggccggctggggacaaggtgtgagcctgagccctcccgcctccaagccgtgttcgaggccctgctcacccagtttgaccgactcaaccaggccacagaggacgtctaccagctggagcagcagctgcacagcctgcaaggccgcaggagcagccgggcgcccgccggatcttcccgtggcccatccccgggcctgcggccagcactgcccagccgccttgcccgggccagtcggggtgtggacctggccactggccccagcaggacaccccttcgggccaagaacaaggtccaccccagcagcacttag

SEQ ID NO: 23020 - DNA, 10922 bp, Homo sapiens
  SIMILAR (1614)..(10919): 991254mologous to Homo sapiens polycystic kidney disease- associated protein,accession number L39891,Smith-Waterman Score= 16077.
atgccgcccgccgcgcccgcccgcctggcgctggccctgggcctgggcctgtggctcggggcgctggcggggggccccgggcgcggctgcgggccctgcgagcccccctgcctctgcggcccagcgcccggcgccgcctgccgcgtcaactgctcgggccgcgggctgcggacgctcggtcccgcgctgcgcatccccgcggacgccacagcgctaacggcgatggcaaaagcagatggagacgtgaaaaagtacgggagcaagcgaggggctctggccctgacccacggccactcactcctcagagacgtctcccacaacctgctccgggcgctggacgttgggctcctggcgaacctctcggcgctggcagagctggatataagcaacaacaagatttctacgttagaagaaggaatatttgctaatttatttaatttaagtgaaataaacctgagtgggaacccgtttgagtgtgactgtggcctggcgtggctgccgcgatgggcggaggagcagcaggtgcgggtggtgcagcccgaggcagccacgtgtgctgggcctggctccctggctggccagcctctgcttggcatccccttgctggacagtggctgtggggccaccctggtggggccccacggacctctggcctctggccagctagcagccttccacatcgctgccccgctccctgtcactgccacacgctgggacttcggagacggctccgccgaggtggatgccgctgggccggctgcctcgcatcgctatgtgctgcctgggcgctatcacgtgacggccgtgctggccctgggggccggctcagccctgctggggacagacgtgcaggtggaagcggcacctgccgccctggagctcgtgtgcccgtcctcggtgcagagtgacgagagcctcgacctcagcatccagaaccgcggtggttcaggcctggaggccgcctacagcatcgtggccctgggcgaggagccggcccgagcggtgcacccgctctgcccctcggacacggagatcttccctggcaacgggcactgctaccgcctggtggtggagaaggcggcctggctgcaggcgcaggagcagtgtcaggcctgggccggggccgccctggcaatggtggacagtcccgccgtgcagcgcttcctggtctcccgggtcaccaggagcctagacgtgtggatcggcttctcgactgtgcagggggtggaggtgggcccagcgcccgcagggcgaggccttcagcctggagagctgccagaactggctgcccggggagccacacccagccacagccgagcactgcgtccggctcgggcccaccgggtggtgtaacaccgacctgtgctcagcgccgcacagctacgtctgcgagctgcagcccggaggcccagtgcaggatgccgagaacctcctggtgggagcgcccagtggggacctgcagggacccctgacgcctctggcacagcaggacggcctctcagccccgcacgagcccgtggaggctgggatggggtctgtggagctgaggcggccccctgcccaccaggtcatggtattcccgggcctgcgtctgagccgtgaagccttcctacaccacggccgaatttggaatccaggagctccggcggcccgcccagctgcggctgcaggtgtaccggctcctcagcacagcagggaccccggagaacggcagcgagcctgagagcaggtccccggacaacaggacccagctggcccccgcgtgcatgccagggggacgctggtgccctggagccaacatctgcttgccgctggacgcctcctgccacccccaggcctgcgccaatggctgcacggagggggagcacgtggtggacgtggtggtggaaaacagcgccagccgggccaacctcagcctgcgggtgacggcggaggagcccatctgtggcctccgcgccacgcccagccccgaggcccgtgtactgcagggagtcctagtgaggtacagccccgtggtggaggccggctcggacatggtcttccggtggaccatcaacgacaagcagtccctgaccttccagaacgtggtcttcaatgtcatttatcagagcgcggcggtcttcaagctctcactgacggcctccaaccacgtgagcaacgtcaccgtgaactacaacgtaaccgtggagcggatgaacaggatgcagggtctgcaggtctccacagtgccggccgtgctgtcccccaatgccacgctagcactgacggcgggcgtgctggtggactcggccgtggaggtggccttcctgtggacctttggggatggggagcaggccctccaccagttccagcctccgtacaacgagtccttcccggttccagacccctcggtggcccaggtgctggtggagcacaatgtcatgcacacctacgctgccccaggtgagtacctcctgaccgtgctggcatctaatgccttcgagaaccggacgcagcaggtgcctgtgagcgtgcgcgcctccctgccctccgtggctgtgggtgtgagtgacggcgtcctgagccagccggctgccaaccacacctatgcctcgaggggcacctaccacgtgcgcctggaggtcaacaacacggtgagcggtgcggcggcccaggcggatgtgcgcgtctttgaggagctccgcggactcagcgtggacatgagcctggccgtggagcagggcgcccccgtggtggtcagcgccgcggtgcagacgggcgacaacatcacgtggaccttcgacatgggggacggcaccgtgctgtcgggcccggaggcaacagtggagcatgtgtacctgcgggcacagaactgcacagtgaccgtgggtgcggccagccccgccggccacctggcccggagcctgcacgtgctggtcttcgtcctggaggtgctgcgcgttgaacccgccgcctgcatccccacgcagcctgacgcgcggctcacggcctacgtcaccgggaacccggcccactacctcttcgactggaccttcggggatggctcctccaacacgaccgtgcgggggtgcccgacggtgacacacaacttcacgcggagcggcacgttccccctggcgctggtgctgtccagccgcgtgaacagggcgcattacttcaccagcatctgcgtggagccagaggtgggcaacgtcaccctgcagccagagaggcagtttgtgcagctcggggacgaggcctggctggtggcatgtgcctggcccccgttcccctaccgctacacctgggactttggcaccgaggaagccgcccccacccgtgccaggggccctgaggtgacgttcatctaccgagacccaggctcctatcttgtgacagtcaccgcgtccaacaacatctctgctgccaatgactcagccctggtggaggtgcaggagcccgtgctggtcaccagcatcaaggtcaatggctcccttgggctggagctgcagcagccgtacctgttctctgctgtgggccgtgggcgccccgccagctacctgtgggatctgggggacggtgggtggctcgagggtccggaggtcacccacgcttacaacagcacaggtgacttcaccgggcccggccctggccggcagcggcaaaggcttctcgctcaccgtctcgaggccggcacctaccatgtgcagctgcgggccaccaacatgctgggcagcgcctgggccgactgcaccatggacttcgtggagcctgtggggtggctgatggtggccgcctccccgaacccagctgccgtcaacaaaagcgtcaccctcagtgccgagctggctggtggcagtggtgtcgtatacacttggtccttggaggaggggctgagctgggagacctccgagccatttaccacccatagcttccccacacccggcctgcacttggtcaccatgacggcagggaacccgctgggctcagccaacgccaccgtggaagtggatgtgcaggtgcctgtgagtggcctcagcatcagggccagcgagcccggaggcagcttcgtggcggccgggtcctctgtgcccttttgggggcagctggccacgggcaccaatgtgagctggtgctgggctgtgcccggcggcagcagcaagcgtggccctcatgtcaccatggtcttcccggatgctggcaccttctccatccggctcaatgcctccaacgcagtcagctgggtctcagccacgtacaacctcacggcggaggagcccatcgtgggcctggtgctgtgggccagcagcaaggtggtggcgcccgggcagctggtccattttcagatcctgctggctgccggctcagctgtcaccttccgcctgcaggacacagatgagcccagggccgagcactcctacctgaggcctggggactaccgcgtgcaggtgaacgcctccaacctggtgagcttcttcgtggcgcaggccacggtgaccgtccaggtgctggcctgccgggagccggaggtggacgtggtcctgcccctgcaggtgctgatgcggcgatcacagcgcaactacttggaggcccacgttgacctgcgcgactgcgtcacctaccagactgagtaccgctgggaggtgtatcgcaccgccagctgccagcggccggggcgcccagcgcgtgtggccctgcccggcgtggacgtgagccggcctcggctggtgctgccgcggctggcgctgcctgtggggcactactgctttgtgtttgtcgtgtcatttggggacacgccactgacacagagcatccaggccaatgtgacggtggcccccgagcgcctggtgcccatcattgagggtggctcataccgcgtgtggtcagacacacgggacctggtgctggatgggagcgagtcctacgaccccaacctggaggacggcgaccagacgccgctcagtttccactgggcctgtgtggcttcgacacagagggaggctggcgggtgtgcgctgaactttgggccccgcgggagcagcacggtcaccattccacgggagcggctggcggctggcgtggagtacaccttcagcctgaccgtgtggaaggccggccgcaaggaggaggccaccaaccagacggtgctgatccggagtggccgggtgcccattgtgtccttggagtgtgtgtcctgcaaggcacaggccgtgtacgaagtgagccgcagctcctacgtgtacttggagggccgctgcctcaattgcagcagcggctccaagcgagggcggtgggctgcacgtacgttcagcaacaagacgctggtgctggatgagaccaccacatccacgggcagtgcaggcatgcgactggtgctgcggcggggcgtgctgcgggacggcgagggatacaccttcacgctcacggtgctgggccgctctggcgaggaggagggctgcgcctccatccgcctgtcccccaaccgcccgccgctggggggctcttgccgcctcttcccactgggcgctgtgcacgccctcaccaccaaggtgcacttcgaatgcacgggttggcatgacgcggaggatgctggcgccccgctggtgtacgccctgctgctgcggcgctgtcgccagggccactgcgaggagttctgtgtctacaagggcagcctctccagctacggagccgtgctgcccccgggtttcaggccacacttcgaggtgggcctggccgtggtggtgcaggaccagctgggagccgctgtggtcgccctcaacaggtctttggccatcaccctcccagagcccaacggcagcgcaacggggctcacagtctggctgcacgggctcaccgctagtgtgctcccagggctgctgcggcaggccgatccccagcacgtcatcgagtactcgttggccctggtcaccgtgctgaacgagcaccgagcccagatacgcaagaacatcacggagactctggtgtccctgagggtccacactgtggatgacatccagcagatcgctgctgcgctggcccagtgcatggggcccagcagggagctcgtatgccgctcgtgcctgaagcagacgctgcacaagctggaggccatgatgctcatcctgcaggcagagaccaccgcgggcaccgtgacgcccaccgccatcggagacagcatcctcaacatcacaggagacctcatccacctggccagctcggacgtgcgggcaccacagccctcagagctgggagccgagtcaccatctcggatggtggcgtcccaggcctacaacctgacctctgccctcatgcgcatcctcatgcgctcccgcgtgctcaacgaggagcccctgacgctggcgggcgaggagatcgtggcccagggcaagcgctcggacccgcggagcctgctgtgctatggcggcgccccagggcctggctgccacttctccatccccgaggctttcagcggggccctggccaacctcagtgacgtggtgcagctcatctttctggtggactccaatccctttccctttggctatatcagcaactacaccgtctccaccaaggtggcctcgatggcattccagacacaggccggcgcccagatccccatcgagcggctggcctcagagcgcgccatcaccgtgaaggtgcccaacaactcggactgggctgcccggggccaccgcagctccgccaactccgccaactccgttgtggtccagccccaggcctccgtcggtgctgtggtcaccctggacagcagcaaccctgcggccgggctgcatctgcagctcaactatacgctgctggacggtcactacctgtctgaggaacctgagccctacctggcagtctacctacactcggagccccggcccaatgagcacaactgctcggctagcaggaggatccgcccagagtcactccagggtgctgaccaccggccctacaccttcttcatttccccggggagcagagacccagcggggagttaccatctgaacctctccagccacttccgctggtcggcgctgcaggtgtccgtgggcctgtacacgtccctgtgccagtacttcagcgaggaggacatggtgtggcggacagaggggctgctgcccctggaggagacctcgccccgccaggccgtctgcctcacccgccacctcaccgccttcggcgccagcctcttcgtgcccccaagccatgtccgctttgtgtttcctgagccgacagcggatgtaaactacatcgtcatgctgacatgtgctgtgtgcctggtgacctacatggtcatggccgccatcctgcacaagctggaccagttggatgccagccggggccgcgccatccctttctgtgggcagcggggccgcttcaagtacgagatcctcgtcaagacaggctggggccggggctcaggtaccacggcccacgtgggcatcatgctgtatggggtggacagccggagcggccaccggcacctggacggcgacagagccttccaccgcaacagcctggacatcttccggatcgccaccccgcacagcctgggtagcgtgtggaagatccgagtgtggcacgacaacaaaggtttgagccctgcctggttcctgcagcacgtcatcgtcagggacctgcagacggcacgcagcgccttcttcctggtcaatgactggctttcggtggagacggaggccaacgggggcctggtggagaaggaggtgctggccgcgagtgacgcagcccttttgcgcttccggcgcctgctggtggctgagctgcagcgtggcttctttgacaagcacatctggctctccatatgggaccggccgcctcgtagccgtttcactcgcatccagagggccacctgctgcgttctcctcatctgcctcttcctgggcgccaacgccgtgtggtacggggctgttggcgactctgcctacagcacggggcatgtgtccaggctgagcccgctgagcgtcgacacagtcgctgttggcctggtgtccagcgtggttgtctatcccgtctacctggccatcctttttctcttccggatgtcccggagcaaggtggctgggagcccgagccccacacctgccgggcagcaggtgctggacatcgacagctgcctggactcgtccgtgctggacagctccttcctcacgttctcaggcctccacgctgagcaggcctttgttggacagatgaagagtgacttgtttctggatgattctaagagtctggtgtgctggccctccggcgagggaacgctcagttggccggacctgctcagtgacccgtccattgtgggtagcaatctgcggcagctggcacggggccaggcgggccatgggctgtgcccagaggaggacggcttcttcctggccagcccctactcgcctgccaaatccttctcagcatcagatgaagacctgatccagcaggtccttgccgagggggtcagcagcccagcccctacccaagacacccacatggaaacggacctgctcagcagcctgtccagcactcctggggagaagacagagacgctggcgctgcagaggctgggggagctggggccacccagcccaggcctgaactgggaacagccccaggcagcgaggctgtccaggacaggactggtggagggtctgcggaagcgcctgctgccggcctggtgtgcctccctggcccacgggctcagcctgctcctggtggctgtggctgtggctgtctcagggtgggtgggtgcgagcttccccccgggcgtgagtgttgcgtggctcctgtccagcagcgccagcttcctggcctcattcctcggctgggagccactgaaggtgttgctggaagccctgtacttctcactggtggccaagcggctgcacccggatgaagatgacaccctggtagagagcccggctgtgacgcctgtgagcgcacgtgtgccccgcgtacggccaccccacggctttgcactcttcctggccaaggaagaagcccgcaaggtcaagaggctacatggcatgctgcggagcctcctggtgtacatgctttttctgctggtgaccctgctggccagctatggggatgcctcatgccatgggcacgcctaccgtctgcaaagcgccatcaagcaggagctgcacagccgggccttcctggccatcacgcggtctgaggagctctggccatggatggcccacgtgctgctgccctacgtccacgggaaccagtccagcccagagctggggcccccacggctgcggcaggtgcggctgcaggaagcactctacccagaccctcccggccccagggtccacacgtgctcggccgcaggaggcttcagcaccagcgattacgacgttggctgggagagtcctcacaatggctcggggacgtgggcctattcagcgccggatctgctgggggcatggtcctggggctcctgtgccgtgtatgacagcgggggctacgtgcaggagctgggcctgagcctggaggagagccgcgaccggctgcgcttcctgcagctgcacaactggctggacaacaggagccgcgctgtgttcctggagctcacgcgctacagcccggccgtggggctgcacgccgccgtcacgctgcgcctcgagttcccggcggccggccgcgccctggccgccctcagcgtccgcccctttgcgctgcgccgcctcagcgcgggcctctcgctgcctctgctcacctcggtgtgcctgctgctgttcgccgtgcacttcgccgtggccgaggcccgtacttggcacagggaagggcgctggcgcgtgctgcggctcggagcctgggcgcggtggctgctggtggcgctgacggcggccacggcactggtacgcctcgcccagctgggtgccgctgaccgccagtggacccgtttcgtgcgcggccgcccgcgccgcttcactagcttcgaccaggtggcgcagctgagctccgcagcccgtggcctggcggcctcgctgctcttcctgcttttggtcaaggctgcccagcagctacgcttcgtgcgccagtggtccgtctttggcaagacattatgccgagctctgccagagctcctgggggtcaccttgggcctggtggtgctcggggtagcctacgcccagctggccatcctgctcgtgtcttcctgtgtggactccctctggagcgtggcccaggccctgttggtgctgtgccctgggactgggctctctaccctgtgtcctgccgagtcctggcacctgtcacccctgctgtgtgtggggctctgggcactgcggctgtggggcgccctacggctgggggctgttattctccgctggcgctaccacgccttgcgtggagagctgtaccggccggcctgggagccccaggactacgagatggtggagttgttcctgcgcaggctgcgcctctggatgggcctcagcaaggtcaaggagttccgccacaaagtccgctttgaagggatggagccgctgccctctcgctcctccaggggctccaaggtatccccggatgtgcccccacccagcgctggctccgatgcctcgcacccctccacctcctccagccagctggatgggctgagcgtgagcctgggccggctggggacaaggtgtgagcctgagccctcccgcctccaagccgtgttcgaggccctgctcacccagtttgaccgactcaaccaggccacagaggacgtctaccagctggagcagcagctgcacagcctgcaaggccgcaggagcagccgggcgcccgccggatcttcccgtggcccatccccgggcctgcggccagcactgcccagccgccttgcccgggccagtcggggtgtggacctggccactggccccagcaggacaccccttcgggccaagaacaaggtccaccccagcagcacttag

SEQ ID NO: 23021 - DNA, 14948 bp, Homo sapiens
  SIMILAR (5150)..(9706): 931254mologous to Homo sapiens Polycystic kidney disease 1 (PKD1) polypeptide,accession number W00870,Smith-Waterman Score= 7473.
atggggtctgtggagctgaggcggccccctgcccaccaggtcatggtattcccgggcctgcgtctgagccgtgaagccttcctcaccacggccgaatttgggacccaggagctccggcggcccgcccagctgcggctgcaggtgtaccggctcctcagcacagcagggaccccggagaacggcagcgagcctgagagcaggtccccggacaacaggacccagctggcccccgcgtgcatgccagggggacgctggtgccctggagccaacatctgcttgccgctggacacctcctgccaccccaggcctgcgccaatggctgcacgtcaggggccagggctactcggggccccctatgcgctatggagagagttcctcttctccgttcccgcggggccccccgcgcagtactcggtcaccctccacagccaggatgtcctcatgctccctggtgacctcgttggcttgcagcacgacgctggccctggcgccctcctgcactgctcgccggctcccggccaccctggtccccaggccccgtacctctccgccaacgcctcgtcatggctgccccacttgccagcccagctggagggcacttgggcctgccctgcctgtgccctgcggctgcttgcagccacggaacagctcaccgtgctgctgggcctgaggcccaaccctgggctgcggctgcctgggcgctatgaggtccgggcagaggtgggcaatggcgtgtccaggcacaacctgtcctgcagctttgacgtggtctccccagtggctgggctgcgggtcatctaccctgccccccgcgacggccgcctctacgtgcccaccaacggctcagcctcggtgctccaggtggactctggtgccagcgccacggccacggctcgctggcctgggggcagtgtcagcgcccgctttgagaatgcctgccctgccctggtggccaccttcgtgcccagctgcccctgggagaccaatgataccctgttctcagtggtagcactgccgtggctcggtgagggggagcacgtgatggacgttgtggtggaaaacagcgccagccgggccaacctcagcctgcgggtgacggcggaggagcccatctgtggcctccgcgccacgcccagccccgaggcccgtgtactgcagggagtcccagtcctgctggctggctcctcaggctacctggtgggctttaaattcctggaaagtcacggctctgacagcggctccgctaactcattccaccgtctcatttcacgaaatgaatttaaaactccgctccctgacctcacacgagtccccaggtacagccccgtggtggaggccggctcggacatggtcttccggtggaccatcaacgacaagcagtccctgaccttccagaacgtggtcttcaatgtcatttatcagagcgcggcggtcttcaagctctcactgacggcctccaaccacgtgagcaacgtcaccgtgaactacaacatcaccgtggagcggatgaacaggatgcagggcctgcgggtctctacagtgccagccgtgctgtcccccaatgccacgctggcactgacggcgggcgtgctggtggactcggccgtggaggtggccttcctgtggacctttggggatggggagcaggccctccaccagttccagcctccgtacaacgagtccttcccggttccagacccctcggtggcccaggtgctggtggagcacaatgtcacccacacctacgctgccccaggtgagtacgtcctgaccgtgctggcatctaatgccttcgagaaccggacgcagcaggtgcctgtgagcgtgtgcgcctccctgccctctgtgagcgtgtgcgcctccctgactggggcctgctgggtccagctgggtccagtacaccagaacgcacaccccagtgtcctctgccctgtgtatgcccttccgccgcccaggttggaaggtggcaaaccggatgagtatcctgggaggggaccttccagcaggccaaatagacctgtgttggaggtaaccccactcccacgccaggtgctgatccgcagtggccgggtgcccattgtgtccttggagtgtgtgtcctgcaaggcacaggccgtgtacgaagtgagccgcagctcctacgtgtacctggagggccgctgcctcaattgcagcagcggctccaagcgagggggatacaccttcacgctgacggtgctgggccgctctggcgaggaggagggctgcgcctccatccccctgtcccccaaccgcccgccgctggggggctcttgccgcctcttcccactgggcgctgtgcacgccctcaccaccaaggtgcacttcgaatgcatgggctggcatgacgcggaggatgctggcgccccgctggtgtacgccctgctgctgcagcgctgtcgccagggccactgcgaggagttctgtgtctacaagggcagcctctccggctacggagccgtgctgcccccgggtttcaggccacacttcgaggtgggcctggccgtggtggtgcaggaccagctgggagccgctgtggtcgccctcaacaggtctctggccatcaccctcccagagcccaacggcagcgcaatggggctcacagtctggctgcacgggctcaccgctagtgtgctcccggggctgctgcggcaggccgatccccagctcgtcatcgagtactcgctggccctggtcactgtgctgaacgagtacgagcgggccctggacgtggcggcagagcccaagcacgagcggcagcgccgagcccagatacgcaagaacatcacggagactctggtgtccctgagggtccacactgtggatgacatccagcagatcgctgctgcgctggcccagtgcatggggcccagcagggagctcgtatgccgctcgtgcctgaagcagacgctgcacaagctggaggccatgatgcgcatcctgcaggcagagaccaccgcgggcaccgtgacgcccaccgccatcggagacagcatcctcaacatcacaggagacctcatccacctggccagctcagacgtgcgggcaccacagcgctcagagctgggagccgagtcaccatcgcggatggtggcgtcccaggcctacaacctgacctctgccctcacgcccatcgtcacgcgctcccgcgtgctcaacgaggagcccctgacgctggcgggtggcctcgatggcgttccagacacaggccggcgcccagatccccatcgagcggctggcctcagagcgcgcctcaccgtgaaggtgcccaacaactcggactgggctgcccggggccaccgcagctccgccaactccgttgtggtccagccccaggcctccgtcggtgctgtggtcaccctggacagcagcaaccctgcggccgtgctgcatctgcagctcaactatacgctgctggacggccgctacctgtctgaggaacccgagccctacctggcagtctacctgcactcggagccccggcccaatgagcgcaactgctcggctagcaggaggatccgcccagagtccctccagggtgccgaccaccggccctacaccttcttcatttccccggggaccagagacccagtggggagttaccgtctgaacctctccagccacttccgctggtcggcgctggaggtgtccgtgggcttgtacacgtccctgtgccagtacttcagcgaggaggacgtggtgtggcggacagaggggctgctgcccctggaggagacctcgccccgccaggccgtctgcctcacccgccacctcaccgccttcggcaccagcctcttcgtgcccccaagccatatccgctttgtgtttcctgagccaacagcggatgtaaactacatcgtcatgctgacatgtgctgtgtgcctgggtgacctacatggtcatggccgccatcctgcacaagctggaccagttggatgccagccggggctgcgccatccccttctgtgggcagcggggccgcttcaagtacgagatcctcgtcaagacaggctggggccggggctcaggtaccacggcccacgtgggcattcatgctgtatggggtggacagccggagcggccaccggcacctgggacggcgacagagccttccaccgcaacagtctgggacatcttccagattcgccaccccgcacagcctggggtagcgtgttggaagatccgagtttttggcacgacaacaaagggctcagccctgccccggtttccttgcagcacatcatcgtcagggacctgcagacggcacgcagcaccttcttcctggtcaatgactggctttcggtggagacggaggccaacgggggcctggtggagaaggaggtgctggccgcgagtaaggcctcgttccgtgttcccactccgtcacgcagccctgttgcgcttccggcgcctgctgggggctgagctgcagcgtggcttctttgacaagcacatctggctctccatatgggaccggccgcctcgtagctatttcactcacatccagagggccacctgctgcgttctcctcatctgtctcttcctgggcgccaacgccgtgtggtacggggctgttggagactctgcctacagcacggggcgtgtgtccaggctgaacccgctgagcgtctacacagtcgctgttggcctggagtccagcggggttgtctatcccgtctacctggccatcctctttctcttccggatgtcccggagcaaggtggctgggagcccgagccccacacctgccgggcagcaggtgctggacgtcgacagctgcctggactcatccgtgctggacagctccttcctcacgttctcaggcctccacgctgagcttggactcaagaccctgtgcacctctcagcaggcctttgctggacagatgaagagtgacttgtttctggatgattctaagagatcgggcccggtccccgtccccttccctcccccctgccctaagccacctccacctctgtcctggctgcctcagggcgccctgaaaggaccaggacatgcgggaattaaaattgtcctggaagacatctttactttatggagacaggtggaaaccaaagttcgagctaaaatccgtaagatgaaggtgacaacaaaagtcaaccgtcatgacaaaatcaatggaaagaggaagaccgccaaagaacaatcaccccttctgcaagaaagcctctttgcaaccggagacgtctcccacaacctgctccgggcgctggacgttgggctcctggcgaacctctcggcgctggcagagctggatataagcaacaacaagatttctacgttagaagaaggaatatttgctaatttatttaatttaagtgaaataaacctgagtgggaacccgtttgagtgtgactgtggcctggcgtggctgccgcgatgggcggaggagcagcaggtgcgggtggtgcagcccgaggcagccacgtgtgctgggcctggctccctggctggccagcctctgcttggcatccccttgctggacagtggctgtggtgaggagtatgtcgcctgcctccctgacaacagctcaggcaccgtggcagcagtgtccttttcagctgcccacgaaggcctgcttcagccagaggcctgcagcgccttctgcttctccaccggccagggcctcgcagccctctccgagcagggctggtgcctgtgtgggtcagcccagccctccagtgcctccttcgcctgcctgtccctctgctccggccccccgccgcctcctgcccccacctgtaggggccccaccctcctccagcacgtcttccctgcctccccaggggccaccctgctagcagccttccacatcgctgccccgctccctgtcactgccacacgctgggacttcggagacggctcccccgaggtggatgccgctgggccggctgcctcgcatcgctatgtgctgcctgggcgctatcacgtgatggccgtgctggccctgggggccggctcagccctgctggggacagacgtgcaggtggaagcggcacctgccgccctggagctcgtgtgcccgtcctcggtgcagagtgacgagagcctcgacctcagcatccagaaccgtgttggttcaggcctggaggctgcctacagcatcgtggccctgggcgaggagccggcccgagcggtgcacccgctctgcccctcggacacggagatcttctctggcaacgggcactgctaccgcctggtggtggagaaggcggcctggctgcaggcgcaggagcagtgtcgggcctgggccggggccaccctggcaatggtggacagtcccgccgtgcagcgcttcctggtctcccgggtcaccaggagcctagacatgtggatcggcttctcgactgtgcagggggtggaggtgggcccagcgccgcagggcgaggcctttagcctggagagctgccagaactggctgcccggggagccacacccagccacagccgagcactgcgtccggctcgggcccaccgggtggtgtaacaccgacctgtgctcagcgctgcacagctacgtctgcgagctgcggcctggaggcccagtgcaggatgccgagaacctcctcgtgggagcgcccagtggggacctgcagggacccctgatgcctctggcacggcagtacggcctctcagccccgcatgagcccgtggaggtcatggtattcccgggcctgcgtctgagccgtgaagccttcctcaccacggccgaatttgggacccaggagctccggcggcccgcccagctgcggctgcaggtgtaccggctcctcagcacagcagggaccccggagaacggcagcgagcctgagagcaggtccccggacaacaggacccagctggcccccgcgtgcatgccagggggacgctggtgccctggagccaacatctgcttgccgctggacgcctcctgccaccccaggcctgcgccaatggctgcacgtcaggggccagggctactcggggccccctatgcgctatggagagagttcctcttctccgttcccgcggggccccccgcgcagtactcggtcaccctccacggccaggatgtcctcatgctccctggtgacctcgttggcttgcagcacgacgctggccctggcgccctcccgcactgctcgccggctcccggccaccctggtccccaggccccgtacctctccgccaacgcctcgtcatggctgccccacttgccagcccagctggagggcacttgggcctgccctgcctgtgccctgcggctgcttgcagccacggaacagctcaccgtgctgctgggcctgaggcccaaccctgggctgcggctgcctgggcgctatgaggtccgggcagaggtgggcaatggcgtgtccaggcacaacctgtcctgcagctttgacgtggtctccccagtggctgggctgcgggtcatctaccctgccccccgcgacggccgcctctacgtgcccaccaacggctcagcctcggtgctccaggtggactctggtgccagcgccacggccacggctcgctggcctgggggcagtgtcagcgcccgctttgagaatgcctgccctgccctggtggccaccttcgtgcccggctgcccctgggagaccaatgataccctgttctcagtggtagcactgccgtggctcggtgagggggagcacgtgatggacgttgtggtggaaaacagcgccagccgggccaacctcagcctgcgggtgacggcggaggagcccatctgtggcctccgcgccacgcccagccccgaggcccgtgtactgcagggagtcccagtgaggtacagccccgtggtggaggccggctcggacatggtcttccggtggaccatcaacgacaagcagtccctgaccttccagaacgtggtcttcaatgtcatttatcagagcgcggcggtcttcaagctctcactgacggcctccaaccacgtgagcaacgtcaccgtgaactacaacatcaccgtggagcggatgaacaggatgcagggcctgcgggtctccacagtgccggccgtgctgtcccccaatgccacgctggcactgacggcaggcgtgctggtggactcggccgtggaggtggccttcctgtggacctttggggatggggagcaggccctccaccagttccagcctccgtacaacgagtccttcccggttccagacccctcggtggcccaggtgctggtggagcacaatgtcacgcacacctacgctgccccaggtgagtacgtcctgaccgtgctggcatctaatgccttcgagaaccggacgcagcaggtgcctgtgagcgtgcgcgcctccctgccctccgaggctgtgggtgtgagtgacggcgtcctggtggccggccggcccgtcaccttctacccgcatctgctgccctcgcctgggggtgttctttacacgtgggacttcggggacggctcccctgtcctgacccagagccagccggctgccaaccacacctatccctcgaggggcatctaccacgtgcgcctggaggtcaacaacacggtgagcggtgcggcggcccaggcggatgtgcgcgtctttgaggagctccgcgggctcagcgtggacatgagcctggccgtggagcagggcgcccccgtggtggtcagtgccgcggtgcagacgggcgacaacatcacgtggaccttcgacatgggggacggcaccgtgctgtcgggcccagaggccacagtggagcatgtgtacctgcgggcacagaactgcacagtgaccgtgggtgcggccagccccgccggccacctggcccggagcctgcacgtgctggtcttcgtcctggaggtgctgcgcgtcgagcccgccgcctgcatccccactcagcctgacgcgcggctcacggcctacgtcaccgggaacccggcccgctacctcttcgactggacctttggggatggctcctccaacacgaccatgcgggggtgcccgacggtgacacacaacttcacgcgtagcggcacgttccccctggcgctggtgctgtccagccgcgtgaacagggcgcgttacttcaccagcatctgcgtggagccagaggtgggcaacgtcaccctgcagccagagaggcagtttgtgcagctcggggacgaggcccggctggtggcatgtgcctggcccccgttcccctaccgctacacctgggactttggcaccgaagaagccgtccccgcccgtgtcgggggccctgaggtgacgttcatctaccgagacccaggctcctatcttgtgacagtcaccgcgtccaacaacatctccgctgccaatgactcagccctggtggaggtgcaggagcccatgctggtcaccagcatcaaggtcaatggctcccttgggctggagctgcactacctgtgggatctgggggacggtgggcggctcgagggtccggaggtcacccacgcttacaacagcacaggtgacttcaccgttagggtggccggctgcaatgaggtgagccgcagcgaggcctggctcaatgtgacggtgaagcggcgcgtgcgggggctcatcgtcaatgccagctgcacggtggtgcccctgaatgggagcatgagcttcagcacctcgctggaggccggcagtgatgtgcgctattcctgggtgctctgtgaccgctgcacgcccatctctggggctgagaacgaggtgggctccgcccaggacagcatcttcgtctatgtcctgcagctcatagaggggctgcaggtggtgggcggtggccgctacttccccaccaaccacacggtacagctgcaggccgtggtcagggatggcaccaacatctacagctggactgcctggagggacaggggcccggccctggccggcagcggcaaaggcttctcgctcactgcgctcgaggccggcacctaccatgtgcagctgcgggccaccaacatgctgggcagcgcctgggctgactgcaccgtggacttcgtggagcctgtggggtggctgatggtggccgcctccccgaacccagctgccgtcaacacaagtgtcaccctcagtgccgagctggctggtggcagtggtgtcgtatacacttggtccttggaggaggggctgagctgggagacccccgagccatttaccacccacagcttccccacacccggcctgcacttggtcaccatgacggcagggaacccgctgggctcagccaacgccaccgtggaagtggatgtgcaggtgcctgtgagtggcctcagcatcagggccagcgagccgggaggcagcttcgtggcggccgggtcctctgtgcccttttgggggcagctggccacgggcaccaatgtgagctggtgctgggctgtgcccggcggcagcagcaagcgtggccctcatgtcaccatggtcttcccggatgctggcaccttcaacatccggctcaatgcctccaacgcagtcagctgggtctcagccacgtacaacctcacggtggaggagcccatcgtgggcctggtgctgtgggccagcagcaaggtggtggcgcccgggcagcttgtccattttcagatcctgctggctgccggctcagctgtcaccttccgccggcaggtcggcggggccagccccgaagtgctccctgggccccgtttctcccacagcttcccccgcatcggagaccacgtggtgagcgtgcagagcaaaaaccacgtgagctgggcccaggcgcaggtgcgcatcgtggtgctggaggccgtgagcgggctgcaggtgcccaactgctgtgagcctggcatcgccatgggcactgagaggaacttcacagcccgcgtgcagcgcggctctcgggtcgcctacgcctggtatttctcgctgcagaaggtccggggcgactctctgttcatcctgtcgggccgcgacgtcacctacacgccgtggccgcggggctgttggagatccagtgagaaccgcacgctggtgctggaggttcaggacgccgtccagtatgtggccctgcggagcggcccctgcttcaccaaccgcttggcgcagtttgaggccgccaccagccccagcccccggcgcgtggcctaccactgggactttggggatgggtccccagggcaggacacagataagcccagggccgagcactcctacctgaggcctggggactaccgcgtgcaggtgaacgcctccaacctggtgagctttttcgtggcgcaggccacggtgaccgtccaggtgctggcctgccgggagccggaggtggacgtggtcctgcccctgcaggtgctgatgcgacgatcacagcgcaactgcctggatgcctacgttgacctgcgcgactgtgtcacctaccagactgagtaccgctgggaggtgtaccgcaccgccagctgccagcggccggggtgcccggcgcgtgtggccctgcccggcgtggacgtgagccggcctcagctggtgctgccgcggctggcgctgcctgtggggcactactgctttgtgtttgtcgtgtcatttggggacacgccactggcacggagcatccaggccaatgtgacggtggcccccgagcgcctggtgcccatcactgagggtggctcctaccgcgtgtggtcagacacacaggacctggtgctggatgggagcgagtcctacgaccccaacctggaggacggcgaccagacgccgctcagtttccagtgggcctgtgtggcttcgacacagagggaggctggcgggtgtgcgctgaactttgggccccgcgggagcagcacggtcaccattccacgggaacggctggcagctggcgtggagtacaccttcagcctcaccgtgtggaaggccggccgcaaggaggaggccaccaaccagacgtgctggtggaggccgcgcgctctcccctctctgtttctgatgcaaattctatgtaacacgacagcctgcttcagctttgcttccttccaaacctgccacagttccacatacagtcttcaagccacatatgctctagtgacaaaagctacacagtcccccagcaataccaacaggtccagctggctccagtacaccagaacacacaccccagtgtcctctgccctgtgtatgcccttccgccgcccaggttggaaggtggcaaaccggatgagtatcctgggagggggctggcatgacgcggaggatgctggcgccccgctggtgtatgccctgctgctgcagcgctgttgccagggccactgcaaagagttctgtgtctacaagagcagcctctccggctacggagccgtgctgcccccgggtttcaggccacacttcgaggtgggcctggccgtggtggtgcaggaccagctgggagccgctgtggtcgccctcaacaggtctctggccatcaccctcccagagcccaacggcagcgcaatggggctcacagtctggctgcaccggctcaccgctagtgtgctcccggggctgctgcggcaggccgatccccagcacgtcatcgagtactcgctggccctggtcactgtgctgaacgaggggcccagcagggagctcgtatgccgctcgtgcctgaagcagacgctgcacaagctggaggccatgatgcgcatcctgcaggcagagaccaccgcgggcaccgtgacgcccaccgccatcggagacagcatcctcaacatcacaggagacctcatccacctggccagctcagacgtgcgggcaccgcagcgctcagagctgggagccgagtcaccattgcggatggtggcgtcccaggcctacaacctgacctctgccctcatgcgcatcctcacgcgctcccgcgtgctcaacgaggagcccgctttcagcagggccccggccaacctcagtgacgtggtgcagctcgtctttctggtggactccaatccctttctctttggctatatcagcaactacaccgtctccaccaaggtggcctcgatggcgttccagacacaggccggcgcccagatccccatcgagcggctggcctcagagcgcgccatcaccgtgaaggtgcccaacaactcggactgggctgcccggggccaccgcagctccgccaactccgttgtggtccagccccaggcctccgtcggtgctgtggtcaccctggacagcagcaaccctgtggccgtgctgcatctgcagctcaactatacgctgctggacggccgctacctgtctgaggaacccgagccctacctggcagtctacctgcactcggagccccggcccaatgagcgcaactgctcggctagcaggaggatccgcccagagtccctccagggtgccgaccaccggccctacaccttcttcatttccccggggaccagagacccagtggggagttaccgtctgaacctctccagccacttccgctggtcggcgctggaggtgtccgtgggcttgtacacgtccctgtgccagtacttcagcgaggaggatgtggtgtggcggacagaggggctgctgcccctggaggagacctcgccccgccaggccgtctgcctcacccgccacctcaccgccttcggcgccagcctcttcatgcccccaagccatgtacgctttgtgtttcctgagccgacagcggatgtaaactacatcgtcatgctgacatgtgctgtgtgcctggtgacctacatggtcatggccgccatcctgcacaagctggaccagttggatgccagccggggctgcgccatccccttctgtgggcagcggggccgcttcaagtacgagatcctcgtcaagacaggctggggccggggctcaggtaccacggcccacgtgggcatcatgctgtatggggtggacagccggagcggccaccggcacctggacggcgacagagccttccaccgcaacagtctggacatcttccagatcgccaccccgcacagcctgggtagcgtgtggaagatccgagtgtggcacgacaacaaagggctcagccctgcctggttcctgcagcacatcatcgtcagggacctgcagacggcacgcagcaccttcttcctggtcaatgactggctttcggtggagacggaggccaacgggggcctggtggagaaggaggtgctggctgcgagtcacgcaggccgtgttgcgcttccggcgcctgctggtggctgagctgcagcgtggcttctttgacaagcacatctggctctccatatgggaccggccacctcgtagctgtttcactcgcatccagagggccacctgctgcgttctcctcatctgcctcttcctgggcgccaacgccgtgtggtacggggctgttggtgactctgcctacagcacggggcatgtgtccaggctgagcccgctgagcgtcgacacagtcgctgttggcctggtgtccagcgtggttgtctatcccgtctacctggccatcctctttctcttccggatgtcccggagcaaggtgctggacatcgacagctgcctggactcgtccgtgctggacagctccttcctcacgttctcaggcctccacgctgaggtgagggctctactgggggtcctgggctgggctgggggtcctgccgccttggcgcagcttggactccagacactgtgcacctctcagcaggcctttgctggacaggtgaagagtgacttgtttctggatgattctaagagatcgggcccggtccccgtccccttccctcccccctgccctaagccacctccacctctgtcctggctgcctcagggcgccctgaaaggaccaggacatgcgggaattaaaattgtcctggaagacatctttactttatggagacaggtggaaaccaaagttcgagctaaaatccgtaagatgaaggtgacaacaaaagtcaaccgtcatgacaaaatcaatggaaagaggaagaccgccaaagaacagtaa

SEQ ID NO: 23022 - DNA, 442 bp, Homo sapiens; identical to SEQ ID NO: 20736
  SIMILAR (1)..(129): 651254mologous to Homo sapiens cytokeratin 8,accession number M34225,Smith-Waterman Score=117.
  misc_feature (1)...(442): n = a,t,c or g

SEQ ID NO: 23023 - DNA, 569 bp, Homo sapiens
  SIMILAR (4)..(555): 721254mologous to Homo sapiens cytokeratin 8,accession number M34482,Smith-Waterman Score=628.
  misc_feature (1)...(569): n = a,t,c or g
gtctccggaattcccgggtcgagcttctcccgagtgggcagcagcaactttcgcggtggcctgggcggcggctatggtggggccagcggcatgggaggcatcaccgcagttgcggtcaaccagagcctgctgagcccccttgtcctggaggtggaccccaacatccaggccgtgcgcacccaggagaaggagcagatcaagaccctcaacaacaagtttgcctccttcatagacaaggtacggttcctggagcagcagaacaagatgctggagaccaagtggagcctcctgcagcagcagaagacggctcgaagcaacatggacaacatgttcgagagctacatcaacaaccttaggcggcagctggagactctgggccaggagaaggagcagatcaagaccctcaacaacaagtttgcctccttcatagacaaagtacggttcctggagcagcagaacaagatgctggagaccaagtggagcctctgcagcagcagngaacggtcgaagcacatggacacatgttcagagctcatcacaaccttagcgggcgtctagaggatcagcta

SEQ ID NO: 23024 - DNA, 422 bp, Homo sapiens
  SIMILAR (253)..(420): 851254mologous to Rattus norvegicus b isotype of B regulatory subunit of protein phosphatase 2A,accession number D14421,Smith- Waterman Score=243.
tgtcgtagaaatgtaaggcagtgcttcctggcgctgatggcaaaatgggacccatctccagttattcctcgggcaccccagctttgcaaatctgggaaagaacctacataaacatattggtgatgtagccagcttaaaaggccgagagaatccttatggattcaggagactgtttttttatttagatttttattttttatttggaagatgaaatgcttctctcgttacctgccttacatcttcagacctccgaacaccatcctttcttccagctgccacacagaagctgacattatctctacggtagaattcaaccacacgggagaattactggcgacaggggacaaggggggtcgggttgtaatatttcaacgagagcaggagagtaaaaatcaggttcatcgtaggggtgaatacaatgt

SEQ ID NO: 23025 - DNA, 1530 bp, Homo sapiens
  SIMILAR (168)..(731): 581254mologous to Homo sapiens Keratin 8,accession number X74929,Smith-Waterman Score=442.
ctggcctagccactcaggtacgaggcctttcccccccatcccccggggctgggatctcttttataaaaggccattcctgagagctctcctcaccaagaagcagcttctccgctccttctaggatctccgcctggttcggcccgcctgcctccactccagcctctaccatgtccatcagggggacccaaaagtcctacaaggggtccacctctggcccccgggctttcaagcaagccgcttcctaacaacgaagtgggcccggtttccgcatcagctcctcgagcttctcccgagtgggcagcagcaactttcgcggtggcctgggctggcggctatggtggggccagcggagatgggaggcatcaccgcagttacggtcaatcaaccagagccctgctgagcccccttgtccttgaggtggaccccaacatccaggccgtgcgcacccaggagaaggagcagatcaagaccctcaacaacaagtttgcctccattcataggacgaggtagggttcctggagcagcagaacaagatgctgggaaccaagtggagcctcctggaccagcagaagaccgcctcgaagcaacatgggacaacatgttcagagagctacatcaacaaccttaggcggcagctggagactctggcccaggagaagctgaagctggaggcggagcttggcaacatgcaggggctggtggaggacttcaagaacaactatgaggatgatgatcaataagagtacagagacggagaatgaatttgtcctcatcaagaaggatgtggatgaagcttacattaacgagctgtatgaagaggagatccgggagctgcagtcccagatctcggacacgtctgtggtgctgtccattgacaacagccgctccctggacacggacagcatcatcgctgaggtcaagactgagatctctgagatgaaccggaacatcagctggctccaggctgagactgagggcctcaaaggcgggaggatttccctggaggccggcatcgcagatgcggagcagcgcagggagctggtcattaaggatgccaacgctaagctgtccgagctggaggccgcccttcagcagaccaagaagctgctggaagatggagaacatgagtatccatacgaagaccaccagcggctatgcaggtggtgtgagcttggcctatgggggcctcacaggctctggcctcagctacggcctgagctccagctctcgctctggcgcaggttccagctccttcagccgcaccagctccaccagggccatggttgtgaagaagatcaagacccgagatgggaagctgctgacattatctctacggtagaattcaaccacacgggagaattactagcgacaggggacaaggggggtcgggttgtaatatttcaacgagagcaggaggtgtgccagaatatgcaggaggaaaaaaacatagtttatttgccaacagatgtgaagaggacaacttgggacagcagagaagaaaatgatagcttacctcacctaagggggtaa

SEQ ID NO: 23026 - DNA, 654 bp, Homo sapiens; identical to SEQ ID NO: 1042
  SIMILAR (208)..(489): 841254mologous to Homo sapiens glyceraldehyde 3-phosphate dehydrogenase (EC 1.2.1.12),accession number J02642,Smith-Waterman Score=394.

SEQ ID NO: 23027 - DNA, 509 bp, Homo sapiens
  SIMILAR (170)..(205): 661254mologous to Sus scrofa glyceraldehyde-3-phosphate dehydrogenase,accession number U48832,Smith-Waterman Score=52.
atgactgcttttaactctggtaaagtggatattgttgccatcaatgaccccttcattgacctcaactacatggtctacatgttcctgtatgattctacacatggcaaattccatggcaccgtcaaggctgagaacgggacgcttgtcatcaatggaaaccccatcacccattttccaggaccaagatccctccaaaatcaaatgggcgccccagccaaggtcatccatgacaactttggtatcatagaaggattcatgaccacagttcacaccatcactgccacccagactataaatggcccctccgggaaactgtcacgtgatggctgcagggctctccaggacatcatccctgtctctactggcgctgccaagcctgtgggtaaggtcatccctgagctgaacgggaagctcactggcatggccttccatgtccccactgccaatgtgtcagtggcggacctgacctgtcgtctggaaaaacctgccaatatgatgacatcaagaag

SEQ ID NO: 23028 - DNA, 1330 bp, Homo sapiens
  SIMILAR (93)..(1115): 521254mologous to Caenorhabditis elegans C. elegans glyceraldehyde 3-phosphate dehycrogenase 3 (SP:P17330),accession number U49941,Smith-Waterman Score=696.
  misc_feature (1)...(1330): n = a,t,c or g
acgcgtccgcccacgcgtccgctgttcgacagtcagccgcaatcttcttttgcgtcgccagccgagcgcacatcgctgagacaccactggggaaggtgaaggtcggagtcaacggatttggtcgtattgggcgcctggtcaccagggctgcttttaactctggtaaagtggatattgttgccatcaatgaccccttcattgacctcaactacatggtttacatgttccaatatgattccacccatggcaaattccatggcacccgtcaaggctgagaacgggaagcttgtcatcaatggaaatcccatcaccattcttccaggaagcgagatccctccaaaatcaagtggggcgaatgctggcgctgagtaccgtcgtggaagtccacttggcgtcttcaaccaaccatggagaaaggctgggggctcaatttgcaagggggggagccaaaaggggtcatcaatctctgccccctctgctgaatgccccccatgtttcgtcatggggtgtgaacccatgaagaagtatgacaaacaagncttcaagattcatcagcaatggcctcctgcaccaaccaactgctttagcaccccttggccaaaggttaattccatgacaactttggtaattcgttggaaggacttcatgaccacaagtccatggcaatcactgccaaccccagaaagactgtggattggcccctcccggggaaaactgtggccgttaatgggccgcggggctcttccagaacatcatccctgcctctactgggcgctgccaaggctgtgggcaaggtcatccctgagctgaacgggaagctcactggcatggccttccgtgtccccactgccaacgtgtcagtggtggacctgacctgccgtctagaaaaacctgccaaatatgatgacatcaagaaggtggtgaagcaggcgtcggagggccccctcaagggcatcctgggctacactgagcaccaggtggtctcctctgacttcaacagcgacacccactcctccacctttgacgctggggcttggcattgcccttcaacgaccactttgtcaagctcatttcctggtatggacaacgaatttggctacagcaacagggtggtgggacctcatgggcccacatgggcttccaagggagttaagacccctgggaaccaccagccccagcaagagcacaagaagggaagagagagaccctcaactgctggggagtccctgccacactcagtcccccaccacactgaattctcccctccttaaagttgcaatgttaacccctttaaaaagggaaggggcctagggagccgcaccttgtcatg

SEQ ID NO: 23029 - DNA, 350 bp, Homo sapiens
  SIMILAR (349)..(38): 1001254mologous to Escherichia coli N-acetylglucosamine transport protein,accession number M19284,Smith-Waterman Score=528.
cgacgctcaagcgtcgcatcaggcataaagcagattactttttgatttcatacagcggggtttgacccgccacaatatggccctgagctttaatgatcaagccactgaaatcgtcgatattgctgcaaaccaccgggctaatcatcgagcgggcgttagcgttcaggtaatccagatccatttccagaatcggttgccctgcgcttacctgcgcaccctcttccaccagacgtttaaagcctttaccttccagcgctacggtgtcgatacccatatggacgacgatctccgcgcctttttcggtttccaggcagaacgcgtggttggtgttgaaaattttcacgattgtc

SEQ ID NO: 23030 - DNA, 2327 bp, Homo sapiens
  SIMILAR (2176)..(446): 1001254mologous to Homo sapiens 23-APR-1998 Human PRO201 (Nsp1) protein encoding cDNA clone DNA30676,accession number Z32137_cd1,Smith-Waterman Score=3020.
ttttttttttttttttacattttttaaaagttttttatttttcagtttttgtagagatgaggtctcaccatgttgccctggctggtcttgaactcctggcctcaagccttccttccgcctcggcctcccaaagtgctgagattacaggcctgagctgctgtatggctatgattttgttaaaggccgacacagaggtgaagtcaactgctagaaatcacggcttttaagaggtggagtcacatttgaactctggcctctgatgccagatctgcaggtcacatgttcaccatggtccaggtgaccctgactgcggtccccacctcttctgtgaggcacagggcaggattccacctgaggcgcgaggagcctgggacgactcctttggtctcttctggggttcgcaaaaacctgggggtcccgggtgtgaagaagggtgtctgcgctctcagcggtcaggctccaggcgctgcgacaggacgccgaggacgcgctggaacttctcaaagcgttcagcgcgcggagctcccgcgccccggctaccccagagcagcctccgcacgaagccggtggtcagggcctccctcagctccgggttaggccggaatcctcgcaggcgctgggctgccaccttgcggaatttgggtgcgtcccggaccatgtgacgcgccccgtgcagggtgcgcaacagccgctcacagctctcgtccagcggccccgcgacttcctcgccctccagtaggcgaaccatgggtgccacgtgcggcagcgccacctcgccggggtcgcagggtccagcgccctcatccagagcccgcatcagcggcttcagctcctgctcaaaggccagcgcagcctccgtgtggctccttcggagctggcgccacgtgtgctccaaccgggacacctggggcatgagcagggcgcccatgactgcagccagcccgggcaggtcccccgccgcccctggccgcagcgccagcgccagctctaccagtcccctcagtgcggctgcgcgctcctccagcggccccgagcagcccagcaccgccagcgccccggccagcgccagtgtctgatgcctctccagcagttccaacctcaagtggtgtccatggggaagagtgagcagctccaggccagatgagactcccatgttgccccgctgatctctggtcactcccaggaggcctgtggcctggcagtctaccaatagcaggtgaagggcggtgctcccaggatggtgctccaggaacaggccacggagggtatgcaggacttggggttccaggggccgattctgggggcccagcaggcaggagggggcatcatgggggcagaaagagatctcagcctgtggtcttgtaaaacatctattctcttcctcctcatcctcctcggcctcccaccatggggcctctggctctgggcagctttggctcggggatgttccctggacactgggcactcggggcaccagctcgcagtacgtcgggggacgttcagaggcatcaggcagttcgaaggagggtgtccgggggggcttcgttggtgccttggcttgaagctgcccatcggaggccctgagactgtcggcaacagttcccaggggagcaggggccttcagcaacaccgggtcactgctcgttcggggcaaggcagatatgggcatggtggaggcttccatcccagcggggtcttctcttgaccgccccatatgtgccaaatctgcaggctgactgttgctccacttccttgccctgagaggctctatccgagctgggccatccatcagggtgtcctcgctaaagctgcgtcgcagaggcccctgccaagtcacaggcctggagaccacagcccctgtggcctgggacagtgggcgcctgcctgtcatataactgtgaaccagagccggtatgctggggaattgctcatcctccagttgaaagagggctgtgggtcggcctggccggggacgcagggccacacggaacacctcaaaatggagggctgagccccgccagcggcaggagatcacggggttgcccccacgggacccagaggcgcgaaccaggaagtcgccatcttgctgaagaagagcttcagccttctggcgggacaggaggccgtggtaccagggttggccagcaaggtcttctccatcctgtggcacctgcatggagctcttgggaacagagggtgccagggctgagctctgcactttcaacaggcctcagtcttccacatctgggcaggacccgcggggctcccacgaggctgggtccaggcggaagctgaggctccgcggctccgggctgctgtcacccccg

SEQ ID NO: 23031 - DNA, 303 bp, Homo sapiens
  SIMILAR (234)..(79): 921254mologous to Escherichia coli K12 orf, hypothetical protein,accession number AE000493,Smith-Waterman Score=241.
ttagcgcaagcgaagctcttgatcgaagccccggtaaacggcggccgtaactataacggtcctaaggtagcgaaattccttgtcgggtaagttccgacccttatcgaattcaaaagcgccaacgtccttgatgtataaccgtccacggaacaggatctttacgtacttcgccacctgaagtgggttgtaccgttggaaaattttcattgttatctcctgctgagtattacgcctgcctgctgttgccgatgatggcttccgcacatcagttcgaaaccggtcagcgagtgccgcgattggcat

SEQ ID NO: 23032 - DNA, 605 bp, Homo sapiens
  SIMILAR (3)..(383): 991254mologous to Escherichia coli N-acetylglucosamine transport protein,accession number M19284,Smith-Waterman Score=633.
tcctgaccggtgtgactgagccgctggaattcctgttcatgttccttgctccgctgctgtacctcctgcacgcactgctgaccggtatcagcctgtttgtggcaacgctgctgggtatccacgcgggcttctctttctctgcgggggctatcgactacgcgttgatgtataacctgccggccgccagccagaacgtctggatgctgctggtgatgggcgttatcttcttcgctatctacttcgtggtgttcagtctggttatccgcatgttcaacctgaaaacgccgggtcgtgaagataaagaagacgagctcgttactgaagaagccaacagcaacactgaagaaggtctgactcaactggcaaccaactatattgctgcggctcggatcgttggcgtcgagcttatcgccgtccttagagacacgggccgcgtttctccagctgtcggaagtctcaccagcgtcgcttcgggcttcccgccagagctgacgcaccgggataacggtggtccccagcgactgtaccgtgagcgtactgcagcggcccgctgtcccgcaccacaagtccttaccgcagctccaaaagcctacagcgatgagtga

SEQ ID NO: 23033 - DNA, 1536 bp, Homo sapiens
  SIMILAR (667)..(1092): 421254mologous to Bacteriophage N15 gp5,accession number AF064539,Smith-Waterman Score=189.
atgcgacgcgtagcatccatctttcgatacggatattcctgctgcgacgctcgcggagggaatatcagcgtcgatacgctggttgtcggcgcgggtgactacacctggaaggccgtaactatcagggcacgaggtggaagcggacaaaacgttacacattgcgcaaaacggaacggtgtcgccgagggtgattatggattccgcctcacgaccgcaccagctgacgttagccgaacatggcggagcctatggcgcaacggccgatattcggcaaaaatcggtggtgaaggggatctggcaatcaatacggtgcgacggtttcgctttccaacggtcagaacgactatcagggggcaacctacgttagatggggacattacgtaccgatgcggatggtgcacttggcaacaaccggaactgaacatcagcaacgcggacatcgtcgatcttaatggatcgacgcgacgggcatacctttgggtttcgaacaccacagagtggcatcgttcgatgactcgtcctaaggtagaggtgggatggggactattgtccgcgttcaatgcccacctttgggctaagagcatcggtccctcatacagcgtacaacattggcatggttctcacaagagggatcgctatatgatagttgggcatcacccggctgacaataccgtctctggcatcacgcttgatgccggacaaatagccgaaccgctgcgctgtttggtgaggatgatgacatggatccccgtccatcacgcagcttcaggtggcaaatggtatcgcggtcttgccggtttccggcacgctggtcgtaaaacccccttattccgggatgacgggttacaacggatcattgctcgcctgcagcaggcaatcagtgaccccggcgttgacggcatcttctggatatggatacgccgggtggaatggtgtccggggcgtttgacgcgccgacattattgcccgtatgcgcgatatcaaacccatctgggcgctgccaatgacatgaactgcagtgcagcttattgccagttcggcatgcgacggctggtcacacaaacggccagaaccggctccattggggtcatgtggcgcacagtaactatggcgctgcgctcaaaactaacggcgttgaggtacgctgatttacagcggcgatcgcaaggtgcgacggcaacccttacgaaagcttccgtaaagatgtgcgtgctgatttccagacgcgtatcgatgccatcgtcagatgtttgccgaaataggtttccgcttataccggcatgtctgtcaggacgtgctgacaccgaagcggcagtattctccggccaagaatcttggataacgggctggcggagtaactggtacacaccgattggctggggtatgggagacctgagagcgaaaaaatcttgtggaattccaccttggatgcgacaacacctgactggcaccaacggttttgaagcgacgcaaaaagtttatgacgcaaagtggcgtgtggggagaaatgcgttgagaaggaaggacgacgactaa

SEQ ID NO: 23034 - DNA, 1680 bp, Homo sapiens
  SIMILAR (1368)..(1264): 411254mologous to Plasmid ColIb-P9 100 pct identical to gp:CIBIBIMM_4,pir:H25035,accession number AB021078,Smith-Waterman Score=84.
atggtgaaaaaggaattatgttctcataaaaactggacagaagctttggagaaacttctttgtaatgcgtgtattcatctcacagagttgaaacttattttgattgagcagtttggaaaccgtctttttgtagaatcagcaaatgatatttatgagggccttgaggtctcaggaaaagcctctaagcatcaggtaacatcaatcgtaccccaaaccgacacaggtggtcaggtgaagcgacttgctcgtggagctgaaatagtcgaagataccagctggctgcaactgtttattaaaaacacagcactggcaaacacgaaagtggacgtatacggtgtgacgcctgcccggtgccggaggttaattgatggggttagcgcaagcgaagctcttgatcgaagccccggaaacggtggccgtaactataacggtcctaagtgtagcgaaattccttgtggtgtctggtgggtagtttgctggggcggtctcctcctaaagagtaacggaggagcacgaaggttggctatcctggtcggacatcaggagacagttcggtccctatctgccgtgggcgctggagaactgaggggggcgctcctagtacgagaggaccggagtggacgcatcactggtgttcgggtttcatgccaatggcactgcccgcaaatctatggggcacagccccttaaaaagaaagccaaagagaatagcaggacaatggctccccttagaggtgtcatgaaaaaggcagaaaagggcaccaagctccaaccggcagcaccagacctgacgggacactatcagcatgcagaagttgccaacaagggcaagggatgccagcaagtgcaggggtgccggcaagacagatgggatctacaggaaacctgcctcacttggtctgaccatactttctgggcttgtcctcaaaggcccaacacacagggtaactacacggtgggatctcaactaaatggaccggatcgcgggaagccacgaagagatttgggtgtcatcagtaatacatgggacctgaaagccccgattcctattaagttcccctgtgaagattacggatataacaatttcaaaccaagtcccaataacgctcggacagtgcggaagcctatggtgaaaaaggaaatatcttcacaaaaaacgataatagggagagcaagctacctaaaggatttagaaaaacagaggccagagagtataccagaacagtgcatcaccagaaagagggagcacagagcaggcagcaagggaaggaccccaccagcactcccacaagcacccccctaccaccccaccctgccccgacataatggtgtcaagccaccaaaatgcagggaagaaggcggctggaggccgcagcatctacaacatcttagcattttaactcacacatcctacgggttacttggcaaagtggggccacagaacactttgaagtatggcaatcaaatggcccagttgataacaatcccacaaagacaaacaatgatctgggagacgggacccgaaaaggggaccacagcggacacgggtggcatcagaaaaaaaatcgcacataatggaaacccaacaaacaaccgtatggggatcaagtttgcaaagagaaacaggaaccgggaccccaatggagaggcccaacaaacaccccacggagcaagacagtaa

SEQ ID NO: 23035 - DNA, 1914 bp, Homo sapiens
  SIMILAR (604)..(416): 281254mologous to Lycopersicon esculentum BAC19.13,accession number AF273333,Smith-Waterman Score=42.
tcactcttcctgcttctgtgtctgttcgtggctgtcgtggcggcttcgttgcgctgcatcttctcctttccttagcgtcttgtgttgtcgttgtcgtctggtctttgtcgtctgttctggtcgtgttcgctgtcgctgtccttcgtgggtttcacttctctcttctgcttctctctgccgtctttcgtcgctctctcgttttccctctcctctcgtctccctcctctcttctctcttccttcttccttctcttctcttgctttcttctcttcctctctcttcttcttggtttttcgctcctctctgctctcgctctcttcttcgagctctgattcgatcctcgccccccccctcagtttcttcttttgttgtgtcttgttctgttggtgtcgcgtctcttggtttgattagtgtctttgttgttgctgctagtgctggttcctttattgttgtgctcgagctgtcccgtttggaggcgattgtgtacgtgtgttctcggctcatcattgtttgggcgcttccttgtggatctgctgctgggcgttttttttgccttgtgacttgtcggtgtttgttgccatactttggttttttttgtgtctttccggtgttgattctgtctgtgtgctggggtccatgggccccatggtgtgttggtgtccttgtgtgtgggcgcgtgccgttgcggtcacgcggccccgagtcgctaatgttaatttcgtctgtatccacccaaggtcgcacaacttgcaggctctggcagcaaaccgtttgttggggaaagggggccagaattcggggtcgctgggcctctttcttttctgctttttttggacttctcctatttctgggtctagttatatgggggcgtaatgttgttcctctggccaaaggggcagacgttaaaagctttttgggggtaaatccggccacatggggtgttgtttcacccacggtgccaccagtacctttttggttgttattaccggttcggtgcaccaaggtggccaccaaaagctttgttgcaattggccctgggccaacggtgcttgacctgtccgacaagaatttcgctaccttaggaccgttatagttacggccgccgtttaccggggttcgatcaagagcttcgcttgcgctaaccccatcaattaaccttccggcccgggcaggcgtcacaccgtatacgtccactttcgtgtttgcacagtgcgtgtttttaataaacagttgcagccagctggtatcttcgactgatttcactccacgagcaagtcgcttcacctgaccacctgtgtcggtttggggtacgatttgatgtacctgatgcttagaggcttttcctggaagcagggcatttgttgcttcacaccgtagtgcctcgtcatcacgcctcagccttgattttccggatttgctggaaaaccagcctacacgcttaaaccgggacaaccgtcgcccggccaaatagccttctccgtccccccttcgcagtaacaccaagtacaggaatattacctgtttcccatcgactacgcctttcggcctcgcctgtggggaagtgagtgggcgtgtccacaggttatgtcgtgccagtggcaagggatgtccactccgcgttgggacataatggtagatccagttaacgcgtggtaggttaggtgttgtggggttggtcaacgtgtttcgtggtaagttgggttcgtgtgttacgtcttgtgggggtccagagtggtcggtggcaatcagaagcaccaacgaaagtgcagtaggtgggctccccgtctgtgagggtccccccaggtattcgtttgtggttggtgccaggtgcaattgggggcagttggggacttttttgattgtgtgttctgtatattgattattgttttgttcatttggatatttgccttccat

SEQ ID NO: 23036 - DNA, 1446 bp, Homo sapiens
  SIMILAR (1045)..(1242): 751254mologous to Escherichia coli f177,accession number L10328,Smith-Waterman Score=230.
tcactggcgctggcggcggcggttgctgcggcagaactgaaggtccggttgaacgtgtagaagcctgggtttcgccaaatctgatgaaaacggtctgggcgtcaccgttcccggcacgggaatggtggggctgccgatgcggcggcgcggcagcgaacgcccggatagcggtgatactggattggcgagacgcgactggaaggtgacgaagctacgctgactcgcgtgccgctgaagggcgggctcggtgaaatggcgtctattactcagctgcgcctgttcgccgcacgcgcaagtgctaacgagtcctgggcgtactttatggggcgcgcaagtttgtggcatcccgacaggcctgtcagatgtttctttgctggctgaagaggcgattgtccgccgcgtggtcacgcttccttcgaaagcccggtcagtttccaggaggcgagaacagcctgggggaatgccaactggattggtctggtcgaatggcaattgacggggcgtcagcgtgtcataaaacggtggcagcaaattctcttcatactgacagctgcggattccagctccagccactgctgctcgttgccgttgattaccgcgtaacgcccgcaggtaattcaacagcatgttcggaatacaaaaacaccgtagatgaaaaccggtgcgcttaagcaacgcaagaatgccactgcgacttccgcagcggtaatgacgacttgaaaaccaccctttaatgtttgatgttctaacgttgacccgtaatccgggttgggacagtgtctggtgggtagtttgactggggcggtctcctcctaaagagaacggaggagcacgaaggttggctaatcctggtcggacatcaggaggttgtgcaatggcataagccagcttgacgatcgcatgtctagctgggtaaacgatgttcacgaaaattcgtgcaaggaatgcgatacgatgagcggaaatctttggggagttgcaaactggggaaacatcatccttggtgtatcgattgatgatggcgaagcggctcgacactgacgtctgcaatgggtcctggaaaatgactacgacccaaggcttatcagtgccctgagcgaagtgcgaaatctggtggaaaccggcggacttccgttgggcagagagcgcgcgacttccagcgatctggcgcagattgaatcggcgctgaacagatgattgccaacaatccaggaccccgaagcgtttaacgaagcggatatcgctaccacgaggcggtgctgcagtcggtgcataacccggtgttacagaacttagcattgcgatcagttcgctgcagcgggcggtttttgaacgaactggatgggcgatgaggccaacatgccgcaaacgctccaggaacataagggctgttcgatgcgatacgacatcaggacggcgatgcggcagagcaggcgcgcttaccat

SEQ ID NO: 23037 - DNA, 3084 bp, Homo sapiens
  SIMILAR (2254)..(3081): 1001254mologous to Escherichia coli similar to E. coli ORF_o273,accession number U70214,Smith-Waterman Score=1423.
  misc_feature (1)...(3084): n = a,t,c or g
atgaatttagttagcaggaaaatggttattgaggagcttaaggataaatttctgttccctactctcgcatggggagaccccacactaccatcggcgctacggcgtttcacttctgagttcggcatggggtcaggagcagcccccctcagttctccagcgcccacggcagatagggaccgaactgtctcacgacgttctaaacccagctcgcgtaccactttaaatggcgaacagccatacccttgggacctacttcagccccaggatgtgatgagccgacatcgaggtgccaaacaccgccgtcgatatgaactcttgggcggtatcagcctgttatccccggagtaccttttatccgttgagcgatggcccttccattcagaaccaccggatcactatgacctgctttcgcacctgctcgcgccgaggagaccgccccagtcaaactacccaccagacactgtccgcaacccggattacgggtcaacgttagaacatcaaacattaaagggtggtatttcaaggtcggctccatgcagactggcgtccacacttcaaagcctcccacctatcctacacatcaaggctcaatgttcagtgtcaagctatagtaaaggttcacggggtctttccgtcttgccgcgggaccgttatagttacggccgccgtttaccggggcttcgatcaagagcttcgcttgcgctaaccccatcaattaaccttccggcaccgggcaggcgtctacaccgtatacgtccactttcgtgtttgcacagtgctgtgtttttcaataaacagttgcatgcatcgtcggtccatcgggcactggcgactgatgagcatttttaccgtcaggtgattggcgaagcataccggcataagatgctgtttgttatcagccagtcagacaaagctgaacccaccagcggtggaaatatcctttccacagagcagaaacaaaatatcagccgcaaaatctgcctgctgcatgagctattccagcccgtgcatccggtgtgtgccgtgtcggttcgcctgcagtggggactaagggtgatggcagagcggatgattaagtgtctgccgcgtgaggccagcagcccggtagtagcgctactgcaacatccctttcgaacaacggtagcccgggagcaggcacgtgacgatttcggtgaaaccgtaggtgccatactcgatacgtggcccgcgctgtctgggatttcttcttctgagtgtttaattctgccctattattctccgagccctgtcgcaagtgcggcagggctttctttatttgttttacccatactgaggagtctgcttatgacccgtctggcttcgcgctttggcgctgcaaatcttattcgccgtgaccgtccgttaacccgtgaagagttatttcgcgtggtgcccagcgtattcagtgaggataaacacgaatcccgcagtgaacgctacacgtatatacccacaatttccctgctggacagcctgcagcgggaaggcttccagccattctttgcctgtcagacacgggtacgtgacccccgtcgtcgtgagcatactaagcatatgctgcgcctacgtcgggaggggcaaattaccggtaaacaggttccggaaattatcctgcttaactctcacgatggcaccagttcgtaccagatgctgccgggcatgttcagggcggtgtgccagaacggtctggtctgcggcgagtcgtttggcgaggtgcgggtgccacacaagggggatgtgnaccctcgcctcgacctggtactgtggctgattaaggccgatgaccgggcgctgacggtggatgaacatttttatcatcaggtgattggagaggtataccggcataaggtgctgtttgttatcagccagtcggataaggccgaacctaccagcggtgggggacagttgtccacggcgcagaagcagaatatcagccgcaaaatctgcctgctgcatgagctgttccagcccgtccatccggtgtgtgctgtgtcggtccgtctacaatgggggcttaaggtgatggccgagcggatgattaagtgcctgccacgtgaggccaccagcccggtggtgtcgcaactccatccttcctttcgcacgacggtagtccgggaacaggctcgtagcgattttggtgaaaccgtcggggccgtactcgatagcatcagtgcctttcccctgatacccgccccggtgcgggccgtcattcaggccgtgcgcaccacggtggtgagtctgcttatgacccgtctggcttcgcgctttggcgcagcaaaccttatccgtcgcgaccgtccgttaacccgtgaagagctgtttcgcgtagtgcccagtgtattcagtgaggacaaacacgagtcccgtagtgagcgttatacctatatacccaccatctccctgctcgacagcctacagcgagaaggcttccagccattctttgcctgtcagacccgcgtgcgtgacccgggtcgtcgtgaacatacaaagcatatgctgcgtctgcggcgggaagggcagatcaccggtaaacaggtgccggaaattattctactcaactctcacgatggaaccagttcgtatcagatgttgccgggactatttcgtgcggtttgtcagaacgggctcgtctgcggtgagtcgtttggcgaggtgcgggtgccacacaagggggacgtggtgagtcaggtgattgaaggcgcgtatgaggtgctggggatttttgaccgggtggaggagaaacgggatgccatgcagtcgttgctgttgccacccccggcacagcaggcactggcaaaagccgccctcacataccgctttggtgaagaccaccagccggtgactgaatcgcagatcctctcccctcgccgctggcaggatgagagcaatgacctgtggaccacgtaccagcgtattcaggagaacctgattaagggcgggctcagtggccgtaatgccaaaggaggacggtcacatacccgtgccgttcgcggtatcgacggggacgtgaaacttaaccgggcactgtgggtgatggcggaagccctgctcacgcaactgcagtga

SEQ ID NO: 23038 - DNA, 1755 bp, Homo sapiens
  SIMILAR (1506)..(1015): 1001254mologous to Escherichia coli No definition line found,accession number U00039,Smith-Waterman Score=862.
ttaaccccatctcgccggtccaacccgtattctggcggcctccggatccaagacttccgcaaaatgctggctcattgcgaagccgttaccccgattcgccgtaccgttactattgaagatgtgggtaactctgcggcattcctgtgctccgatctctctgccggtatctccggtgaagtggtccacgttgacggcggtttcagcattgctgcaatgaacgaactcgaactgaaataatcgttgggttttactgaccagcgtgccggaaaccggcaagaccgcgataccatttgccacctgatagctgcgtgatggacggggatccatgtcatcatcctcaccaaacagcgccagcggttcggctatttgtccggcatcaagcgtgatgccagagacggtatctgtcagccgggtgatgcccaacgtcacaaaacctgccagactgccaaacaaacgcggatcaggaaccagatggtcgcgatcacgtatatcgagagtgatgcatggaaccgatcgtaccagtaagcgaatatccataatggtgtaagtcatgccccagaggatgtaggtcacgcaaacaaagacaatctgagtagtacctggcagcatgacagtccacggggcgacataaatcagttccagcgcatcaccgagcatcgctccccattcaggcgaggggagttgtgcgccgagatcgagaaagcccagcgcggcgatatcgagaattgccatcgacagtgcgcgggtgatctcggtgaccagcccggcggtgatgtttggcatcacagcaaaccagagaatattcagcgttgatgcgccatccagacgggcggcgataacgtactctttttccagttcgtcatgcaccatgctgtaaatcgaacgtaccatacgcggcagcatgccagccagacagcaaacatagcgtgggacaactcggtccggcaacgctacacgataattgccacagcagcgaagggatcgccagtaagtatcctctgcggcctttttcgtttgcgggtaaggcacccagtcgccgccgttcaggcgaacgtacggtttatcctggtattgaataactactgcatttgagttctcggagaccggtgctgtttgtggcaacccactggtgagttttttccagtcaacattgtcttcggtgaaaatcttgccatcgagaacgcgaaccaccagatcggagatagccaggaagctgctcggttgttcgatgacaatcggtgccccctgatgcggtgccttcatgccgaagaatttcaccccaacggggacgtcggtgatagacgggctagggatatcacgtaggccagatacctgcattctgtcgcccttcagcgcgccgccgtgttccggcaccacgaccaccatcactttacgacccgatttctcaagttcagtaaagaaggcgtccagttcatcaaagaatttctgcgcccgcgctttgtaatccgctgttttgctgacccccggataatggttgccgtcatgccagtggaagcgtgttgtagaaccgtggcagggcagtcccttcaacaacgaagcggaaagagggaaatacccgttttcgatccagcgttgattctcccggatccggtgcatatcggcatcgttgaacagccgatgaccgccgtctgtccgttgcggtttcagcaatccgtaacgcctctgccacgcgcgtaacgtgacaggattaatatcacaaagcaacgccacttcaccaattgtgtaaagcgccat

SEQ ID NO: 23039 - DNA, 600 bp, Homo sapiens
  SIMILAR (50)..(163): 421254mologous to Sulfolobus solfataricus suppress-overlaps with RNA,accession number AL512966,Smith-Waterman Score=71.
atggcttttcagcataccttgggacctacttcagcccaggatgtgatgagccgacatcgaggtgccaaacaccgccgtcgatatgaactcttgggcggtatcagcctgttatccccggagtaccttttatccgttgagcgatggcccttccattcagaaccaccggatcactatgacctgctttcgcacctgctcgcgccgaggagaccgccccagtcaaactacccaccagacactgtccgcaacccggattacgggtcaacgttagaacatcaaacattaaagggtggtatttcaaggtcggctccatgcagactggcgtccacacttcaaagcctcccacctatcctacacatcaaggctcaatgttcagtgtcaagctatagtaaaggttcacggggtctttccgtcttgccgcgggtacactgcatcttcacagcgagttcaatttcactgagtctcgggtggagacagcctggccatcattacgccattcgtgcaggtcggaacttacccgacaaggaatttcgctaccttaggaccgttatagttacggccgccgtttaccggggcttcgatcaagagcttcgcttgcgctaa

SEQ ID NO: 23040 - DNA, 1368 bp, Homo sapiens
  SIMILAR (898)..(1368): 981254mologous to Homo sapiens 23-APR-1998 Human PRO201 (Nsp1) protein encoding cDNA clone DNA30676,accession number Z32137_cd1,Smith-Waterman Score=798.
atggagctgtggcgccaatgcacccactggctcatccagtgccgggtgctgccgcccagccaccgcctgcttaacaacctgctaccccatgccatcaacctgcgtgaggtcaacctgcgcccccagatgtcccaggtgagccctccgcgggcagaagcctccaccatgcccatatctgccttgccccgaacgagcagtgacccggtgttgctgaaggcccctgctcccctgggaactgttgccgacagtctcagggcctccgatgggcagcttcaagccaaggcaccaacgaagcccccccggacaccctccttcgaactgcctgatgcctctgaacgtcccccgacgtactgcgagctggtgccccgagtgcccagtgtccagggaacatccccgcagccaaagctgcccagagccagaggccccatgaatcggcccctggaaccccaagtcctgcataccctccgtggcctgttcctggagcaccatcctgggagcaccgcccttcacctgctattggtagactgccaggccacaggcctcctgggagtgaccagagatcagcggggcaacatgggagtctcatctggcctggagctgctcactcttccccatggacaccacttgaggttggaactgctggagaggcatcagacactggcgctggccggggcgctggcggtgctgggctgctcggggccgctggaggagcgcgcagccgcactgaggggactggtagagctggcgctggcgctgcggccaggggcggcgggggacctgcccgggctggctgcagtcatgggcgccctgctcatgccccaggttcgtggggagcagggactggaggaagctggagtgcgggtgactgggaagactggagaggaggcgtgctcagatctcttctcccaggtgtcccggttggagcacacgtggcgccagctccgaaggagccacacggaggctgcgctggcctttgagcaggagctgaagccgctgatgcgggctctggatgagggcgctggaccctgcgaccccggcgaggtggcgctgccgcacgtggcacccatggttcgcctactggagggcgaggaagtcgcggggccgctggacgagagctgtgagcggctgttgcgcaccctgcacggggcgcgtcacatggtccgggacgcacccaaattccgcaaggtggcagcccagcgcctgcgaggattccggcctaacccggagctgagggaggccctgaccaccggcttcgtgcggaggctgctctggggtagccggggcgcgggagctccgcgcgctgaacgctttgagaagttccagcgcgtcctcggcgtcctgtcgcagcgcctggagcctgaccgctga

SEQ ID NO: 23041 - DNA, 535 bp, Homo sapiens
  SIMILAR (78)..(164): 931254mologous to Escherichia coli NADH dehydrogenase,accession number L25055,Smith-Waterman Score=145.
cgtggctacatctctcctgcgtggcgaatatatcgaagcggcagttaatctgcgccgtgccattgccgaagccaccgaaagcgggtctgcttggcaaaaacattatgggaacaggtttcgatttcgaactgttcgtccataccggggcagggcgcttgatctgccgatagaattcgaaagtatcggtaaagcgggcagccgtctgggtacggcgctggcgatggcggttgaccatgagatcaacatggtgtcgctggtgcgtaacctggaagagtttttcatggaattggggccgggaatcaaatttcaccgccggaaacactgtattgcccactggattccgaaatcggagacccggaccccctcccaagctggaactttcaaggcccaatggttcaaataaccggccaataaaatttaaggcaattccttgggttaggtccccggatctatctccacatactgtgctatacacaaactcatcttcaccatctaggttatctgacatcttctctggcgatacacacgagcgcat

SEQ ID NO: 23042 - DNA, 762 bp, Homo sapiens
  SIMILAR (561)..(406): 961254mologous to Homo sapiens Rho GAP p190-A,accession number AF159851,Smith-Waterman Score=269.
cgctgcgactgtttattaaaaacacagcactctgcaaacacgaaagtggacgtatagggtgtgacgcctgcccggtgccggaagcgttaattgatggggttagcgcaagcgaagctcttgatcgaagccccggtaaacggcggccgtaactataacggtcctaaggtagcgaaattccttgtcgggtaagttccgactgaccgtataagaacgcgtcttacgtctgtgtgcaaacgtagatgcgaggtccatcaactcgaagatcgaccctttgaggtataccaggtcgctcgaggcgagactagtcatttgaaacatcggtttggaaccacatgaggaagcagctcccttggacgtgcggcaactagcttcgtaaaatgtgctacataggcaactggacatcatggatagtgctgtggcttcaatgtactcaatacatctttcaataaaaatggggatcggcttctctggagtcacgacagttgttaagggcaccccaaaatagttactctcccaggttgcctctgtgatggatggccggggtttgggctttggtttcttgatgaaggtggctactatagacaaaacagccttatgttggaaaaagatgccatctaggacttctatagctagagagaagtcaatggctggcttcaaagctccacaggacaggctgaccctacagtagtagtcgcacggcaggtagcacggctccagcacaggcactctgttatccatcactattcgcgccacgtcactcat

SEQ ID NO: 23043 - DNA, 1275 bp, Homo sapiens
  SIMILAR (394)..(1272): 981254mologous to Bacteriophage N15 gp4,accession number AF064539,Smith-Waterman Score=1479.
aggaggatcatctctatctgggcctgaccttcttagagaaagagatacttgacactgtcgtggactcagcgactttatctggtagagtaacatatttagatccatcgccgaataattacctggagcagtatccccgaaaaattgcctgttacctcgccagcatcagtaaactggataactttcttggccagcttgatggtatccttcgccggtactcacgtcatttcgccatgctttacttttctggccttgggctgtcggtcagcgacagtgccaatcctgttcatcattatggtcatgtgcagggaggctacagtgtgccactgattattaccgccagtgacataacgtctcatcagcccgtcagtagaaaaatcagtgcccgtcatttcgcaggatggacagacccgtggggccaatgcgttttacagcgtgatggagcagatgaaaatgctcgataccctgcaaaatacccagctccagagcgcgatagtgaaggctatgtatgccgctaccatcgagagtgaactggatacccaatcggcgatggactttattctcggcgcggataataaagagcagcagagcaaacttacgggctggctcggtgaaatggcgtcctattactcagctgcgcctgttcgcctgggtggggcaagggttccacacctgttgccgggtgattctctcaaccttcagtcggcgcaggataccgataacggctactcgacttttgaacagtccctgctgcgttatattgccgctgggcttggtgtgtcgtatgagcagctttcgcgaaactattcgcagatgagctactcgaccgcacgcgcaagtgctaacgagtcctgggcgtactttatggggcgtcgcaagtttgtggcatcccgacaggcctgtcagatgtttctttgctggcttgaagaggcgattgtccgccgcgtggtcacgcttccttcgaaagcccggttcagtttccaggaggcgagaacagcctgggggaatgccaactggattggctctggtcgaatggcaattgacgggctgaaagaggtacaggaggccgtcatgctcattgaggcaggtctcagcacgtatgaaaaagagtgcgccaaacgcggtgatgattatcaggagatttttgcccagcaggtccgggaaaccatggagcgtcgtgctgcgggtctgaaaccaccggcatgggccgctgcagcttttgaggccggagtgaaaaaatcaaacgaggaggagcaagatggcgcacgagctgcgtaa

SEQ ID NO: 23044 - DNA, 1466 bp, Homo sapiens
  SIMILAR (574)..(714): 571254mologous to Escherichia coli NADH dehydrogenase,accession number L25055,Smith-Waterman Score=130.
cagcctggtgtctgacctgattgtttatctgggcagtatcgattttgttatgtcagatgtggaccgctaattatgcacgagaatcaccaaccccaaaccgaggcttttgagctgagtgcggcagagcgtgaagcgatcgagcacgagatgcaccactacgaagacccgcgtgcggcgtccattgaagcgctgaaaatcgttcagaagcagcgtggctgggtgccggatggtgcgatccacgcgatcgccgatgtgctgggtattccggcaagcgacgtcgaaggtgtggcaacgttctacagtcagatcttccgccagccggttggtcgccatgtgatccgttattgtgacagcgtggtctgtcatatcaacggttatcagggtattcaggcggcgctcgagaaaaagctgaacatcaaaccagggcaaacgacatttgatggccgctttacgctgctgccaacttgctgcctggggaactgtgataaagggccaaacatgatgatcgatgaggacactcacgcgcatctgaccccggaagcgatccctgaactgctggagcggtataaatgaaaaacattatccgtactcccgaaacgcatccgcttgacttggcgtctgcgcgatgacaacagccaagtgtggctggacgaataccgcagcaaaaacggttacgaaggccgcgcgtaaggcgctgaccgggctgtctccggacgaaatcgttaatcaggtaaaagacgctggtctgaaagggcgcggcggcgcgggcttctcgactggcctgaaatggagcctgatgccgaaagacgaatccatgaacatccgttacctgctgtgtaatgccgatgaaatggagccgggcacctataaagaccgcctgttgatggagcaactgccgcacctgctggtggaaggtatgctcatctccgcgtttgcgctgaaagcttaccgtggctacatcttcctgcgtggcgaatatatcgaagcggcagttaatctgcgccgtgccattgccgaagccaccgaagcgggtctgcttggcaaaaacattatgggaacaggtttcgatttcgaactgttcgtccataccggggcagggcgctacatctgcggggaagaaacagcgttaatcaactccctggaaggacgtcgtgctaacccacgctcgaagccacccttccccggaaccttccggcgcatggggtaaaccgacctgtgtcaacaacgtcgaaaccctgtgtaacgttccggcgatcctcgctaacggcgtggagtggtatcagaacatctcgaaaagtaaagatgctggcaccaagctgatgggcttctccggtcgggtgaaaaatccgggactgtgggaactgccgttcggcaccaccgcacgcgagatcctcgaagattacgccggtggtatgcgtgatggtctgacatttaaagcctggcagccaggcggcgcggtggactga

SEQ ID NO: 23045 - DNA, 2991 bp, Homo sapiens
  SIMILAR (2526)..(2891): 701254mologous to Escherichia coli put. 16S rRNA methyltransferase (ksgA) (AA 1-273),accession number X04711,Smith- Waterman Score=424.
atggacggggtccatgtcatcatcctcaccaaacagcgccagcggttcggctatttgtcggcatcaagcgtgatgccagagacggtatctgtcagccggctgcagcggcccatgccggtggtttcagacccgcagcacgacgctcatggtttcccggacctgctgggcaaaaatctcctgataatcatcaccggtttggcgcactctttttcatacgtgctgagacctgcctcaatgagcatacggcctcctgtacctctttcagcccgtcaattgccattcgaccagagcaatccagttggcattcccccaggctgttctcgcctcctggaaactgaacgggctttcgaaggaagcgtgaccacgcggcggacaatcgcctcttcaagcagcaaagaaacatctgacagggctgtcggggtgccacaaacttgtgaaccccctaatttggttatccgcatgttcaacctgaaaacgccgggtcgtgagataaagaagacgagatcgttactgaagaagccaacagcaacactgaagaggtctgactcaactggcaaccaactatattgctgcggttggcggcactacaacctgaaagcgattgacgcctgtatcacccgtctgcgccttacagtgctgactctgcccgcgttaacgatacgatgtgtaaacgtctgggtgctttggggtagtgaaactgaacaaacagactattcaggtgattgttggcgcgaagcagaatccatcggcgatgcgatgaagaaagtcgttgcccgtggctgtaccaaacgcggtatctatcgcggagctggtatcgcgattaccggtgatgtcgtggcactggatcaggttcctgacgaagcattgccagcaaagcggtgggtgacgataaaacgtcgtatcaccagccgcagggacaatcgtgaaaatcttcaacaccaacacgcgttctgcctggaaaccgaaaaaggcgcggagatcgtcgtccatatgatcatcgatgaagatctggcagtggtaagcacaccacagtacacacccgtttcccgccggagccgaatgctatctgcatattggccatgcgaaatctatctgcctgaacttcgggatgcccaggactataaaggccagtgcaacctgcgtttcgacgacactaaccggcctggcgtcgttgatgaactgacgccggaacagatccgcgaataccgcggcaccctgcgcaaccgggtaaaaacagcccgtaccgcgaccgcagcgttgaagagaactggcgctgttcgaaaaaatgcgtgtggtcactctagaggatccccgtcgagtcggcctgcgcggaagatgtaacggggctaaaccatgcaccgaagctgcggcagccacgcttatgcgttgtttggtaggggagcgtttctgtaacctgtgaaggtgtactgtgagcactgtgcaaacacgaaagtggacgtatacggtgtgacgcctgccggtgccggaaggttaattgatggggttagcgcaagcgaagctcttgacgaagccccggtaaacggcggccgtaactataacggtcctaaggttacgcaccagcgacaccatgttgatctcatggtcaaccgcatcgccagcgccgtacccagacggctgcccgctttaccgatactttcgattccatcggcagatcaagatgtacgccctgccccggtatggacgaacagttcgaaatcgaaacctgttcccaaatgtttttgccaagcagacccgcttcggtggcttcggcaatggcacgggcagattaactgccgcttcgatatattcgccacgcaggaagatgtagcccggtgcccggctcctttcatcggcattacacagcagccacactggctgtttgtcatcgcgcagacgccaggtcagcggatcgtttcgggagtacggataatgtttttcatttataccgctccagcagttagggatcgcttccggggtcagatgcgcgtgagtgtcctcatcgatcatctgtttggccctttatcacagttccccaggcagcaagttggcagcagcttcaggacacctgataaacccgagctgcgtgaatattatggtctgccaacacatccactaagcggcagaacgcctacccggttatgcgtcggtggccttaatgaacctgggaagtcacattctgctgaatgccgtgacccaccttaccggcagagcgaaactgtgctggcccactccatgctcgccacatcccggaggggggcccagaggtggagcagcacgtcagccctcgactgtcagccccggggaggacccccgtctccaaccctcagcacaccgcccgcggagggctcacctgggacatctgggggcgcagcttcaagccaaggcaccaacgaagcccccccggacaccctcctcgaactgcctgatgcctctgaacgtcccccgacgtactgcgagctggtccccgagtgcccagtgtccagggaacatccccgagccaaagctgcccaggccagaggccccatggaccgaacagcaaagcgtatggtcgataagcgtcatggcgcaatactattgcaatgtgatcccggtactggaagtccgccgtcagcctttacaccaccacccaaagtggattccgccgtcgtgccctggttcctcatgcaacgatgcctcacccggttaaagatgttcgtgtgttgagccgcatcaccaccgaagcctttaaccagcgtcgtaaaaccattcgtaacagcctcggcaacctgtttagcgtcgaggtgttaacgggaatggggatcgacccggcgatgcgagcggaaaatatctctgtcgcgcaatattgccagatggcgaactatctggcggagaacgcgcctttgcaggagagttaacgatgatcaattcgccccgagtgtgtattcaggttcaaagcgtctacattgaggctcaatcttcacctgataatgaacgttacgtttttgcttatag

SEQ ID NO: 23046 - DNA, 2557 bp, Homo sapiens
  SIMILAR (1885)..(2196): 401254mologous to Mus musculus synbindin,accession number AF233340,Smith-Waterman Score=116.
  misc_feature (1)...(2557): n = a,t,c or g
atgggttctgggtggttttgccccttttccttttagattcaagaaatccatggtgaaaggtttggattcctatgaagaaaaggaggataaagtgatcaaggagatggcagctcagatccgtgaggtggagcagagccgacaggaggtggttcggtctgtcttagaggttggtttccctcggaggatccagaccacctcaggcagtgccagacccagaagagggctcttcagcacctaggaagctggaaagggatgaacagccaagtagcttcccagcttacagcagccctcaaatttggacctgccaccagctccagagcttgactggatggagacaggaccatctctgacattcattggccatcaggatatacccaggagttggtaacatccactcaggtgccacacctccctggatgatccaagatgaagaatacattggctgggggaccccaagaaatngggccccatccctatgaagaatttccttaaagaaatttcccctatcattgtacagaggaaaaacagaagttgaaaaaactcccccccccagacccgagttgggggccaactttggatcacagctcccaggacccagtgcaggctggctgccctcttttggccgcgtctggaataatcggacgccgctggcagtcccagacatcaattcaaaactgaagctgcagcaatgaagaagcagtcacatacagaaaaaagctaatcatgctctctaccaactaccatgaggctaaaagcaaagtcaacaaacccctattataccttccaccaaattctttatcattgtctttcttaggaaacagacatactcattcatttgatttaataaaggttttaattttcccaaaatgtacagctaggttggacctatttcatgcaatcttcacccagcaagctgggagcatctcccacccttgggtatttccggtgtaaaattacttggagctctgtgctttgaaaccagtttgataagtcctagggggagagaatagcacgatgagatgctttacttaaggaagctcctgaaagggcttgccctggcccagggagcctcgaatcttcaggtctctcaagagaccacagctgggggttataaagtttaataagttggggaacttccttacgagatgttagcataggggtggctgttggtccaaacaagcattaggttattgaggcttgtcccggaactttggcctttgggacccacttcttcttttgtggcctttgcccccgggattttgtttcactggggtcctttggtctttcttggggccgacttttccaggggtccttccttccttcctggtccgtccttaaggcggcatttggcgaacctccgggagaataagcagcagacacccgcagccctcgtctcaagatgtcggacaaaaaggaagcgctgatcagaaacgggcccaaaaaccaccgtccgctgtgagtacttccggggcaagaggcggagccaggcagaagaagtcccacggcgaagcgctcgccctctagcctgaggcggaagacaggaagtggattctagttcccaagccgcaccgcctaaatactgccggagtctgcgctagttgtgacgcagtactatagcgctgttttcctgcactgataaacgaaaagcaatccaccaggtctcggcagctaactttccggcactacttatgcccgagcgtgtcgctcccagtgcgcaagtgcagcaggtggctgcacggggggcgcgggaggaggaggaggagaatgaggaggaggatggctgggtggggccggcggcaagtgctgtgatgcggttccggggaggggccgtcgggtagaggctgaataccagtttccgagcggcaaggcagcgattggcgattttttagtgtgtatgtggtgaacaaagctggcggcttgatttaccagttggacagctacgcgcccacgggcttgaggcttgagaaaactttcaagttatccgctggatctgctgctcaagctacacgatgagcgtgtgttggttgctttcggccagcggggacggcatcccgagtggggtcatgcagtgctgggccatcaatggcatggacgtgaatggcaggtacacggccgaccggaaaaaaggtgctggagtatctggggtaacccctgctaattacccggtgatcgtatctatttgctcaacctagactctacttctaatgacaagcttatgctagccttgatgttccactcgctctttgccatcgggtcccaagcttgtcttcctggaacaagggaagcctcaaggcattgagaatgcctggaagacagacacattcaaattgcactggctaccagacactgacaagggatcaagtttgtggttctagcagatcctaggcaagctggaatagattctcttctccgaaagatttatgagatttactcagactttgccctcaagaatccattctattccttagaaatgcctatcaggtgtgagctctttgaccagaacctgaagctagctctggaggtggcagagaaggctggaacttttggacctgggtca

SEQ ID NO: 23047 - DNA, 501 bp, Homo sapiens
  SIMILAR (98)..(24): 461254mologous to Homo sapiens G alpha interacting protein,accession number AF217689,Smith-Waterman Score=63.
  misc_feature (1)...(501): n = a,t,c or g
tttttctcctgctccttgttttcccagcagcacatggggttcctcggaggagcagaggtggccgccgtgggggngcgtttgggctgcggtgctgcgtcatttttcctttgctttctctttactttagacactggcccaactccaggcgtttcctttcattccctcagtgcttctcttctgacctgcatgttgcctgtgtgttgtgtggatctgttcctagtataggcaacataatgagatactgtgcttcccacctccccttcagttcagagccaaaatgggtctagaatctggcactttactcatttcctttgataaattgtactatgcagagctgtcaggaaccttcagatagcagtagaggactgcagctgtctaggtctgcggccacatcttggggacacactggactgttcccatgtgcagggttcagcagttatgtgggagtgctaggggttaggcttttgagcttnaacgcctgcgtgtgaacagatgaaaaat

SEQ ID NO: 23048 - DNA, 414 bp, Homo sapiens
  SIMILAR (3)..(413): 941254mologous to Homo sapiens wbscr1,accession number AF045555,Smith-Waterman Score=675.
cccgcggcagtgctggtggccatggttcccgtagccagaaggagttgcccacagagcccccctacacagcatacgtaggaaatctacctttcaatacggttcagggcgacatagatgctatctttaaggatctcagcataaggagtgtacggctagtcagagacaaagacacagataaatttaaaggattctgctatgtagaattcgatgaagtggattcccttaaggaagccttgacatacgatggtgcactgttgggcgatcggtcacttcgtgtggacattgcagaaggcagaaaacaagataaaggtggctttggattcagaaaaggtggaccagatgacagaggcttcagggatgacttcttatggggcaggggaggtaggccgccatggcaaccgcggaacaggccct

SEQ ID NO: 23049 - DNA, 840 bp, Homo sapiens
  SIMILAR (406)..(837): 691254mologous to Homo sapiens wbscr1 alternative spliced product,accession number AF045555,Smith-Waterman Score=485.
atgggccgcgtaggccgggcaggcgtccagctgggacgccgccgcaccacgtgggctgcagagcgcacggggcaggcagctgccggtggcccagggcgggcgctgcgcggccagcgtccggatttgcgatcaggcggcgcggcggacagcccggcggcggggcggggggagttatattgcggggtccttcctcgctcaccctggttcctctcggagcggagacggcaaatggcggacttcgacacctacgacgatcgggcctacagcagcttcggcggcggcagagggtcccgcggcagtgctggtggccatggttcccgtagccagaaggagttgcccacagagcccccctacacagcatacgtaggaaatctacctttcaatacggttcagggcgacatagatgctatctttaaggatctcagcataaggagtgtacggctagtcagagacaaagacacagataaatttaaagggtgcgggagcaaagagcaggaagaagaagggatccgagcagcattctcctgcctgcagggcttcctgaaggaagtgtgcctgctgtgcttcagggatgacttcttagggggcaggggaggtagtcgcccaggcgaccggcgaacaggcccccccatgggcagccgcttcagagatggccctcccctccgtggatccaacatggatttcagagaacccacagaagaggaaagagcacagagaccacgactccagcttaaacctcgaacagtcgcgacgcccctcaatcaagtagccaatcccaactctgctatcttcgggggtgccaggcctagagaggaagtcgttcaaaaggagcaagaatga

SEQ ID NO: 23050 - DNA, 2828 bp, Homo sapiens
  SIMILAR (134)..(742): 481254mologous to Homo sapiens wbscr1,accession number AF045555,Smith-Waterman Score=356.
  misc_feature (1)...(2828): n = a,t,c or g
ggcacgaggcctcgtgccgctcggagcggagacggcaaatggcggacttcgacacctacgacgatcgggcctacagcagcttcggcggcggcagagggtcccgcggcagtcgctggtggccatggttcccgtagccagaaggagttgcccacagagcccccctacacagcatacgtaggaaatctaccgtttcaatacggttcagggcgacatagatgctatctttaaggatctcagcataaggagtgtacggtctagtcagagacaaagtcacaggtaaatttaaaaggattctgctatgtagaattcgatgaagtgggattcccttaaaggaagccttgacatacgataggtgcactgttgggcgatcggtcacttccgtgtggactttgcaaaagggcgaaaaacaaaaataagggtggcttttggattccagaaaaggtggaccagatgacagaaggcttcagggatgacttctttagggggcaggggaggtagtcgcccaggcgacccggcgaacaggcccccccatgggcagccgccttcagagattggccctcccctccgtggattccaacattggatttcagagaacccacagaagaggaaagagcacagagaccacgaattcaggttaaaacctcgaacagtctggaggcccctcaatcaagtagccaatcccaactctgctatcttcgggggtgccaggcctagagaggaagtcgttcaaaaggagcaagaatgagcctgcggttgggagggaatggggcgtggggggttagagcaaggaccacagccgtggtgagtccccgggcagccgtcctgcagccgccactcctgcgcctgccattggccttcctcacagcggaaacacagcttgtgagtgcatgtcagctgttaacaagtgggtttttagtacattctggggctttttctgtatctatcttagtggcctgtttgttgcgtttttttctttcttccgcttgcttccccattttccttctgtcctttttctcctgctccttgttttcccagcaagcacatggggttcctcggaggaagcaagaggtggcccgcccgtggggggggcgtttggggctgcggtgctgcgtcatttttcctttgctttctctttactttagacactgggcccaactccaggcgttttcctttcaattccctcagtgcttctcttgttgacctgcatgttgaagttctgtaattgctgggggnttccaacaaaaaccagagtcactgacagaggggaacagcagagaccttgttgggtattcagcttgtgatggatattagagaatcaagaggcaccttgttttcacaacttaggattaaaaatatctgcagggtcctttccattccgtatttagagggagtcctgggctccatgaccccctccccgagtgggactgttccaagcagatagggttcacacggagaaacaggtggaggctgaaaaggggggggctaatggaagagccggtaggggagtccaacggagaagaatgcagtgaatgctttgcatggcatttcacacgtgtgtgtgttcccagcttagtttcactcctttccgccgtgcgtggtggaggctggcctctcttggctgggtgcagtgaatggccagcgggtttcttttctgctgggccaaggcgctttggggggtggaagggggtggtgctggttgcttgcactgggctgactgcggcgctgacgccacgttaccccccatccctgtggcctgtgtgttgtgtggatctggtcctactataggcaacataatcgagatactgtgcttccacacctccccttcagttcagagccaaaatggggtctagaatctgggcacttttactcatttcctttggataaaattgtactaatgcaagaactggtcaaggaaccttcagatagcagtaagaggactgcagctgtctaaggtctgcggccacatcttgggggacacactgggactgttccccangtgcaggggttcaagcagttatgttgggaagttgctaggggttagggcttttggagcttggaacgcctggcgtgttggaacaggatggaaaaatccttcagggtaccccaagttccccagtctgttcctatggggggaggcagtttgggggcggcccggccagccaggaaccctgggaaatatggccctccgccaggttgatggccagggcccaggcgtngccctggggccaccccagcggaaatgtgcttaagtatttgggtcaccaagcccgtcatcccctgggctttttccctactgtggtccttggttaacaaggccctcaggcaatcccacagaactcctcctcctcccttcccttcccaccctgtccagccttcctctgccttcctgagataaagaaccattttgtgtaaccacccaacactttaactttcagaaagacatggcatttatgtgggtgtaatccaaacccgaatgcttttcagatgaccctacttacattcttcaaatgtggaataagataaagaacgaaaacacatgcgatctaaaactgctggggcaatccagtttgactttctaaaatgtaagaatgggaattcccaaacactttaacacatttcagcttatatggacaggaaagtaaatctatggatatggtattttgtgaatgcatcttttaaataaaagaaaacccttacgtagtcactaaaaatgaaaaaaaatacaacaaacattaaaatgaaaagaatggagatctcaactacttacaaaactgggtcatgaaaagaaatggaacacgatgggcgtgggtttctgtgaacgatcattt

SEQ ID NO: 23051 - DNA, 1038 bp, Homo sapiens
  SIMILAR (1)..(429): 781254mologous to Homo sapiens pot. ORF I,accession number X03145,Smith-Waterman Score=585.
atggaagactttaccaccccactgtcaacattagccagctcaatgagacagaaggttaacaaggatatccaggacctggactcagctctgcaacaagcagacgtaatagacatctacagaactctccaccccaaatcaacagaatatacattcttctcagcactgcattgcacttattctaaatctgaccacgtaattggaagtaaagcactcctcagcaaatgcaaaagaacagaaatcacaacaaactgtgtatcagaccacagtgcaatcaaattagaattcaggattaagaaactcactcaaaaccgcacaactacatggaaactgaacaacttgctcctgaatgactactgggtagataacgaaatgaaggcagaaataaaggtgttctttgaaaccactcagcatgatcaaaacttcactaaagccaggtgcattcaagaacacaggactccctattcccagagcttcaagttgaaagctgagacccgggatccttccagtttcacgaagaacgtgcagaagatgaaaagagtgagggacgcggacctagctgtagctgcactcagccgcctccgtggtaaagtctgggtgaaggcctggcctccgctccggggctgcaggtgcgtcctgggctgctgcttcctggcattctgcataaggagcctaatggacgtgaagcactcgtgtcccgtgtgtcagcgcgagctcttctactaccaccgcctcccacggcccagccccaggtctgcctatttggcagtccgggacataggcccaaaaatggccagagacacagtgaatctctggcctcaggcaagagatccatctgagaacgcgtccccagccttgctccagactcacgccgagaaggtcctcgtccggcgagtgggcagtgggcttgggaccacgttgccccgcagaggggatgatcccactccagaaagacaaatttctttcttaaaatgcttgttgaagaagctatctcatggttttggttcagaaggggctatgcccgaggaaatctcccactga

SEQ ID NO: 23052 - DNA, 2331 bp, Homo sapiens
  SIMILAR (568)..(1032): 461254mologous to Homo sapiens calcium-regulated heat-stable protein (24kD),accession number BC001333,Smith-Waterman Score=236.
  misc_feature (1)...(2331): n = a,t,c or g
atggggagaaaccagagcagaaaagctgaaaattctaaacacgaaagcacctattctcctccaaaggatcacagctcctcacaagcaatggaacaaagctggacagagaatggctttgagaagctaggcttcagaaggaaagaagccctgtattacttagatttgactgcttcatgccagtctcaggagcttttccagctgtatgccggcatgtccgtggtggggacgtccatgccggtgcaggccgtgtgtccctactgtggaaaccgcatcatcacggtgacgacctttgtcccgggtgccctcacctggctgctgtgtaccaccctcttcctgttcgggtacgtcctgggctgctgcttcctggcattctgcataaggagcctaatggacgtgaagcactcgtgtcccgtgtgtcagcgcgagctcttctactaccaccgcctgcggcagatggagctcgcgtcctccgcacgcaccgtcgtcgcccccagccggccctgtgctggcagagaggggagaggggacgccaatgggaagaacagctcccccactgctgggtcagccatgtcatctgagcctcccccaccaccacagccccccacccatcaagcttggagtcgggctgctggacacccctcggagccgtgagcgctcaccatccccctctgcggggcaacgtggtcccaaggcccactgcccactcgccggacgaggaccttctcgggngacggtgcggggcttcacagggccccgtctacaaaggagtcttgcaaatgcttctgccggtccaaagggccattggcttcaattaccccccagctggatgggcgggccccgacatctttcctggcacatctcttgatgtgggaagggggagttattgttcccagtgggaagggcgacgaggtcaccttattaaaatgtgctcccatccccaccccaaagaatgaagaagctggcaggcccgtgggaggtcgttcatcactcaccctggcacccaggcacccaagcatgagaccctggtctggaacatgtcatcagcttcctaggaggattggtggaaagcacccctttgtccctgtgctttgtgggagactttgcggggaggaggcagcagacactggaggatgacattcttccacacgagacggggcttcagcggggcaatggtccctctcaagtatctcctggaggaaaggggtatgggggggcaggtgtggggtgtggggtgttcccggccatcagcacagcctatggaccattgcaacaacctctccaccatctgaagagcattaaaagccatttaaaaaggagaggtgcccactggtggctgagtggaggttccaaccccatcccagggagtggatcaagggttggtatttcttcccagcttgctcagacacatgggctcaacccacagaatccctcttcctcctggagctggaggccccagattcccagatctggccccctggcagcctgacagggaccttgcgtgacttctccaaggcaaatttccacctaagtgccccttgcgcctctcctggggcctgggcaaagcagttttctaattcttggcttggttggttctaggggagctggcttgaagtgggtggggaaaggcgggggtggcggtctttggattggacggatgttgccttttggtgcctttgcagtgggaggcggcatagctgcctgtctggggaagacagttctcccagcactcccacccctgggcacagcaggctggtactgggaggctgaacccctcttagagcctgaccttttcatctgccttctggttgtgtgaccatcactcaacagccatttcacagcccctgtaattatggcggcggcgggctggggtggtggtggtgggaagggcttgtggagaggacacaggctttgtttaaaaactttgtcccgatccatccagaaaagagtaggtagcttgcatcctgacagcctggcaaagtcaagaaagttgaaggagaaacatacctttggagagggggttttctttaaaactagtgttaagaaatgcttagggattttttttttttcttatttttcataactaaagctttcacccagagccggctctgtttgcactttgctgccgacattgcaaactttttggcagggtgggagactgagtctcattctgtcacccagggctgggagtgcagtggcccgatctcagctttactgcaacctcttgccctccagggttctgggcaattccgcctcagtctcctggagtaggctggggattacagggcatgcgccaccacacccggttaatttttgtatttttagtaggagaca

SEQ ID NO: 23053 - DNA, 619 bp, Homo sapiens
  SIMILAR (44)..(595): 671254mologous to Homo sapiens HMG2a (high mobility group protein 2a),accession number AL034450,Smith-Waterman Score=648.
gtcatgccctgcgctgcccagactagtgaacaatacagtcaggatggctaaaggtgaccccaagaaaccaaatggcaagatgtctgcctatgccttctttgtgcagacgtgcagagaagaacgtaagaagaaataccaagaggtccctgtcaattttgcagaattttccaagaagtgctccaggaggtggaagacaatgtccaggaaagaaaagtctaaatttgataaactggcaaaggtggataaagtacgctatgatcgggaaatgaaggattatggaccagctaaaggaggcaagaagaagaaggattctaataccttcaaaaggccaccatctgaattcttcctgttctgttcagaattccaccccaagataaaatcgaataacttaaatgacagtgaaaagcagccttacatcactaaggcggcaaaactgaaggaggagtatgagaaggatgttgctgagtataagtcgaaaggaaagtttgatggcgcaaagagtcctgctgaagttgcccagataaaggtggaagaggaagatgaagaagatgaggaggaagaagaggaggaggaggacgaggaggatgaatttaaaaactgtttatctgtctccttgtga

SEQ ID NO: 23054 - DNA, 996 bp, Homo sapiens
  SIMILAR (196)..(537): 891254mologous to Homo sapiens high mobility group protein 2a,accession number Y10043,Smith-Waterman Score=538.
atgccgtctggttggagtggcagtcccatcgactggctggcttgggacaacctggagcaaccacccctgtatcctaagaagctggtgcagacatactcagtgtttcccaaccaggacgagatgagcgatgtggtggtccagccttacaattcactcctcacactcaagaggctgacgcagaatgcagactgtgtggaaattaaggattatggaccagctaaaggaggcaagaagaaggatcctaatgcccccaaaaggccaccgtctggattcttcctgttctgttcagaattctgccccaagagcaaatccacaaaccccggcatccctattggagacgtggcaaaaaagctgggtgagatgtggaagaacttaaatgacagtgaaaagcagccttacatcactcaggcggcaaagctgaaggaaaagtatgagaaggatgttgctgtctataagtcgaaaggaaagtctgatggcgcaaagggtcctgctaaagttgcccagaaaaaggtggaagaggaagatgaagacgaggagttctgtattctacactcggctgcagagctgggaggagacttggagcctcatcccgagaaagggctgccggaggacgacccggacatcgttgtgaaaggttggctgtaccgggagccccgcggaggaggggcgcggccctggctgcccccgcgccgagcctggtttgtgctcacgcgggactccctggatcagttcagcagcagcgggaaaggggcgcggcgtctcgggagcctcgtgctcaccagcctgtgctcggtgaccggcccagagcgcaggcgtaaggagacaggtctgtggtcagtgactgtgtctggtcggaaacacagtgtccgcctctgctccccacgccaggcagaggctgagcgctggggggtggcattgcgggaagtgatcgcctccaaggcacccctggagacccccacccagctactgctcagggacatacagcctcccgagtag

SEQ ID NO: 23055 - DNA, 2179 bp, Homo sapiens
  SIMILAR (877)..(1209): 881254mologous to Homo sapiens high mobility group protein 2a,accession number Y10043,Smith-Waterman Score=498.
cacacaccctcacacacgcacacacagatgcacacccggcgcacacacgcacgcgcgcgcacaccgagcagccgctcgcacggatccacgggcacacgcgcgctcacacctaacacacacccagagactggagccccgacacacaaacccgcgacagtccccacacacacgaaccgaagcccgcggctcctggagccggcccgccggcctgtcagtgcccaaagatcgggaatcgagcccgccgccctcggcggccaccccacacgcacacgcgggacccgacgcggcggggtccccgggacgcggagggggacggcgggtgcggctaacctggcggcggcggcgcggcttccgggagctgtctggctcgcggtcctggtgtccggcggctgccccggcgggctccgaggcgcgctagagctgcgcagaaatgccccgctctctcgcgcgctcgctcctgctctccctcccacggcgctcagccccctcctcgcccgccccccacaccccctctcgccgctccgccccgccccggccggctcccccggaggaggcggcggcgatcccggccccccaagcagcagcgggcgggcgaacgagcaagcagcggcggcgagcagccaacaccaggggagcgccggagccgccggagccgccggagctggggccgcgcgccggtcccggggaggggagcagaggaaggggctgagccccgcgaaccctcccggcgctggggacccgccgccggcttccccacgtgggcccggcgtcaacctgagctgcggcgggctcagaggccgggcgaagaagaggagcagaccccacccggggcccccacgtcctcccgggttcccgccagcgccgacctcgattttccctagcttagacttgtctggattcttcctgttctgttcagaattctgccccgagatcaaatccacaaaccctggcatctctattggagacgtggcaaaagaaaaaaaaaagttgggtgaaatgtggaatagcttaaatgacagtgaaaagcagccttacttcactaaggcggcaaagctgaaggagaagtatgagaaggatgttgctgactataagtcgaaaggaaagtttgatggtgcaaagggtcctgctaaagttgcccggaaaaaggtggaagaggaagatgaacaagaggaggaggaagaagaggaggaggaggaggaggaggatgaataaagaaactgtttatctgtctaccttgtgaatacttagagtaggggagcgccgtaattgacacatctcttatttgagaagtgtctgttgccctcattaggtttaattacaaaatttgatcacgatcatattgtaagtctctcaaagtgctctagaaattgtcagtggtttacatgaagtggccatgggtgtctggagcaccctgaaactgtatcaaagttgtacatatttccaaacatttttaaaatgaaaaggcactctcgtgttctcctcactctgtgcactttgctgttggtgtgacaaggcatttaaagatggtttctggcattttcttttgatttgtaaggtggtggtaactatggttattggctagaaatcctgagttttcaactgtatatatctatagtttgtaaaaagaacaaaacaaccgagacaaacccttgatgctccttgctcggcgttgaggctgtggggaagatgtccttttgggagaggctgtagctccagggcgtgcactgtgaggctggacctgttgactctgcaggggggcattccatttagccctcagggttggtcctggtttcctgtatataagtgaccatagcattcctgcctgcccatccttagctgtggacaaaggggggtcagctggcatgagaatatttttttttttttaagtgcggtagttttttaaactgtttgtttttaaacaaactatagaactcttcattgtcagcaaagcaaagagtcactgcatcaatgaaagttcaagaacctcctgtacttaaacacgattcgcaacgttctgttattttttttgtatgtttagaatgctgaaatgtttttgaagttaaataaacagtattacatttttagaactcttctctactataacagtcaatttctgactcacagcagtgaacaaacccccactccgttgtatttggagactggcctccctataaatgtg

SEQ ID NO: 23056 - DNA, 685 bp, Homo sapiens
  SIMILAR (196)..(519): 371254mologous to Homo sapiens Human neurofilament-H mutant protein fragment 11,accession number Y20852,Smith-Waterman Score= 84.
atgcaagaaaaagttgatatattggacttcactaaaattaaaaacctctgctctgcaaaagacactgaaaataatgacttagatgtcctggcaacaccttcaattcaacatatgaaaagcaccttactctacaaacagcctttccctcccaccattcccaattctattcatgggatctggttacagaaaaggaccgactttccaagagccgaagcccctgcccggagcggcggctcgcgggcctgggtgcgaccccacccagcctccccggcattcagcgccgcgggaccacggcccgccgctcacccaggtgctccccgcggcctgcgcgcccgcgcgcttctccggcatggctcccgcctcgggctccgacgccgccttctcctccagctccggcggcggctccacgctcatgccgcggccatgcccgcgccagctcggggcgctccgggacgacggcgacgccgcggaggcggcgcggggggttgtggaaccaatcccccatggatatcaagggatgactgtatgtgtgatggggcatgaggaggccctgaaggcacagcccacacctatgtcctcagagttccctatcatcaactggcctattcaatgtgaagacaacagcgataaagacctttatgatgatctactttcacttagtaaatataatttatcttccttgtga

SEQ ID NO: 23057 - DNA, 206 bp, Homo sapiens
  SIMILAR (1)..(84): 1001254mologous to Homo sapiens SDF2 like protein 1,accession number AB043007,Smith-Waterman Score=161.
gtcacgggtgagcagtatggaagccccatccgtgggcagcatgaggtccacggcatgcccagtgccaacacgcacaatacgtggatgggtggatggagggtggcaggtggggcgtctgcagggccactcttggcagagactttgggtttgtaggggtcctcaagtgcctttgtgattaaagaatgttggtctataaaaaaaaaaaa

SEQ ID NO: 23058 - DNA, 895 bp, Homo sapiens
  SIMILAR (1)..(675): 691254mologous to Homo sapiens SDF2 like protein 1,accession number AB043007,Smith-Waterman Score=750.
atgtggagcgcgggccgcggcggggctgcctggccggtgctgttggggctgctgctggcgctgttagtgccgggcggtggtgccgccaagaccggtgcggagctcgtgacctgcgggtcggtgctgaagctgctcaatacgcaccaccgcgtgcgcttgcactcagcacgacatcatcatacggatccggcagcggccagcaagtcggtgaccggcgtagaggcgtcggacgacgccaatagctactggcggatccgcggcggctcggagggcgggtgcccgcgcgggtccccggtgcgctgcgggcaggcggtgaggctcacgcatgtgcttacgggcaagaacctgcacacgcaccacttcccgtcgccgctgtccaacaaccaggaggtgaagtgcctttggggaagacgggcgagggcgacgaccctggaaccttatggacagtgcgctgctctggaacagcacctgggagcgtgaggctgctgtgcgcttccagcatgtgggcaccttttgtgttcctgtcagtcacgggtgagcagtatggaagccccatccgtgggcagcatgaggtccacggcatgccccagtgccaacacgcacaatacgtggaaggccatggaaggcatcttcatcaagcctagtgtggagccctctgcaggtcacgatgaactctgagtgtgtggatggatgggtggatggagggtgggcaggtggggcgtctgcagggccactcttggcagagactttgggtttgtaggggtcctcaagcgcctttgtgattaaagaatgttggtctatgattgcgtttcactgtgagcctgaggatgaccaggaggtgccagcccaggcccagttgatcatttcttccccaagccgtctttcccgcagtact

SEQ ID NO: 23059 - DNA, 1047 bp, Homo sapiens
  SIMILAR (1)..(678): 941254mologous to Homo sapiens putative p150,accession number U93572,Smith-Waterman Score=1075.
atgattatctcaacagatgcagaaaaggcctttgacaacattcaacaatgcttcatgctaaaaactctcaataaattaggtattgatgggacgtatctcaaaataataagagctatctatgacaaaaccacagccaatatcatactgaatgggcaaaaactggaagcattccctttgaaaactggcacaagacagggatgccctctctcaccactcctattcaacatagtgttggaagttctggccagggcaatcaggcaggagaaagaaataaagggtattcaattaggaaaagaggaagtcaaattgtccctgtttgcagatgacatgactgtatatctagaaaaccccatcgtctcagcccaaaatctccttaagctgataggcaacttcagcaaagtctcaggttacaaaatcaatgtggaaaaatcacaagcattcttatacaccaataacagacaaacagagagccaaatcttgagtgaactcccattcacaattgcttcaaagagaataaaatacctaggaatccaacttacaggggacgtgaaggacctctttaagaagaactacaaaccactgctcaatgaaataaaagaggatacaaacaaatggaagaacattccatgctcatgggtaggaagaatcaatattgtgaaaatggccatactgcccaagggcacctttcacagccagcaggcattggaatatggcaccaaactcgttggaggaaccactccagggaaaggaggccagacacatctgggcttacctgtctttaatactgtgaaggagtatgttagtagtacaaatgtcagcaaccaccccttaattcttcctgagtggggactatgcagtaggcactgtgctaggtgtttcattcaaattgccctgttcaggcctcactacaaccctcggagtgctatatacatgaacccttctaagaaggcaatggaaacaggtttgctcagtttctcagagaataaagctaaagacagattgttacaaggatttgaacaaaatgtcaagaaccttagaaatacctga

SEQ ID NO: 23060 - DNA, 1332 bp, Homo sapiens
  SIMILAR (92)..(226): 411254mologous to Mus musculus succinyl-CoA synthetase,accession number AF144101,Smith-Waterman Score=64.
atgaccgcaacccttgccgctgccgctgacatcgctaccatggtctccggcagcagcggcctcgccgccgcccgtctcctgtcgcgcatgtttcctcctgccgcacaatggaattcggcattgtgcctacacagcattctgcggcaacatctctatgttgataaaaatacaaagattatttgccagggtttcactggcaaacaagggcaccttttcacagccagcaggcattggaatatggcaccaaactcgttggaggaaccactccagggaaaggaggccagacacatctgggcttacctgtctttaatactgtgaaggaggccaaagaacagaccggagcaacgggtttctgtcatttatgttcctccgccttttgctgctgctgccattaatgaagctattgagggcagaaattcccttggttgtttgttcaccctagaggaattccccagccaggccttggtcacagttcaagccacaaaacctgtggcccgggaaaagacaaggcttattggggcccaaactgccctggagttcatcaatcctggagaatgtaaaattggcatcatgcctgggccatatttcacaaaaaaggaaggattggcattgtgtccacatctggcaccctgacttatgaagcaggtcaccaaccacgcagaagttgggattggggcagtctttgtgcgttggcattggaggtgatccttcttaatggaacagattttattgacctgcctcgaaattctttttgaacgatttctgccacaggaaggcatcatattgattgggtgaaattggtggtaatgcgagaagagaatgctgcagaaattttggagccactttattcagggtccaaatttccaggcctgtagtgtcccttcattgctggtttaactgctcctcctgggagaaggaatggggtcatgccgggggcaattatttctgggagggaaaaggttggagctaaaagagaaagatcttctgcccttcagagtgcaggagttgtggtccagtatgtctccctgcacagctggggaaccacgattctacaaggaatttgaaaagagggaagatcgcctatgaaagcaaaaaaaaaaaattcctaaaactgtggaatggatcacgtagacatgtaacccagcagcagtttgcttctgttgtccactgattaatcagcctatgtgcctgacactggtcttgcagtacaactggaagccaaaacaaggtggaagatgtccttgaattaagacgttttcaccacattgtattacagagacagccaattaaatctactatttgatttcaaaaaaaaaaaaaaaaaaaagtttt

SEQ ID NO: 23061 - DNA, 2111 bp, Homo sapiens
  SIMILAR (1796)..(2032): 831254mologous to Homo sapiens ribosomal protein L7,accession number X57959,Smith-Waterman Score=335.
ttgaactctcctgaagagatgctatgttacctttgaatcagaccctgatggacactgagaagcaggttgctctgcaagcagcagagagatttggggatgagctttgtatcacacatagtgccagggaagggggtgaatattatccaaccagaagagaagcagtatcaatggatgaccctaaatggcctgccatgcccctatcctgggcctatataaacctgagaccctagtgggcagacacacgagcagctggatgtcatgaggaacacatcggcagaagaagatgtaagtggctggtcatagagaggacgtcgagaggagcactccagccatggggttagagccccatagcctgcccatctctatgctcccctagaggttttgagcagcaggacactgaagaagcgagctacacccccatcgcatgttctgcgaggtggatgtgtcacatctccccacctaactccaaccttcttgcctctcttataaggacgcttctgataacatttcactcatctggacaatccagtcttgcaaatgagggcatcaggggttatccgctgtggtgacagttggcctaaagtggactggttcttggtgccccaggtggtgcacatggtgccaatggtagcagtcacagctctgggtggacaagtctttgggtgcccagatgccatgtgcaggcaccagaagtggcagtggaaggctgggaaggctggtatttgggtccccagacaacacacacaggccgtggtagtggcaatggcagtcgcagacattcagaggccttcatggtggtggcagtggggcctaagagaaccaatccctggattcccaagcagctagggcagcctcctaatgtgctggactgcctgttttctgagttgtagggcactcaggtgccagggatgtgcccgtcttctgaattcaactggtgtattagaacatgctgggattgggctggcagtgggtcctctctcgtcacagggctggagtgggaagagagctgctggagccatggtttctctcgggtggtgagatttgcagccaggtctagcttggcaacctggggaatactttgcagccataaaaaaggattacttcatgtcctttgtaggacatggatgaagctggataaattcaatgcaattcccatcaaaatatcaccataattcttcacagaactagaagaaacaatcctcaaatttatatggaatcaaaaaagagcctgcatatccaaagcaagagtgaatacaaacgataaatctggaggcatcacattacctgacttcaaactatacaacgaggctatagttgccaaaacaacatggtactggtataaaagcaggcacatagaccaagagaagagaagagaagagaagaaagagtagaagaaggatccttctgtgccagaaacccttaagaaaaagcaaaggaatttcacagagctaaagatccagtgcctgagtaagaagtttgcccagaagatgcttcaaacagcaaggaggaagcttatctatgaaaaagtgaagcactgtcataaggaatataggaaaatgtacagaactgaaattcgaatggcaaggatggcaacaaaagctggcaacttctatgtacctgcagaacccaaattggcatttgtcatcaggatcagaggtatcaatggtgtgagcccaaaggtccgaaaggtgttgcagctttttctcctttatcaaatcttcaatggagcttttgtgaagctgaacaaggcttcaattaatatgctgaggattgtagagccatatattgcatgaggtacccaaatctgaagtcagtaaatgaactaatctacaagtgtggttatggcaaaatcaataagaagtgaattgctttgacagataatgctttgacagctcgatctcttggtaaatatgggatcatctgcagggaggatctgattcatgagatctatactgttggaaaatgcttcaaagaagcaaataactttctgtggcccttcagtatcttctccacgaggtgggatgaagaaaaagaccacccattttgtagaaggtggagatgctggcaaaagggaggtccagatcaacaggcttattagaagaatgaactaa

SEQ ID NO: 23062 - DNA, 781 bp, Homo sapiens
  SIMILAR (65)..(523): 321254mologous to Homo sapiens ribosomal protein L7,accession number L16558,Smith-Waterman Score=113.
ctggaaccatggagggtgtagaagagaagaagaaggaggttcctgctgtgccagaaacccttaagaaaaagcgaaggaatttcgcagagctgaagatcaagcgcctgagaaagaagtttgcccaaaagatgcttcgaaaggcaaggaggaagcttatctatgaaaaagcaaagcactatcacaaggaatataggcagatgtacagaacctgaaattcgaatggccgaggatggcaagaaaaagctggcaacttcttatgtacctgcaagaacccaaatttggcgttttgtcatcaggaatcagaggtatcaatgggagtgagccccaaaggttccgaaaggtgttgcagcttcttcggcctttcgtcaaaatcttcaatgggaaccttttgtgaagctccaacaaggctttcgatttaacatgctgagggattgtaggagccatatattggcatggggggtacccaaattctgaagtcagtaaatgaactaatctacaaggcgtggttatgggcaaaatcaatttgacttgcactttcctacagagaaaagaagtcacccaggttcacaatgagcagcccaacttggacaatttaccaaagcacagaagaattcaaaatctagatcttctcaccaggactctctccagtggctgtcctacttgcaaatgtaatcatcctcccagaggagagtcaggcacaaaccagggagaactgaaggagctctttagcccctcaaaatacatcaaaggaagactcaatgcagccaaaattcaagcctaa

SEQ ID NO: 23063 - DNA, 619 bp, Homo sapiens
  SIMILAR (64)..(339): 351254mologous to Homo sapiens F1F0-type ATPase subunit f,accession number AF088918,Smith-Waterman Score=86.
cccacgcgtccgcccacgcgtccgggactccaaaatggcgtcagttggtgaagtgtccggcccccagtacccagtgaaggacaagaaacttcttggaggtccaaactgggggaagcttcccaagctggtatcttgatgcggggaccttcaagtcctagtggcattttcgggagcgtttcaaagagggttactacggggtacctacaacaagtacatcatatgtgaagaaggggagcgatctcgggggatttaccatggtgctgggcatgctaccgtgctctttagctactccttttcctacaagcatctcaagcacggagcgggctccgcaaataccactgaagagggacacactctggcacccccccaccccacgacccttgggcccgagcccctccgtgaggaaacaacaatctcaagcacgagcggtccgcaaataccactgaagaggacacactctgcacccccccaccccacgaccttggcccgagcccctccgtgaggaacacaatctcaatcgttgctgaatcctttcatatcctaataggaattaacctccaaataaaacatgactggtacgtgaaaaaaaaaaaaaaaaaaaaaaaaaaaaaaaaaaaaa

SEQ ID NO: 23064 - DNA, 414 bp, Homo sapiens
  misc_feature (1)...(414): n = a,t,c or g
cccacgcgtccggttgagatgttaaatggtggacgagtactgtggatgtgaatgggggaagtaattgtaatcatatgtaattggtcacaaggcctaatttgcagtaactattgctgttttatttaacaatgccttgttgctttgcatgcattaatgtttggatgtaaagattgtgtgtctatccaacagggagccacagtatttaaattgaccaacctaatgttacaactactttgagggggccaaatgtaaactaaaagccttaattaaagcggcgcaattttgtataacttatcatcagtagttcaataaatttggattgccatgccagggcttgcattatnnnnnnnnnnnnnnngggcggccgatttaaaaaaaccttgggggggcccaaattaaccgggtaatgcaaag

SEQ ID NO: 23065 - DNA, 2118 bp, Homo sapiens
  SIMILAR (310)..(408): 1001254mologous to Homo sapiens Rap1B protein,accession number X08004,Smith-Waterman Score=168.
gcggcgcggcagcggcaggaccgccgtggcgcctagagtagcgacccggggggagcgcggggcgacgctggctgcagggacccggtgacagcgtgagaggttcgcagagtactaggttttgacaagcttgcatcatgcgtgagtataagctagtcgttcttggctcaggaggcgttggaaagtctgctttgactgtacaatttgttcaaggaatttttgtagaaaaatacgatcctacgatagaagattcttatagaaagcaagttgaagtagatgcacaacagtgtatgcttgaaatcttggatacctgcaggaacggagcaatttacagcaatgagggatttatacatgaaaaatggacaaggatttgcattagtttattccatcacagcacagtccacatttaaccgatttacaagacctgagagaacagattcttcgagttaaagacactgatgatgttccaatgattcttgttggtaataagtgtgacttggaagatgaaagagttgtagggaaggaacaaggtcaaaatctagcaagacaatggaacaactgtgcattcttagaatcttctgcaaaatcaaaaatatatgttaatgagatcttttatgacctagtgcggcaaattaacagaaaaactccgagtgcctggggaaggctccgcaaaaaagtccatcatgtcagctgctttaatatacctaaatggcattggtaggctctggagccagggtctgaaggaactgttgccccaatttcaacaggtgcccagcattcccaactttgtttaaacctaccaacatcttaaaatgggactttcctgtggttggtaacactttaagaggcggatggaaagctagctatatcgagtttgcacattcttaatcactttccagtatgagaagagagatttttacaattatataatagtcctagagtttgcagctggtaaaaccagaggctacatccagtattactgctaagagacattcttcatccaccaatgttgtacatgtatgaaaaatggtgtactgtatactttaacatggccccatactttgtattgggagagtacaataatgtaaatcctaaaagcaccactattttagcataataaaagaaagtccaaagagctcctatatagactactccagataacttcgcttctttgatacttgtagcttattgtaatttttttttaagaaattcaaggtcattattattgtacaaaataagcgctttgattaacacagctatatagtttttttaatttttaaaaaacctgtgggagacggtgatcttgtctttaaaacatgatagtccttttcagtataatgtcttacgattaaagacgttgcctttaatatctgttgggaaggaaatgtccagacttttcaaatctcttattatatggttccccttttttgtttacatagggaacaatgtttatagtcgtgtgtacagtgggggtctacaacaagaagtgtatattttcaaacaatttttttaatgatttaacaatttttggtaaatcattttccaggcttcctgcagcttgtagattctcactgtgaatccccttgctttgctcatgccataagtgtatttgcaatccccaaatataccaggtttagtatttttgccctgttagtggattgtttccaccatgtgtaacgttttggttgagatgttaaatggtgggacgagtactgtggatgtgaatgtgggaaagaatttttaatcaaaatgtaattggtcacaaggccctaatttgcagtaactattgcctgttttattaaacaatgccctgttgccttgtatgccattaatgtttggatgtaaagattgtgtgtcctatcccaacagggagcccacagtatttataattgacccaaccctaatgttacaactactttgaggtggcccaaatgtaaactaaaaagccttaattaaagtggtgcaattttgtataacttagcatcagtagttcaataaatttggattgccatgcaagggcttgcattataattacttgccacttgaatgtgttttgtgtaatgttttaacagtgctagtaaataaatacgggtttaccctggttttaaaaaaaaaaaaaaa

SEQ ID NO: 23066 - DNA, 1580 bp, Homo sapiens
  SIMILAR (363)..(322): 711254mologous to Homo sapiens Human secreted protein, SEQ ID NO: 6812,accession number G02731,Smith-Waterman Score=51.
ttagttacttcctagatataatgggggtacgggcattggataaacacactcattccagatgggagaaattggccaaaacaaaggggctacaggccccatgcaactcctaaatccagtggggcagccaaatcttaaaactccaaaatgatctcctttgactccaggtctcacatccaggacacgctgatgtaagaggtgggtttctacagccttgggaagctctgcccctgtggctttgcagggtacagctcccctcctggctgctttcacaggatggcattgagtgtttgtggcttttccaggtacacgatccaagctgtcagttggtctatcattctggggtctggaggatggtggccctcttctcacagctccactagtcccagtggggactctgtgtggaggctccaaccccacatttcccttctgcattgccctagcagaggttctccatgagggctctacccctgcagcacacctctgcctggatatccaggtgtttccatacatcctctgaaatctaggcagaggttcccaaacctcagttcttgacttctgtgtacccacaggtccaacaccacatgtaagcctccaatgcttggggcttacaccctctgaagcaatggtttcagctgtatattggccccttttagccacagatgggatgcagggcaccaagtcctgagactgcacaaagcagcaaggtcctgggcccagcccacaaaaccatattttcctcctaggcctctgggcctgcgatgggaggggctggcataagggtctctgacgtgccctgaaaacatttttcccgttgtcttggtgattaacatttggctccttgttatttatgcaaatttctgcaaccagcttgaatttctccccagaaaatgggtttttcttttctattgcactgtcatgctgcagatttccaatttttttatgctctgcttcccttttaaatataagttccaattccaaaccacatctgttattgctcaatctcaggtggctgaatgccacttgtccctctaagaagttgggggatgctgactgctcggggttcacgtaactagttagcatgccacagtcttgttcgttatcggaattaaacagacaaattactccatcaactaagaactgccatgcaggggaactgccctcttggcagcgctgcctgtcatggctaaagttaagtgaattccaatccccgtttatgcatctgctctcccagactgcaaggtccttgcctgcaggacatgtcttgttcagtgttgtaacttggagcacctgcacaatgccaggctccttgtttgaattaacccaaaatgtactttctgccttgttttgacctttcttttgccgagacatgatccccccatctccctgtcctctgatcattactaaactgctattgtattcaatatttagcccatttttttttctgttctccactgtttttgttaagctctggtggacaaactcttacatcatatgactatttttctttttagtgtactcgatcctacttccttcttttatatttaaaggcattagaaagacaccttttatgaaattcagtt

SEQ ID NO: 23067 - DNA, 550 bp, Homo sapiens
  SIMILAR (146)..(72): 441254mologous to Homo sapiens Human h1CED-6 proline/serine rich region,accession number Y27251,Smith-Waterman Score=61.
ctgcggcttaatttgacccaacacgggaaacctcacccggcccggacacggacaggattgacagattgatagctctttctcgattccgtgggtggtggtgcatggccgttcttagttggtggagcgatttgtctggttaattccgataacgaacgagactctggcatgctaactagttacgcgacccccgagcggtcggcgtcccccaacttcttagagggacaagtggcgttcagccacccgagattgagcaataacaggtctgtgatgcccttaaatgtccggggctgcacgcgcgctacactgactggctcagcgtgtgcctaccctacgccggcaggcgcgggtaacccgttgaaccccattcgtgatggggatcggggattgcaattattcccgtttgaggcgtcactactgtcactgccatcaccccacggagccacttctagaggggagtagacccgcccttcgcgggcagagaagatgtgcccctgccatcaagacgatgatacaaacacccccagtcattgttcgcagactcggctgttaa

SEQ ID NO: 23068 - DNA, 2201 bp, Homo sapiens
  SIMILAR (71)..(991): 961254mologous to Homo sapiens beta-1,4- galactosyltransferase,accession number AF038664,Smith-Waterman Score=1589.
ttagggcctggacagtggccccgagtccggcctgagagcgcagcctgggctgctggcagggaagaggaagatgtctgtgctcaggcggatgatgcgggtttccaatcgctctctcctcgccttcatcttctttttctccctctcttcgtcctgtctgtacttcatctatgtggccccaggcatcgccaacacatatctctttatggtacaagctcgaggtataatgttgagagaaaatgtgaaaacaataggtcatatgatcaggctgtacacaaataaaaacagtacgctcaacggtacagattatcccgaaggcaataattcaagtgattatcttgttcaaacaacaacgtatctcccggaaaacttcacatactcaccatacctcccctgtccagaaaagctgccttatatgcgaggattcctcaatgtcaatgtaagcgaagtcagttttgatgaaattcatcaactcttctccaaggatttagatattgagccagggggtcattggaggccaaaagactgtaaacccagatggaaggtggcagttctcattcctttccgtaatcgccatgaacatcttccaatttttttcttacatctgattccaatgctccagaagcagcggctggaatttgcgttttatgtcgttgaacagactggcacacaaccttttaaccgtgcgatgcttttcaatgtgggcttcaaagaggccatgaaagacagtgtctgggactgtgtaatcttccacgatgtggatcatctacctgaaaatgaccggaactattacggatgtggagaaatgccacgtcattttgctgcaaagctggataaatacatgtatattcttccatataaagaattttttggtggtgtaagtgggctgacagtggaacaatttagaaagatcaatggttttcctaatgccttctgggggatggggaggagaagatgatgacctttgggaacagagttccactatgctggatattaatgttaaccagaccagagggagacttaggaaaatacaagtcaattcctcatcaccatagaggtgaagtccagtttttaggacggtataaattactaaggtattccaaggagcgtcagtacatcgatggactgaacaatttaatatataggccaaaaatactggttgataggttgtatacaaacatatctgtaaacctcatgccagagttagctccaatcgaagactattaaaagaagtggctgtcgtggcaaggtagaccacaatgctggatcataaacttggagcgcgctcttagtggaggtcagtgattggctgtgtcacagtgcccttttctctgagaagagccagcagtccacagtgtttacagagtgggactatatacagtcacccttctctcaccccgtcctccctgctttgagacacacccctgtggcgagcaccgcagaaaatgggaagccactacttaagatcggaagttaagagagctccctccgaagagaaaatttttatactaaaatctataatttaattcaagagaatgcttttatttccgtttaaacatattttgtatatatgtgatataaattaatgtgtgcaaattgtttaaaaattagatgtgttgcagttttgcatgtaatcggttatacctttattggacttttatagacattttttatttgcatgaaaaaaactcactaaatttacatcactaaacaaaggttaacccttgtgtgaaatgaaggaactgtcaataattgacagccaactaatacagtaaactgttatactagttttgagctttagacctcagccttttgtgtggaagaagtcacagccttcctaggccttaaaaggaaaaagaaggaaggaccttaaatagcttttcttcctaccgggattaccctatgtttttcccttgccttgccaatcctcatcctgattttgcctagaaatccacaacccatattgtttatgcatattgcatgagtattaccaagaaaaaaatctttaaaagttgtgatgtgacatgatataaaggatctctttatgttaaatgtctttccatgtacctctggtgtgtcagggattttgtgcctcaaaaaatgtttccaaggttgtgtgtttatactgtgtattttttttaaattcacggtgaacagcacttttattatttccagttcagaagagccaaaaaaaaaaaaaaaaa

SEQ ID NO: 23069 - DNA, 498 bp, Homo sapiens
  SIMILAR (123)..(164): 851254mologous to Homo sapiens ribosomal protein L31 (AA 1- 125),accession number X15940,Smith-Waterman Score=63.
atggggttacagagtgagttctccaaccaggtggccagagcttggggaggtataagagaacctcagggtggtggtagtgtacatttgaaaaagccccgcctttccaacttggacgcggcagaatggttcccgcaaagaagggtggcgagaagaaaacgggccgttgccatcaacgaagtggtaacccgagaatataccatcaacattcacaagcgcatccatggagtgggcttcaagaaacgtgcaccttgggcactcaaagagattcggaaatttgccatgaaggagatgggaactccagatgtgcgcattgacaccaggctcaacaaagctgtctgggccaaaggaataaggaatgtcctataccgaatccatgtgaggctgtccagaaaacgtaatgaggatgaagattcaccaaataagctatatactttggttacctatgtaactgttaccactttcaaaaatctacagacagtcaatgtggatgagaactaa

SEQ ID NO: 23070 - DNA, 363 bp, Homo sapiens
  SIMILAR (214)..(360): 931254mologous to Homo sapiens Human cytoskeleton associated protein 11 (CYSKP-11),accession number Y91956,Smith-Waterman Score= 232.
atgagacattacctcacacctgttaggatggctggtatcaaaaagtcaaaagagattaagcattggagaagatgtggagaaaggcgagcccttagacattgctggtgggaatggaaaacagtacagaggctccttgaaaaaatcaaaagcgacaactcagtggtggccactgcgcagaccagacttctctcgttctcgcacgcctcgctccgcttttcctccacaaccatgtctgacaaacccgatatggctgagatcgagaaattcgataagtcgaaactgaagaagacagagactcaagagaaaaatccactgccttccaaagaaacgactgaacaggagaagcaagcaggcaaatcgtag

SEQ ID NO: 23071 - DNA, 1602 bp, Homo sapiens
  SIMILAR (339)..(575): 351254mologous to Homo sapiens HSPC218,accession number AF151052,Smith-Waterman Score=70.
ctgtggagatccgcggaggccgacaggattcgttggctgccgtccccgctgctgtgcattggggatggaggttagggaatggagatttcctctaatgattcaaggctgtgcacgttgctccttaggaactcaaattgaggttaaaaacgacaaccaacatcagccatgaaagatccaagtcgcagcagtactagcccaagcatcatcaatgaagatgtgattattaacggtcattctcatgaagatgacaatccatttgcatgagtacatgtgggatgggaaaatggaaggaaggaatttcaacaggacaaataggaaggagggagttatggggaaggaaggatttatttgaaccgctgttttcccaaggaaattgcttggggaggaggggaaggaaggagccttgaattgggttttatttcccagcttcgagattcttccccaccaaactatgggaccaaatccaaggaccagttttaatgacccttgtttatccagtgatggctccttctcctgggaagatcttgtggtcaagagccaatctgaatccaaatgcaaaggagtttgttcctgggggtgaagtacggaaatatttgagtagacggggccctcttttggtggatgtagcacaatttccacactgtgaaggcagtattagaagacttaattgtaaaagctctcttggtcactgtgttacactttatgccattgcccaaagtttttgttagtccttgccatgccttaataaaagtgcctggagactggttacctaagtaaaaagctgccacacatttactgaaaataaaattggccccatggcttgatgtgaacaccgcagggatagaagccccaggctagttgtgaaccaccacccgaattatgagaaccttaaccttaccaaattgtctttttttgaggctaatctatcacttgttaatgtctaaactttaaaatcagtacatttaatttgagttccaactgttaaggcatatttctcaggacttaaattggattatgtcccccatcaaaaaggaatctcccattttctgaagggtctgttagttaatttgaggataatttgttaaaggccaaggtatgtccatattacctgaggctacaaggttaggtccagccagatggagtgcccagtcccagcctttttctgggtatgttaatggttagaaatattgagttcctaatgttaccatcctgaggaagtatggtaattttggaggaattggtaacctccctaagggggattccacctgccatccataggctatgccctgtatgggagtcctaaccatatgacccaatacccaaccccataatcccagctggaccaagatacttgtaacattatgatttgagtggtgccttttcccttgctttgtttacccatcacgagagtctgcagctacaacttttaacaaagctagaagggtttgtggcttcttaaacttcatatttgggtaggtataagctgccatacgtgttcagtgtgaatagtgtttaagttgaaaatattgtaaaaaaattatattttttcaaaaatatttaaaaaaataaataatagtagaactgaaaaaaaaaaaaaaaaaa

SEQ ID NO: 23072 - DNA, 707 bp, Homo sapiens
  SIMILAR (337)..(2): 1001254mologous to Homo sapiens CG1 protein,accession number L25616,Smith-Waterman Score=561.
ccctaacactacttgaagtttcaacgacattcaatggaacaggtgcaacttgatcatcttctactgccaaagcatctgataatttaaagtctcgaggtacactctcagagtcggattcatggaggtttccattctggatttctttctttttattctttttcttttctgctttctttttatctgttttggtaggaataagcttttgttctcttttctgttttgcaagaacttcatcatataatgtttctttcatgaaaagccagaagaagaggaaaattactgtaataactattgaaggaataagaacaataaaatatgctgactcataaaactccatggtacttttgtcaatgtgatcctataaaactaagttttacatataatctccaggtttctggattccctgaagaatatgcacgggccccaggtttaaaatcctgctctatattgagagttttcattcctgccctatcttaaaagaactgtaatcccagctacttaggaggctgaggcaatgagaatcacttgaacccaggaggcaaagggttgcagcaagccaaggtcacaccactgcactccagcctgggtgacggaacgaaaatctaccctgtgcggccgggaaaggagaccgggaagacgcggcggcgccggcactacagcccgggccgcccgctccgaggcgccgccgccgccgccgccgccgccgc

SEQ ID NO: 23073 - DNA, 1227 bp, Homo sapiens
  SIMILAR (152)..(361): 451254mologous to Hordeum vulgare cold-regulated,accession number M60732,Smith-Waterman Score=109.
atggatttttccaaagtcccccctcatgctgctttccgtgcccaaccgcctcccgccctgacctggggactcgcaaagggcagcgggaggggcgccggggaagggggcgagcgcccagaccgccggaggcagcggcgaggactggaactccagcatggcgacccgcgggccggcgccgcctccccccgcgctccccgccgccggcgcccgtcccggtgcggcctgctctccctcaccctgtgcggccgggaaaggagaccgggaagacgcggcggcgccggcactacagcccgggccgcccgctccgaggcgccgccgccgccgccgccgccgccgcagtcgctcagaccgcgtcccccagctgggccgaaggtggacgctcaggggctggaggctcagcggaatcccctgcgttcagtagccccgctctcccctgtcccgaaggattactctgcccctcagcggttccagtgccctcaaagcaatctgtctctgaagtactggctatcttctgagcgtgtgccagaagatccagctttgttgaaaagcgaagccgttagtcccttaatacaaaggatcagggatagcagaaatgaaagtataatggaagcagctggaggattccaggtccactttcacccaagtaatggagacggaaggttcatcgaaacttcttcagctgcagatctagaagtcattagctattctagcaaagtatctgtcacagaaaggtgcttcataaaggctgccagtgaattggaaattaatggattaaatgaggacagagaaactagtatttgtgcatatgcactgtgccagcctactcaatatgaagaaggaggaaggactatgtcagtttctgaggctccaactacatacgtactcctgaagccagtgatggggtcagctcccttctgtgtcatatggactaaaagtgggaaagaggttattgcccaaaggaaaactggagtaatgttaccagagaaagagagaacagacaccaggccgccatcaagtacagacgagcactgtagcaagcagctgagtgaaatgcatctcatcttcataacagagcctgggctctcctttactggaatcagccaggtgctgtataaaatgcacaggaatctgacctaccagggctcaaaaccaagctctgagcccaattgttgtacaaccttgggccgctttgctgacatctctggaactcaagttcctcatatgtaa

SEQ ID NO: 23074 - DNA, 810 bp, Homo sapiens
  SIMILAR (6)..(710): 1001254mologous to Homo sapiens immunoglobulin lambda light chain,accession number X57815,Smith-Waterman Score=1232.
ccagcatggccggcttccctctcctcctcaccctcctcactcactgtgcagggtcctgggcccagtctgtactgacgcagccaccctcagcgtctgggacccccgggcagagggtcacaatctcttgttctggagccagctccaacatcggcactaatgatgtatactggtaccagcaactcacaggaacggcccccaaactcctcatctataggaataatcagcggccctcaggggtccctgaccgattctctggctccaagtctggctcctcagcctccctggccatcagtggcctccagtccgaggatgaggctgattattactgtgcagcatgggatgacagcctcagtggtccggtgttcggcggagggaccaagctgaccgtcctaggtcagcccaaggctgccccctcggtcactctgttcccgccctcctctgaggagcttcaagccaacaaggccacactggtgtgtctcataagtgacttctacccgggagccgtgacagtggcctggaaggcagatagcagccccgtcaaggcgggagtggagaccaccacaccctccaaacaaagcaacaacaagtacgcggccagcagctatctgagcctgacgcctgagcagtggaagtcccacagaagctacagctgccaggtcacgcatgaagggagcaccgtggagaagacagtggcccctacagaatgttcataggttctaaaccctcacccccccacgggagactagagctgcaggatcccaggggaggggtctctcctcccaccccaaggcatcaagcccttctccctgc

SEQ ID NO: 23075 - DNA, 791 bp, Homo sapiens
  SIMILAR (10)..(702): 1001254mologous to Homo sapiens immunoglobulin lambda light chain,accession number X57818,Smith-Waterman Score=1219.
gcctcagccatggcatggatccctctcttcctcggcgtccttgcttactgcacaggatccgtggcctcctatgagttgactcagccaccctcagtgtccgtgtccccaggacagacagccagcatcacctgctttggagataaattgggtgataaatattcttcgtggtatcagcagaagccgggccagtcccctctactggtcctgtatcaagataccaaccggccctcagggatccctgagcgattctctggctccaactctgggaacacagccactctgaccatcagcgagacccaggctatggatgagggtgactattactgtcaggcgtgggacagtaacactgtggtcttcggcggagggaccaagctgaccgtcctaagtcagcccaaggctgccccctcggtcactctgttcccgccctcctctgaggagcttcaagccaacaaggccacactggtgtgtctcataagtgacttctacccgggagccgtgacagtggcctggaaggcagatagcagccccgtcaaggcgggagtggagaccaccacaccctccaaacaaagcaacaacaagtacgcggccagcagctatctgagcctgacgcctgagcagtggaagtcccacagaagctacagctgccaggtcacgcatgaagggagcaccgtggagaagacagtggcccctacagaatgttcataggttctcaaccctcaccccccaccacgggagactagagctgcaggatcccaggggaggggtctctcctcccaccccaaggcatcaag

SEQ ID NO: 23076 - DNA, 2027 bp, Homo sapiens
  SIMILAR (1075)..(1389): 941254mologous to Homo sapiens immunoglobulin lambda light chain,accession number X57820,Smith-Waterman Score=514.
cggcctcccgcgtcgacccacgcggccgcccacgcgttctggggtgtctccaccatggcctggaccccactcgggggtcctcttccctctcctcctccactgcacaggttccctctcgcaggctgtgctgactcagccgtcttccctctctgcatctcctgggagcctcggtcaagctcacctgcaccttgcgcagtgacatcaatgtaggttcccccttcatatactggtaccagcagaagccagggagtcctccccagtttctcctgaggtacaaatcagactcagataaccaacagggctctggagtccccagccgcttctctggatccaaagacgcttcggccaatgcagggattttactcatctctggcctccagtctgaggatgagggatgactattactgtcaggcgtgggacagcagcactgcacacagtgacacaggcagatgcggaatagtgggaagaccccctgtcaggcagtgctggcccctgctgctgctgggtctggccatggtcgcccatggcctgctgcgcccaatggttgcaccgcaaagcggggacccagaccctggagcctcagttggaagcagccgatccagcctgcggagcctgtggggcaggctcctgctccagcccagcccccagagagcagaccccaggtgctggccccgggggttttggtctgagcctcagtcactgtgttatgtcttcggaactgggaccaaggtcaccgtcctaggtcagcccaaggccaaccccactgtcactctgttcccgccctcctctgaggagctccaagccaacaaggccacactagtgtgtctgatcagtgacttctacccgggagctgtgacagtggcctggaaggcagatggcagccccgtcaaggcgggagtggagaccaccaaaccctccaaacagagcaacaacaagtacgcggccagcagctacctgagcctgacgcccgagcagtggaagtcccacagaagctacagctgccagctgcagtgggggctggggctaggggcatcccagggagggtttttgtatgagcctgtgtcacagtgtgtggtattcggcggagggaccaagctgaccgtcctaggtcagcccaaggctgccccctcggtcactctgttcccgccctcctctgaggagcttcaagccaacaaggccacactggtgtgtctcataagtgacttctacccgggagccgtgacagtggcctggaaggcagatagcagccccgtcaaggcgggagtggagaccaccacaccctccaaacaaagcaacaacaagtacgcggccagcagctacctgagcctgacgcctgagcagtggaagtcccacagaagctacagctgccagaaacctaaccacgcatcacacggcacttctcgcatgccttctgtgtctgctccagtctctgggctaaagagttgctggtccgggacaggggataggtccgctcttggtcagatgccaggtccctgccatggcatccctgaccctatgcaacaagccagtgactctggtcagcccaaggctgctcccctcgggtcactctgttccaaaccctcctctgaggagctttcaggccaacaagggccacactggtgtgtgtcataagtgacttcttacccgggaagccgtgacagtggcctggaaggcagatggcagcccggtcaagcggggagtggagaccaccacaccctcccaaacaaagcaacaacaagtacgcggccagcagctatctgagcctgacgcctgagcagtggaagtcccacagaagctacagctgccaggtcacgcatgaagggagcaccgtggagaagacagtggcccctacagaatgttcataggttctaaaccctcacccccccaccacggggagactagagctgcaggaatcccaggggaggggtctctcctcccaccccaaggcatcaagcccttctccctgcactcaataaaccctcaataaatattctcattgtacgatcagaaaaaaaaaaaaaaaaaaa

SEQ ID NO: 23077 - DNA, 959 bp, Homo sapiens
  SIMILAR (28)..(210): 951254mologous to Homo sapiens histone H2B,accession number Z80781,Smith-Waterman Score=297.
gtattcttactcctttatcttgttgcaatgcctgatccagctaagtccgctcccgccccgaagaagggctccaagaaggcggtgaccaaggcgcagaagaaggatggcaagaagcgtaaacgcagccgcaaggagagctactccgtatacgtttacaaggtgctgaagcaagtccaccccgacaccggcatctcctcccaaagccatggggatcatgaattcctttgtcaacgatatcttcgagcgtattcgccggcgaggcttcccgcctggctcattacaacaagcgttcgaccatcacctccagggagatccagacagccgtgcgcctgctgctgcctggggaactggccaagcacgccgtatttattgagaacctattaaattacagaaaatacttagtaaagagcagtgagaaagatagaaactatccctgtcctttacctggattgaaatctaaagtggatatttgtacaccttactgcctcctcctcctccctcagccccgccattacccgggtaaagataccaaagaggagacggaggattttcctaattcccctcccccaataaatcgggaagaagacaagagatatactacagttatgggaccctgtcttaggcaagcagcattagaaggggagctcctggcttgtcctgtgatggaagatcaacaggccaattgggtacatgagcctattactttcaacacttttaaggaaatcaggaaaagcattagagaaaatggacctgctagcccattcacaagaggattaattgaggtcatagcagattcatccgatcttgtggcctccacccagaaactgactcagcccaaggagacaccttcagctccctataatgacatctctgacctgaccaatcaggactcctggttcatcggcttcccccccatctggaatgctggggagactgatttgagtaacaataaaactacg

SEQ ID NO: 23078 - DNA, 674 bp, Homo sapiens; identical to SEQ ID NO: 22896
  SIMILAR (84)..(461): 1001254mologous to Homo sapiens histone H2B,accession number Z83336,Smith-Waterman Score=628.

SEQ ID NO: 23079 - DNA, 502 bp, Homo sapiens
  SIMILAR (86)..(463): 1001254mologous to Homo sapiens Histone H2B,accession number AJ223352,Smith-Waterman Score=628.
cgcgcccctcgagatcgtcgacattagtccgtgcggtggaattctcgatctgctgctcgtctcaggctcgtagttcgccttcaacatgccggaaccagcgaagtccgctcccgcgcccaagaagggctcgaagaaagccgtgactaaggcgcagaagaaggacggcaagaagcgcaagcgcagccgcaaggagagctactccgtatacgtgtacaaggtgctgaagcaggtccaccccgacaccggcatctcctctaaggccatgggaatcatgaactccttcgtcaacgacatcttcgaacgcatcgcgggtgaggcttcccgcctggcgcattacaacaagcgctcgaccatcacctccagggagatccagacggccgtgcgcctgctgctgcccggggagttggccaagcacgccgtgtccgagggcaccaaggccgtcaccaagtacaccagcgctaagtaaactttgccagggaggactttctctggaatttcctga

SEQ ID NO: 23080 - DNA, 490 bp, Homo sapiens
  SIMILAR (62)..(433): 331254mologous to Mus musculus glycerol-3-phosphate acyltransferase,accession number M77003,Smith-Waterman Score=137.
  misc_feature (1)...(490): n = a,t,c or g
gcagctacgggttttgagactttttgaagngcgttgnnattcggcacaactgagtgctgagctgctgcccgtcttcctgagcgaggctgtgggcgcctgtgcagtgcgggggctgctggcaggcagagtgccgccccaggggccctgggagctgcagggcatattgctgctgagccagaatgagctgtaccgccagatcctgctgctgatgcacctgctgccgcaagacctgctgctgctaaagccctgccagtcttcctactgctactgtcaggaggtgctggaccggctcatccaatgcgggctcctggttgctgaggagaccccaggctcccggccagcctgtgacacagggcgacagcgattgagcagaaagctgctgtggaaaccgagtggggactttactgatagtgacagtgatgacttcggagaggctgacggccggtacttcaggagttgggctacacagagcagctgttccagttcctgc

SEQ ID NO: 23081 - DNA, 500 bp, Homo sapiens
  SIMILAR (15)..(131): 401254mologous to Rattus norvegicus sn-glycerol 3-phosphate acyltransferase,accession number U36771,Smith-Waterman Score=69.
gccagatcctgctgctaatgcacctgctgccgcaaaacctgctgctgctaaagccctgccagtcttcctactgctactgtcaggaggtgctggaccggctcatccaatgcgggctcctggttgctgaggagagttgggctacacagagcagctgttccagttcctgcaggccaccgcccaggaagaagggatcttcgagtatacggacccaaagctcgccatcagtgctgtctggaccttcagagacctaggggttctgcagcagacgccgagccctgcaggccccaggctccacctgtcccctacttttgccagcctggacaatcaggaaaaactagaacagttcatccggcagttcatttgtagctagaactgtgaggaggagcctgtgctgagacttctcagccccagaacacagctgtgtcctagagccagaagatggagaggaggctgcaaacccttagctgctctataaatataatcattgaggcttgattgtc

SEQ ID NO: 23082 - DNA, 577 bp, Homo sapiens
  SIMILAR (63)..(284): 371254mologous to Homo sapiens Human secreted protein encoded by Gene No. 5,accession number W73401,Smith-Waterman Score=72.
  misc_feature (1)...(577): n = a,t,c or g
tttttttttttttttttgctgtggaaaccgagtggggactttactgatagtgacagtgatgacttcggagagggctgacggccggtacttcagggtgtgtttcaaaaagctgccccctgcanggaggtggtagggaggcggtggggagctgcactcaccccggcctgtcccctccagctcagccagcagtcacactgcccagatttctttcttttcctctgccgcctgctcagcccgctgctcaaggcctttgcacaggctgccgccttcctccgccagggccagctgcccgatactgggtgaagcccttgttcccttgcagtcctcgaggcaggctgtgtctgtggctggggtgccaggtctaaggtcttctctcttcagcagagttgggctacacagagcagctgttccaagttcctgcaggccaccgcccagggaagaagggatttttcggtgagtccccaaccagtcagcccaggctcctagagccttcacttctctcttctttccagagtgtgcggacccaaagctcgccatcagatgctgtctggaccttcagagaccttgagaaagacag

SEQ ID NO: 23083 - DNA, 2640 bp, Homo sapiens
  SIMILAR (591)..(2240): 301254mologous to Rattus norvegicus sn-glycerol 3-phosphate acyltransferase,accession number U36771,Smith-Waterman Score=572.
gcccaggtgttctgagcacagccaccttcagagaatctggcctgagtccctgctcgaagctcaagcacccggggcctcgcggccgcctgcagtactcccctcccaccgcgggccagggccgactggaaaacggagcaggccatccccagagcacgggtcccgtggccacgttgagtgtcgcagagtacgggacgcagggcggggcttctggaccagcgcgcatcccaattggctctcggggctgccttttagccggacgcgcggaggctagcctgtggtcgtcaggctttgggatgaagctggaggctgtcactccattcctgggcaagtatcgcccctttgtgggtcgctgttgccagacctgcacccccaagagctgggagtccctcttccacagaagcataacggacctaggcttctgcaatgtgatcctggtgaaggaggagaacacaaggctgttcagctgggcgctgctgagggttctgaaactgctgttcctgaatgtgcagctccacaagggtcagatgaagatggtccagaaggccgcccagcaggtggggcaggttggcacttccctctggctctccccggagcagggcttgccgcttgtcctcctctctactcacaaaaccctcctggatgggatcctgctgccctttatgctgctctcccagggcctgggtgtgcttcgtgtggcctgggactcccgcgcctgctcccctgccctcagagctctgctgaggaagcttggggggcttttcctgcccccagaggccagcctctccctggacagctctgaggggctccttgccagggctgtggtccaggcggtcatagagcagctgctggttagtgggcagcccctgctcatcttcctggaggaacctcctggggctctggggccacggctgtcagccctgggccaggcttgggtggggtttgtggtgcaggcagtccaggtgggcatcgtcccagatgctctgctggtaccagtggccgtcacctatgacctggttccggatgcaccgtgtgacatagaccatgcctcggcccccctggggctgtggacaggagctctggctgtcctacgtagcttgtggagccgctggggctgcagccaccggatctgctcccgggtgcacctagctcagcccttttccctgcaggaatacatcgtcagtgccagaagctgctggggcggcagacagaccctggagcagctactgcagcccatcgtgctgggccaatgtactgctgtcccagacactgagaaggagcaggagtggacccccataactgggcctctcctggccctcaaggaagaggaccagctcctggtcaggagactgagctgtcatgtcctgagtgccagtgtagggagctctgcggtgatgagcacggccattatggcaacgctgctgctcttcaagcatcagaagggtgtgttcctgtcgcagctcctgggggagttctcctggctgacggaggagatactagtgcgtggctttgatgtaggcttctctgggcagctgcggagcctgctgcagcactcactgagcctgctgcgggcgcacgtggccctgctgcgcatccgtcagggtgacttgctggtggtgccgcagcctggcccaggcctcacacacctggcacaactgagtgctgagctgctgcccgtcttcctgagcgaggctgtgggcgcctgtgcagtgcgggggctgctggcaggcagagtgccgccccaggggccctgggagctgcagggcatattgctgctgagccagaatgagctgtaccgccagatcctgctgctgatgcacctgctgccgcaagacctgctgctgctaaagccctgccagtcttcctactgctactgtcaggaggtgctggaccggctcatccaatgcgggctcctggttgctgaggagaccccaggctcccggccagcctgtgacacagggcgacagcgattgagcagaaagctgctgtggaaaccgagtggggactttactgatagtgacagtgatgacttcggagaggctgacggccggtacttcaggctcagccagcagtcacactgcccagatttctttcttttcctctgccgcctgctcagcccgctgctcaaggcctttgcacaggctgccgccttcctccgccagggccagctgcccgatactgagttgggctacacagagcagctgttccagttcctgcaggccaccgcccaggaagaagggatcttcgagtgtgcggacccaaagcttcgccatcaagtgctgtctggaccttcagagacctaggggttctgcagcagacgccggagccctgcaggccccaggctccacctgggtcccctacttttgccagccttggacaatcaggaaaaacttagaacagttcatccggcaggttccttggtaggctagaacctgtgaggaggagcctgtgctgagacttctcagcccgcagaacacagctgtgtcctagagccagaagatggagaggaggctgcaaacccttagctgctctataaatataatcattgaggcttgattgtcccttgccatctcttgctttttcccttctttgatgtgataaacaaggggacgagacgagttgtcttttccccagcccagcagc

SEQ ID NO: 23084 - DNA, 1000 bp, Homo sapiens
  SIMILAR (295)..(918): 671254mologous to Homo sapiens CAC-1,accession number AB012692,Smith-Waterman Score=662.
  misc_feature (1)...(1000): n = a,t,c or g
tgagaatgggagggccnaannttttngagnacattcgtagatcactagtcagtgcggtggaattccgcggagccgacatgtgtctgcgcctcggaggcctgagtgtgggcgacttccggaaggtgctgatgaagacaggcctggtgctggtggtgctgggccatgtgagcttcatcacagctgccctgttccatggcacagtgctgcgctacgtgggcacccctcaagatgcggtggctctgcagtactgcgtggtcaacatcctctctgtcacttccgccatcgtggtcatcacttcaggcatcgcagccatcgtgttgtcacgctacctccctagcacccccctgcgctggacagtgtttagctcgagcgtggcctgtgctctcctttctctgcacctgtgccctcggcctcttggcctccatcgccatgacctttgccacccagggcaaggcactgctggctgcctgcacttttgggagctctgaactactggccctcgcaccttactgtcccttcgaccccacacgcatttatagctccagcctgtgcctctggggcatcgccctaaggtgctctgcgtgggcggagaacgtgtttgctgtacgctgtgctcagctcacccaccagctgctggagctgaggcccctggtgggggaaaaagcagcccacccacatgatgcgggagaacccagagctggtggagggcccgtgacctgctgagctgcacccagctctgaggcctctgaccctctgcagagatgatgtcctgcccaggccccgatggccaacttaggaccctgcaagcaactctgctctgtgacccaggcccaggattcctgggagctggcctgagagggctcaaatggaccctcgggggacccaagtggggcttttcaaccctcttcccccaccaccccagcccacttgcacttgaaaattgagactttattctgaaattattaaaaagaacagagatgcaaaaaaaaaaaaaaaaaaa

SEQ ID NO: 23085 - DNA, 437 bp, Homo sapiens
  SIMILAR (19)..(216): 381254mologous to Bacillus subtilis YtaG,accession number AF008220,Smith-Waterman Score=107.
tttcgtcggggataccgctacgtgattctggatatccccctgctgtttgagaccaagaagttgctcaagtacatgaagcacaccgtggtagtatactgcgaccgggacacacagctggcacggctgatgcggcggaacagcctgaaccgcaaggcccgcatggcccgccatgtcctagacaactcgggcgagtggagtgtcaccaaacgccaggtcatcctcttgcacactgagctggagcgctccctggagtacctgccgctgaggtttggggtcctcacagggctcgctgccattgccagcctcctctacctgctcacccactaccttctgccttacgcctagtggggcactcaaggcagggagccccaggcctccatctatctccttggaggctgaagccaggtaacacatcctgtttcctctcagccccctcc

SEQ ID NO: 23086 - DNA, 1357 bp, Homo sapiens
  SIMILAR (512)..(832): 421254mologous to Bacillus subtilis YtaG,accession number AF008220,Smith-Waterman Score=211.
tggcatgatgggagttgtagttcgatgctggtttagggtttcaggcgtggaggttccaaaatccgaggtttgctttcagcctgcccttgccagtgcctgggccgctgggagccgttattggctgccgttaaggaccgttacgtttcccgggtccttctggcactcctctggtggaccgcccccatcggccacacttgccctgctctccagtgattctgtagctcctggctccgtagtctcgcggacagctctctttcctggaagatgtttctggtgggcctgacagggggcattgcctcaggcaagagctcagtgatccaggtgttccagcagctgggctgtgcggtgattgacgtggacgtgacggcccggcacgtcgtgcagccaggataccctgcccaccggcgcatcgtagaggtcttcggcactgaggtcttgctggagaacggcgacataaatcgcaaggtcctgggggacctgatctttaaccagcctgaccggcgggagtctgctcaacgccatcacccaccccgagattcgcaaggagatgatgaaggagacgttcaagtacttcctccggggataccgctacgtgattctggatatccccctgctgtttgagaccaagaagttgctcaagtacatgaagcacaccgtggtagtatactgcgaccgggacacacagctggcacggctgatgcggcggaacagcctgaaccgcaaggacgcagaggcccgcatcaatgcccagctgtccctgacagacaaggcccgcatggcccgccatgtcctagacaactcgggcgagtggagtgtcaccaaacgccaggtcatcctcttgcacactgagctggagcgctccctggagtacctgccgctgaggtttggggtcctcacagggctcgctgccattgccagcctcctctacctgctcacccactaccttctgccttacgcctacaccgcctccgccatcccaccctcgggcgctgcctcccgcgggccgggcgcccggtgctcggcgatccggaagagggcgcccgcccggcccacgtccgccgtgtccccgcccggcgcgccgcgctcgccagcccgcgggctccgcgccatcgatcgggccgcagggacccggaatctcaatgccacgctgcccccgcccgggccgcccgcgccgccctcgccgccctcgccgccctcctccattacactgcacgtttttcatcagctccagccagacatcacccgtggccgcgagggaacagattttcaatgggaaaagttccccgggagggtccttgttgctgattcccgccgcgccctgcgctgtctggcccctgcccccacctggcttgtctga

SEQ ID NO: 23087 - DNA, 2047 bp, Homo sapiens
  SIMILAR (680)..(1096): 421254mologous to Plasmodium yoelii circumsporozoite protein,accession number M58295,Smith-Waterman Score=238.
gacgcccttgttcctgagaaagggcactgctgatggttctgccaggacaacagtcatacacttgggttttaccaaaggaaaacaaagatgtgtggaaacccaagcggctgcagtagcgggagatgttggcagaacagcagctggaggacgtgtggggaaggagagtggagtcattagcagtgatgaccgaccagggctccctgttggccagagccaaccagaaggaggagagcaagaagccacggacactgtcagcgtccatgccacaacctcacaggcatggccagggggagcggacagcaaagagctgagctctaaggcggaagaaagggagactggaaaggatcagcagacagagctgcccctgtgcttgcccctgagggacttcccggactccgctccggtcatgtcctcagactcgggacatgcgacggagtctctccaccttgcatccagcgattccaagcccccaatgcccacacccaacgagggccctggaagcaccgtgggacatgcgggccctccgaggacagtgaaggctgacctatgtacagaaccccagctggctttgagagggctccaggtgtctttgccgcgtctacacctggttggtgttatctatgcagaacaccaggcctctggactggaaggctgtggtcatgctggttcttgcagccctgatggctcccctcgggctcctggtgccacgttgtgcctgtccaagccactcagcttcaggacgaagaggtgtttgccctgctggctccctgcaagtgctcctgtgggcatccccggtgctcctgttcacatccctggtgctcctgtgtgcatccccggtgctcctgcatgcatctctaatgctcctgttcacatccctggtgctcctgtgggcatccccggtgctcctgtgtgcatccctggtgctgctgtgtgcgtccccaatactcctatgtgcatccccagtgctcctatgtgcatccccaatactcctgtgtgcatccccaatactcctgtgtgcatccccaatactcctgtgtgcatccccggtgctgctgtgtgcattcttggtgctcccgtgctcatccttggtgctcctcctgtgtgcatcctggtgctcccgagtgctatttggggtgtggtctcactcaggcagaccgcctggagcctgcagtcctggatgctggccttcaagagccactctttgctttatgtggccaggctttgcctagctgatggttcctgggacttgagcttagcaaggtggctgtggacagggacctgggccgtctccctggtctggggtcatccccgtgccagaagccagctcatggagattggggccaaacaggaacagtggcccacgctggctcctgcatcctccacctcagtcaccctgggccccttcctgcaggcacatcatgtgcttatgtctctcccacttaaacagcacattaaaaaattctctcgagttggcaccaagtcagacaaggggagacagcccaggggcccacgggctggaggaggccccagtccagctgctgaaaccctggtgctccaggacgtctggtggccaacgtgggctgacattgaccccgcctggcttgcttactgtggcctgagcttcctgggcatgcgacagaatgacctgacattccctgatgtctatgcccaagaaggggctggatggacccctgggtcccttcccagtgacagaaagaggcaccaaaccccagagcacagccagcctctagcatggggcacagagcatctggcgcagacacagcggctggtgggcatccggggctggcaagtcaggactcagcctcttacggccaaagtgcctcctccgccagaagccaagctgttcagttgctgtgtattgcccacatggcagagaggcactgaggcatggcgtccacattgtgacactgtgtgctccaggaacgtcagtgatgagctcaaggtcaccaagcccagcaagagactgcaagacctggacctggtgctgtcttcaagctctccttatgtcatagttgttgactggtga

SEQ ID NO: 23088 - DNA, 408 bp, Homo sapiens
  SIMILAR (2)..(325): 571254mologous to Mus musculus axotrophin,accession number AF155739,Smith-Waterman Score=346.
cttgtgtcgcatctgtcagatagccgggggttccccaagcaaccccctcctggagccttgcggctgtgtgggaagcctgcagtttgttcatcaagagtgcctgaaaaagtggctgaaagtgaaaataacatcaggagcagatcttggtgccgcgaagacctgtgagatgtgtaagcaaggcctgctggttgacctgggtgactttaacatgattgagttctaccagaagcaccagcaatctcaggcacaaaacgagctgatgaattcaggcttgtacctggtgctgctgcttcacctctatgagcagaggtttgcagaactcatgaggctcaaccacaaccaggtggaaagagagagggaagaagttgcaaggagcaagctgggaaccagagcaaaaagcagcaggag

SEQ ID NO: 23089 - DNA, 406 bp, Homo sapiens
  SIMILAR (386)..(243): 391254mologous to Mus sp. mitochondrial capsule selenoprotein; MCS,accession number S49657,Smith-Waterman Score=95.
tttttttttttttttccaaaaaggatgggattttattggtcgctcgctcctttggcgctagaaggggcagccccagtgcaggggccacgctgtcccatcttcctgctcccccgaacaccacgccgcctggtattgttcttggtgtggcctttggcccctttcctgtccacctgccttccggaagcccgaagtcccctctccccgactgcgctgtgctgtgtgccttgcaagagtgacttaccacatgaggtaaatcctactgggccttctggggccctgaaggcacaacacaggggtctcaaccggagtggggcaggaaatggggaagtagcacagcacggcgtgggactcgggcacggggtccggggaggtggaagcggtgctttgtgaaggagggaacggtaac

SEQ ID NO: 23090 - DNA, 3006 bp, Homo sapiens
  SIMILAR (2236)..(2586): 571254mologous to Mus musculus axotrophin,accession number AF155739,Smith-Waterman Score=355.
atggcagtcttccaggctgctataagagagatagatacctctaggatcaaattggatcacaacactcctttattaaacattcttcagtggtttcccattgtctttgggatcaaattcagataccttcgcaagagttctagtgaggaggatgctctaactgaaccaaggtcatctatcaagatatctgcatttaagtgtgactccaaacttccagcaattgaccaaacatcagtcaagcagaaacataaaagtaccatgactgtaaggaaagcagagaaagtggaccccagcgaaccctctccaggtggcagcagcaagcaccccctgttctgtgttgaatacaccccttactgctccgtctttgctttctcccctgtcctgcagcccaataccaattactgctgcctcctcctgccactagtgccacctgcctccccagtggcccaggaacctcctgactgtcctctccctctggttaccgttccctccttcacaagcaccgcttccacctccccggaccccgtgcccgagtcccccgccgtgctgtgctacttccccatctcctgccccactccggctgagacccctgtgctgtgccttcagggccccagaaggcccagtaggatttacctcatgtgcagaccaagcaccaatggttttattaagaaagaggaagccaaacctgaggagatttacagtcagcccagaatcgcacagcccgagagcatctggggacagaagcagacagaaacagcagtggcctgcaaaggtgccggttcccaggggagcaggtcttgtctgttgcatttaaagggcaattttgcacttggtgctagaggcctttcatccatgggcccttttactggaacgataaatgtgtcttttctcaatgcagatcaagtagttcaacaagaaggcctgatgtgtaacactaagctgaagaggccaaatcaagagagaagaaacttggtcccatcgtcacagccaatgactgagaacgcccctgatagagccaaaaaaggagacccgagtgctccttcccagagtgagctgcatccagccctgtcccaggccttccaaggaaaaaatagtcctcaagtattgagtgagttctcggggccaccactcacacccaccactgtaggagggccaagaaaggcatcatttaggttccgagatgaagacttttattccattttgtcattgaacagcagaagagaaagcgatgacactgaagaggaaacccagtctgaagaatgtctgtgggttggtgtgcgctcaccctgttctccttcccatcacaaaagaagtagatttggggggacatcgacccctcaggccaaaaataaaaattttgaagaaaatgctgaaaattgcagaggtcattcttcaagaagaagtgagcccagtcatggctcattgagaataagcaatgcaatggagccagcaacagagcggccttctgctgggcaaaggttgtcccaagaccccgggctgcctgatagggaatctgctacagagaaggacagaggtggcagtgaaaatgcgaaaaagagccctctttcgtgggacaccaaatccgagcccagacaagaggttggtgtcaatgctgaaaatgtatggagtgattgtatttctgtggaacataggcctggcacccatgattctgaaggatactggaaagactatttaaacagttctcaaaattctcttgactactttatttctggcagaccaatatctccaagatcatcagtgaattcatcctataaccctcctgcatcattcatgcattctgctctgagagatgatattccagtagacttgtcaatgtcatcgacttcagttcacagctcagactcagagggaaactcagggtttcatgtttgccaaccactgtctcccattagaaataggactccatttgccagtgccgaaaaccataattatttcccagtaaacagtgcacacgaatttgctgtcagggaagcagaagatactactttaacaagccagcctcagggggctccactatatacagatctcttactaaatccacagggcaatttgtccttagtggattcttccagctcctctccatcaagaatgaactcagaaggccatttgcatgtgtctgggtctctgcaagaaaatacaccatttactttctttgcagtgtctcatttcccaaatcaaaatgataatgggagcaggatggcagcctctggtttcacagatgaaaaggaaaccagtaagataaaggcagaccctgagaaactcaagaaattgcaagaaagtctcctggaggaggactccgaggaggagggagacttgtgtcgcatctgtcagatagccgggggttccccaagcaaccccctcctggagccttgcggctgtgtgggaagcctgcagtttgttcatcaagagtgcctgaaaaagtggctgaaagtgaaaataacatcaggagcagatcttggtgccgtgaagacctgtgagatgtgtaagcaaggcctgctggttgacctgggtgactttaacatgattgagttctaccagaagcaccagcaatctcagataaagactgaagcaactgttgttgaacacaaagatatctacaacgtcactgaaactcagctcgtccccgaggcgcgttctgtacttctggtgggagcagggcagatgctgctcacaggtgctaacagggcactgaactcggattattctagtatgaggcccaaggtcaaggcacaaaacgagctgatgaattcaggcttgtacctggtgctgctgcttcacctctatgagcagaggtttgcagaactcatgaggctcaaccacaaccaggtggaaagagagagggttagagtcactagggtcttggggggcctctcccccaatgtttcttgtggtgttgtgtctggagttggttccttccagtgggttcgtggtctcactgacctcaagaatgaagcctcggaccttcacgctcaaataccggctgaatga

SEQ ID NO: 23091 - DNA, 597 bp, Homo sapiens
  SIMILAR (118)..(381): 791254mologous to Homo sapiens glyceraldehyde-3-phosphate dehydrogenase,accession number X01677,Smith-Waterman Score=369.
atgatagctgcttttaatcctggcaaagtggatactgttaccaccaatggccctttcattgacctcaactacatggtctacatgttccattatgatcccacccatggcaagttccatgatgtccccatgtttgtgatgggcatgaaccataagcatgaaaacaaactcacagtcatcagcaatgcctcctgtaccaccaactgcttagatcccctggccaaggtcattcatgacaactttggcatcagggagggactcatgaccacagtccacagcatcattgccacccagaagactgtggatggcccctccaggaaactctggcatgacagccatggggctttccagaacaccattcctgcatctactggtgctgccaaacatcaaaaaggtggtgaggcaggcacccaaggacccctcaagggcatcctgggctatactgagcaccaggttgtccctttggaatttaaaagcaatacccgcccttccacctttgaagctggggctggcattgccgtcaatgaccactttgtcaagctcatttcctggtatggcaatgaatttgcctacagtaacaaggtcattaaacctatgtga

SEQ ID NO: 23092 - DNA, 434 bp, Homo sapiens
  SIMILAR (5)..(112): 631254mologous to Mus musculus Leukotriene B4 receptor, BLT2,accession number AB029893,Smith-Waterman Score=108.
cggccgctctagggaagggaccatggagctccgaactaccccctcaactgaaaaatggtggggcagggccgcggcaaatggaaaacccggggggtgggatggaaaaaggacggtccggaaatgggacctttgaacagcagaccctacaacctgctgcccttccctgtccctttccaccccccacccaccctccagaggtcagtgttctgggacatttggggacccttctttgactagagtttggatctggctgggtaggattactatacacttggggcaggcccaggctcctccaaactgagggattatgagggtggtgatggtccctgttaaggactattgtgtgcttgcaagttggcatgtacccatgtgccagcattgcttaatttgtttgccaatagctgttatttgtgaaatacactgggaagccatta

SEQ ID NO: 23093 - DNA, 2466 bp, Homo sapiens
  SIMILAR (1)..(1074): 1001254mologous to Homo sapiens leukotriene B4 receptor 2,accession number AJ278605,Smith-Waterman Score=1855.
  misc_feature (1)...(2466): n = a,t,c or g
atgtcggtctgctaccgtcccccagggaacgagacactgctgagctggaagacttcgcgggccacaggcacagccttcctgctgctggcggcgctgctggggctgcctggcaacggcttcgtggtgtggagcttggcgggctggcggcctgcacgggggcgaccgctggcggccacgcttgtgctgcacctggcgctggccgacggcgcggtgctgctgctcacgccgctctttgtggccttcctgacccggcaggcctggccgctgggccaggcgggctgcaaggcggtgtactacgtgtgcgcgctcagcatgtacgccagcgtgctgctcaccggcctgctcagcctgcagcgctgcctcgcagtcacccgccccttcctggcgcctcggctgcgcagcccggccctggcccgccgcctgctgctggcggtctggctggccgccctgttgctcgccgtcccggccgccgtctaccgccacctgtggagggaccgcgtatgccagctgtgccacccgtcgccggtccacgccgccgcccacctgagcctggagactctgaccgctttcgtgcttcctttcgggctgatgctcggctgctacagcgtgacgctggcacggctgcggggcgcccgctggggctccgggcggcacggggcgcgggtgggccggctggtgagcgccatcgtgcttgccttcggcttgctctgggccccctaccacgcagtcaaccttctgcaggcggtcgcagcgctggctccaccggaaggggccttggcgaagctgggcggagccggccaggcggcgcgagcgggaactacggccttggccttcttcagttctagcgtcaacccggtgctctacgtcttcaccgctggagatctgctgccccgggcaggtccccgtttcctcacgcggctcttcgaaggctctggggaggcccgagggggcggccgctctagggaagggaccatggagctccgaactacccctcagctgaaagtggtggggcagggccgcggcaatggagacccggggggtgggatggagaaggacggtccggaatgggacctttgacagcagaccctacaacctgctgcccttccctgtccctttccaccccccacccaccctccagaggtcctcccgacggccatgaacactacatcttctgcagcacccccctcactaggtgtagagttcatctctctgctggctatcatcctgctgtcagtggcgctggctgtggggcttcccggcaacagctttgtggtgtggagtatcctgaaaaggatgcagaagcgctctgtcactgccctgatggtgctgaacctggccctggccgacctggccgtattgctcactgctccctttttccttcacttcctggcccaaggcacctggagttttggactggctggttgccgcctgtgtcactatgtctgcggagtcagcatgtacgccagcgtcctgcttatcacggccatgagtctagaccgctcactggcggtggcccgcccctttgtgtcccagaagctacgcaccaaggcgatggcccggcgggtgctggcaggcatctgggtgttgtcctttctgctggccacacccgtcctcgcgtaccgcacagtagtgccctggaaaacgaacatgagcctgtgcttcccgcggtaccccagcgaagggcaccgggccttccatctaatcttcgaggctgtcacgggcttcctgctgcccttcctggctgtggtggccagctactcggacatagggcgtcggctacaggcccggcgcttccgccgcagccgccgcaccggccgcctggtggtgctcatcatcctgaccttcgccgccttctggctgccctaccacgtggtgaacctggctgaggcgggccgcgcgctggccggccaggccgccgggttagggctcgtggggaagcggctgagcctggcccgcaacgtgctcatcgcactcgccttcctgagcagcagcgtgaaccccgtgctgctacgcgtgcgccggcggcgggcctgctgcgctcggcgggcgtgggctttttctgccaagctgctggagggcaacgggttccgaggcgtccagcacgcncccgcgggggcagcctgggccagaccgtttaagagcggccccgccgctctggagcccggcccttcggagagcctcactgcctccagccctctcaagttaaaacgaactgaactagggcttggtgaaaggaggcgcactttcctcctggcagaatgctagctctgagccagttcagtacctggaggaggagcaggggcgtggagggcgtggagggcgtgggagcgtgggaggcgggagtggagtggaagaagagggagaggtggagcaaagtgagggccgagtgagagcgtgctccagcctggctcccacaggcagctttaaccattaaaacttgaagtctgaaatttggtcaaaaaaaat

SEQ ID NO: 23094 - DNA, 7302 bp, Homo sapiens
  SIMILAR (5826)..(6014): 301254mologous to Homo sapiens bA169O17.3 (ADP- ribosyltransferase (NAD+; poly (ADP-ribose) polymerase)-like 1),accession number AL359763,Smith-Waterman Score=53.
atgaccactgcagctgcatttctattttggaatcacactctccgtgacctgtgtgagtcacagctaccagaaaacaaagacagcaaagaagatgtgtttaacacagcccctgctggtaaccaaggtcctcctccaatgacgggtatgaatatgaacaacagagcaactatacctggcccaccagtgggtcctggtcctgccatgggaccagaaggagccgcaaatatgggaactccaatgatgccagataatggagcagtgtgctgggattacaggcatgagccaccgcacctggccaaggaagacactttagatggtgccagagttgaggatttggcctgcgacttattgcagttgccgcactgcagtttccacactgtggccttagaagagtcttatccagacctgaaatcccagtgccttggaaacatcaggactggtcagaaggacatctatatgtctccacaggtgagtgcctttagggctttttctttgacagtgaccttggacagtctggggtgtggctgtagagcatgctgggtagggtcttttggctttgcttctgtagccctaatgcacttctgccagcaggttttatattgggtgtgtggtttgacctacaagccagtagatggcgccatggtccaggtttgggacaatgccggcagcgtttccctgtgtctttcccccacaaagtctccaagtctctcctcaaatgagctccaaggcttgggagaaacaatctcttcctctgcccgggttgcgtggatctccagtggaaaggaaagcctgtattattttggagaaaggcgaacagataaaacgcacagcagtaaatttcagggactagaaactccttctcaggtgagcaaggcagaggggattctccttctagtaaaggcagcactgaaaaatggagaaacagcagagcaattgcaaaagatgatgacagagttttacagactgatacctcacaaaggcacaatgcccaaagaagtgaacctgggactattggctaagaaagcagacctctgccagctaataagagacatggttaatgtctgtgaaactaatttgtccaaacccaacccaccatccctggccaaataccgagctttgaggtgcaaaattgagcatgttgaacagaatactgaagaatttctcagggttagaaaagaggttttgcagaatcatcacagtaacaacaaacatgatggaccacctgctcagatgagcccttgctgggtgtcagcacccctgagggtcaccgtggctgagtctgtgcccagcttctcagtttggaaaccccattgcatgcttgttctcaagcatgggactgactcttttgacctggtggttcattccattgcagcagttcctcttcgtcagcttggcacagcccttagaacaaatggtggcttttcttctaattcttacagtaagagcccagtggatgtcttgcagatatttagagttggcagagtgaatgaaaccacagagtttttgagcaaacttggtaatgtgaggcccttgttgcatggttctcctgtacaaaacatcgtgggaatcttgtgtcgagggttgcttttacccaaagtagtggaagatcgtggtgtgcaaagaacagacgtcggaaaccttggaagtgggatttatttcagtgattcgctcagtacaagtatcaagtactcacacccgggagagacagatggcaccagactcctgctcatttgtgacgtagccctcggaaagtgtatggacttacatgagaaggacttttccttaactgaagcaccaccaggctacgacagtgtgcatggagtttcgcaaacagcctctgtcaccacagactttgaggatgatgaatttgttgtctataaaaccaatcaggttaaaatgaaatatattattaaattttccatgcctggagatcagataaaggactttcatcctagtgatcatactgaattagaggaatacagacctgagttttcaaatttttcaaaggttgaagattaccagttaccagatgccaaaacttccagcagcaccaaggccggcctccaggatgcctctgggaacttggttcctctggaggatgtccacatcaaagggagaatcatagacactgtagcccagattaaagagaaggaagaagcccagcaagagtacctagaagccgtgacccagggccatggcgcttacctgatgagtcaggatgctccggttagtgtaggggttgaagagttgagtttgagttctgctgttgttatcattactctctgttgttattattactctccgtctcaaattcctccagtggtggactgccactacctgtgcctcttgggttctggatccggaacaattctcactgaggttcattctctgcccccagctttcagcagactctgcacactgtccgacagagctctggaagtgagagtttgctgcccttcccccagcagctggaggcttttgcttcatgtggggaaaggatccagggaagtggccccagcacctcccacacacctgctccacggagaggtgctccccttggtctcctgccctgctcagcctttccagtgggcccagtggaaggctgtggggatatggggaaacgcctgcaagagaatgcaaactccccttgggtcaggagctcccaattcttctaaaccagacgtttttactgtaagtgttggaaacttaccccctaaggctaaggttcttataaaaattacctacatcacagaactcagcatcctgggcactgttggtgtctttttcatgcccgccaccgtagcaccctggcaacaggacaaggctttgaatgaaaaccttcagcgcacagactgcaaagctgtcattagcaccatggaaggcagctccttagacagcagtggattttctctccacatcggtttgtctgctgcctatctcccaagaatgtgggttgaaaaacatccagaaaaagaaagcgaggcttgcatgcttgtctttcaacccgatctcgatgtcgacctccctgacctagccagtgagagcgaagtgattatttgtcttgactgctccagttccatggagggtgtgacattcttgcaagccaagcaaatcgccttgcatgcgctgtccttggtgggtgagaagcagaaagtaaatattatccagttcggcacagatgtgtcaatgatgacagcaaatggtgactgcatccaacaaggagaacataatctttcacttcatttcctccagtctgccacacctaccatggggaacacagacttctggaaaacactccgatatcttagcttattgtaccctgctcgagggtcacggaacatcctcctggtgtctgatgggcacctccaggatgagagcctgacattacagctcgtgaagaggagccgcccgcacaccaggttattcgcctgcggtatcggatttcaagaggtagactttattcactctttgccagctctaggcctttgggatcagattcagatagaagaccaaatgaccaggctatgttctccgagttgccactctgtctccgtcaaatggcagcaactcaatccagatgtgcccgaggccctgcaggccccagcccaggtgccgtccttgtttctcaatgatcgactccttgtctatggattcattcctcactgcacacaggcaactctgtgtgcactaattcaagagaaagaatttcgtacaatggtgtcgactactgagcttcagaagacaactggaactatgatccacaagctggcagcccgagctctaatcagagattatgaagatggcattcttcacgaaaatgaaaccagtcatgagatgaaaaaacaaaccttgaaatctctgattattaaactcagtaaagaaaactctctcataacacaatttacaagctttgtggcagttgagaaaagggatgagaatgagtcgccttttcctgatattccaaaagtttctgaacttattgccaaagaagatgtagacttcctgccctacatgagctggcagggggagccccaagaagccgtcaggaaccaggggtccccaacccccagtccctggcctgttaggaaccaggctgcacagcaggaggtgaggggcagtgagggagcattaccgcctgagctcgcctcctgtcacgtcagcagcggcagtagattctcatgggagccccgaacctgttgtgaactgtgcatatggaacatgtggaatactttcatcccaaaaccatctgccccacccctgtccatggaaaaattgccttccatgaaaccagtccccactgccataaaggttggggaccacaccttaggtgatcaagatgtgagtatgtggttaagcaaaataagcaattgtgaacttgaagggaaagaggaagcaacatcctctgagtggccagaattacgtttatccaaacgaaaacataggaaaattccattttccaaaagaaaaatggaattatctcagccagaagtttctgaagattttgaagaggatggcttaggtgtactaccagctttcacatcaaatttggaacgtggaggtgtggaaaagctattggatttaagttggacagagtcatgtaaaccaacagcaactgaaccactatttaagaaagtcagtccatgggaaacatctacttctagcttttttcctattttggctccggccgttggttcctatcttcccccgactgcccgcgctcacagtcctgcttccttgtcttttgcctcatatcgtcaggtagctagtttcggttcagctgctcctcccagacagtttgatgcatctcaattcagccaaggccctgtgcctggcacttgtgctgactggatcccacagtcggcgtcttgtcccacaggacctccccagaacccaccttcttcaccctattgtggcattgttttttcagggagctcattaagctctgcacagtctgctccactgcaacatcctggaggctttactaccaggccttctgctggcaccttccctgagctggattctccccagcttcatttctctcttcctacagaccctgatcccatcagaggttttgggtcttatcatccctctgcttcctctccttttcattttcaaccttccgcagcctctttgactgccaaccttaggctgccaatggcctctgctttacctgaggctctttgcagtcagtcccggactaccccagtagatctctgtcttctagaagaatcagtaggcagtctcgaaggaagtcgatgtcctgtctttgcttttcaaagttctgacacagaaagtgatgagctatcagaagtacttcaagacagctgctttttacaaataaaatgtgatacaaaagatgacagtatcctgtgctttctggaagtaaaagaagaggatgaaatagtgtgcatacaacactggcaggatgctgtgccttggacagaactcctcagtctacagacagaggatggcttctggaaacttacaccagaactgggacttatattaaatcttaatacaaatggtttgcacagctttcttaaacaaaaaggcattcaatctctaggtgtaaaaggaagagaatgtctcctggacctaattgccacaatgctggtactacagtttattcgcaccaggttggaaaaagagggaatagtgttcaaatcactgatgaaaatggatgacgcttctatttccaggccccagtgtgtgttgttccccattgtgtgctcatgtgttctcattgtcagctcccgcatgaggcatgggatcagggacccatccaaagaagcagtctggctgctttggggtagagcaggtgtgctgcattgtgggggatccttcctcctccggaccacctgtattctccaaagccagcaggttggagtggctgagttgaccaaactgcagagatggcagctgcccctcccgccaggagctccatttcagggagagatcaaagctctgtccatagaaccgttgctggagtggttaaagcccccacagggattcctgcccagttttaagttgcctgtgaggaggatcctgatcctgcaggtggaaaggctgacggtggcagcctcactcaggagccagctggccaaggtcaccttgcctgtgataggccagtgtggtcccagttacttctgccctggccatgtgcagccccaagtctggcattggagatgggtttgctgttttgagggtggaggacgtggcccagaaatagtagtagaaggcagctctcggtgtggccagctccccagcatggcagcagacaagagagagagagcatgtgcaggggaactcccctttgtaaaaccatcagatcttaagcgtgctaaacctggttcccaggagcacctggtgcccagggaggaggagcccgcctcatctagggtcaggagggacccacgaggctgcgcgggcagcagttctgctgtgcgctctcaaaggagcgtggagacggatgggaattctgcagccagacccaccgcggcagtcaagagatgtttccgcaagcgccacggacatggagcacttgctgccttgtgcgaggacggtagtccacacagcagcccctggccctctgagaagtgctgcccatggcggcagagaggttccgccccagccaagatgaagggatggggccttggctgtggccctgtcagctccagggcagaggctcaccgggtgagccggggtagagacaaccgtgaagctgaacgctgggctgacagtggggaatctggggagtccgtgtcatctgaaggggaatgggcaccacctcccttcccttctcaggagaaagctgaaggagccatggcagctggatatgcagccacccactactgtccccagacctgctcctggctttctgaggtttgtccacactttgcagaaaaggcagggttggacccaactccagggtggccactgaccaggattctaaggggacccctgaggccccctctggcatgccctgtgcagccctctccactggaggggacagggtacggagcagttgacttcgagttactccgaagggagattattctgggcggccaagtcatcccgaaagggagcatggctgcggctgtgaggtcagcaggcctcattcccatagacctggctgccaagaagacagtgcgcccaagaggaatcaagacagtttatgactcacacagacagcaaagccacgagcagtgtggtgtcaggtccctgggcccctactccaaaggtcgactgaaacagaaagctcaggtgatggccggcttgagtggtgggtcactctgcgactga

SEQ ID NO: 23095 - DNA, 1350 bp, Homo sapiens
  SIMILAR (1)..(1347): 1001254mologous to Mus musculus alpha-tubulin isotype M-alpha -6,accession number M13442,Smith-Waterman Score=2378.
cgtgagtgtatctctatccacgtggggcaggcaggagtccagatcggcaatgcctgctgggaactgtactgcctggaacatggaattcagcccgatggtcagatgccaagtgataaaaccattggtggtggggacgactccttcaacacgttcttcagtgagactggagctggcaagcacgtgcccagagcagtgtttgtggacctggagcccactgtggtcgatgaagtgcgcacaggaacctataggcagctcttccacccagagcagctgatcaccgggaaggaagatgcggccaataattacgccagaggccattacaccatcggcaaggagatcgtcgacctggtcctggaccggatccgcaaactggcggatctgtgcacgggactgcagggcttcctcatcttccacagttttgggggtggcactggctctgggttcgcatctctgctcatggagcggctctcagtggattacggcaagaagtccaagctagaatttgccatttacccagccccccaggtctccacggccgtggtggagccctacaactccatcctgaccacccacacaacgctggaacattctgactgtgccttcatggtcgacaatgaagccatctatgacatatgtcggcgcaacctggacatcgagcgtcccacgtacaccaacctcaatcgcctgattgggcagatcgtgtcctccatcacggcctccctgcgatttgacggggccctgaatgtggacttgacggaattccagaccaacctagtgccgtacccccgcatccacttccccctggccacctacgccccggtcatctcagccgagaaggcctaccacgagcagctgtccgtggctgagatcaccaatgcctgcttcgagccagccaatcagatggtcaagtgtgaccctcgccacggcaagtacatggcctgctgcatgttgtacaggggggatgtggtcccgaaagatgtcaacgcggccatcgccaccatcaagaccaagcgcaccatccagtttgtagattggtgcccaactggatttaaggtgggcattaactaccagccccccacggtggtccctgggggagacctggccaaggtgcagcgggctgtgtgcatgctgagcaacaccacggccatcgcggaggcctgggctcgcctggaccataagttcgatctcatgtatgccaagcgggcctttgtgcactggtacgtgggagaaggcatggaggagggggagttctctgaggcccgcgaggacctggcagctctggagaaggattatgaagaggtgggcgtggattccgtggaagccgaggctgaagaaggtgaagaatactga

SEQ ID NO: 23096 - DNA, 1124 bp, Homo sapiens
  SIMILAR (477)..(920): 991254mologous to Mus musculus alpha-tubulin isotype M-alpha- 6,accession number M13442,Smith-Waterman Score=781.
atgcgcgagtgtatctctatccacgtggggcaggcgggtgtccagatcggcaatgcctgctgggaactgtactgccttgaacatggaattcagcccgatggtcaaatgccaagtgataaaaccattggtggcggggacgactccttcaacacgttcttcagtgagactggagctggcaagcacgtgcccagagcagtgtttgtggacctggagcccactgtggtcgatgaagtgcgcacagggacctacaggcagctcttccacccagagcagctgatcaccgggaaggaagatgcagccagtaattacgccaggggccattacaccatcggcaaggagattgttgacctagtcctggaccggatccgcaaactgctttgggggcggcactggctctgggttcgcatctctgctcatggagcggctctcagtggattacagcaagaagtccaagctagagtttgccatttacccatgccccccaggtctccacagccgtggtggagccctacaactccatcctgaccacccacacgaccctggaacattctgactgtgccttcatggtcgacaatgaagccatctatgacatatgtcggcgcaacctggacattgaacgtcccacgtacaccaacctcaatcgcctgattgggcagatcgtgtcctccatcacggcctccctgcgatttgatggggccctgaatgtggacttgacggaattccagaccaacctagtgccgtacccccgcatccacttccccctggccacctatgccccagtcatctcagctgagaaggcctaccacgagcagctgtctgtggccgagatcaccaatgcctgcttcgagccagccaatcaaatggtcaagtgtgaccctcgccacggcaagtacatggcctgctgcatgttgtacaaggggggacgtgggtccccaaagacgtcaacgcggccatcgccaccatcaagaccaagcgcactatccagtttgtggattggtgcccgactggatttaaggtatgactgggtgacatggaggcctttcagcaagcagcagatgcacaaaataacactggccttgaaggcccacatcctttggggagactatccctgttccatgggctag

SEQ ID NO: 23097 - DNA, 2920 bp, Homo sapiens
  SIMILAR (1223)..(1858): 1001254mologous to Mus musculus alpha-tubulin isotype M-alpha -6,accession number M13442,Smith-Waterman Score=1117.
atggatgtgtattgtgcacatgaaagccttagacatacaaagagccctgaggccacaggccaaacatctggccaaaggcctgaagctctgcaagctttctggccggcctttgggtcctctcctgtaactgggtcctctcctgtaactgaagtgacaacaaaaggccgctggagttcttcccggcaagttctatgggaccgtattcccctggcaaagagcaggccagcaatttcaaacagacaaagccaaaggactaacattccttggtgggaaagctgtccacctatcctgaacctggaaagagaacaaccaccacgttttgctcaacctgggacgtatgcatctcgatggaaggctcttgaagaaatggaaaagcagcagcgtgagcaggttgatagaaacatcagagaagccaaagagaaactggaggcagaaatggaagcagctaggcatgaacaccaattaatgctaatgaggcaagatccaggcttggccctggtgtcctgcatgcagcagggacagtccatgagtaggagtcccaagaaggtctttaaacatctgtatgaactcaaccttacaaaactgcaaagtctcggcagccggagccgactaagatggaaggattcacccttctggggagaagaggcaggaggcaagaggcctcctctggtttccctggctctccacagatctccctccctgctcctcctctttgtgccaaaacatccttctaagggcagacctgattgcactgttcagaggtccccaaagcccacagaaaagtctcaactcctggacctccgtgagtgtatctctatccacgtggggcaggcaggagtccagatcggcaatgcctgctgggaactgtactgcctggaacatggaattcagcccgatggtcagatgccaagtgataaaaccattggtggtggggacgactccttcaacacgttcttcagtgagactggagctggcaagcacgtgcccagagcagtgtttgtggacctggagcccactgtggtcgatgaagtgcgcacaggaacctataggcagctcttccacccagagcagctgatcaccgggaaggaagatgcggccaataattacgccagaggccattacaccatcggcaaggagatcgtcgacctggtcctggaccggatccgcaaactggcggatctgtgcacgggactgcagggcttcctcatcttccacagttttggggggtggcactggctctgggttcgcatctctgctcatggagcggctctcagtggattacggcaagaagtccaagctagaatttgccatttacccagccccccaggtctccacggccgtggtggagccctacaactccatcctgaccacccacacgaccctggaacattctgactgtgccttcatggtcgacaatgaagccatctatgacatatgtcggcgcaacctggacatcgagcgtcccacgtacaccaacctcaatcgcctgattgggcagatcgtgtcctccatcacggcctccctgcgatttgacggggccctgaatgtggacttgacggaattccagaccaacctagtgccgtacccccgcatccacttccccctggccacctacgccccggtcatctcagccgagaaggcctaccacgagcagctgtccgtggctgagatcaccaatgcctgcttcgagccagccaatcagatggtcaagtgtgaccctcgccacggcaagtacatggcctgctgcatgttgtacaggggggatgtggtcccgaaagatgtcaacgcggccatcgccaccatcaagaccaagcgcaccatccagtttgtagattggtgcccaactggatttaaggtaaaacagggatttcttcttggtttggatccattgctgctacccagcagtgctaccagcctccatggtggtactggggatgtctgcagagtcctgtggtgtgatttgtcttcgagtctcccacccgtggataacagcacctgcttcagtggaggtggcaggggagtgaagcagactctgtgggagtccttggttgtagttttgtttagtgccctggctttattgaatgctggttatgctaggagtgaagctgattggggacacagctctgatgcgtttagcccagcccctgctggtaaccaaggtcctcctccaatgacgggtatgaatatgaacaacagagcaactatacctggcccaccaatgggtcctggtcctgccatgggaccagaaggagccgcaaatatgggaactccaatgatgccagataatggagcagtgataatggcatctatgtctttccagtgctgtctagaggcttttggcgtcactttggactctgccttctccccctacccctgcctgctgaattccatatttagtcagcaaatgctgtctgctctatcttccaaatgtatcccatgtcccattacttctgtaaaggtgctgaatgattgggtccccactgcacctacaccctctgtgcctacaccctctgcacctacaccctttgtacctgcaccctctgcactacttacatccactgcacctacaccctctgcactacttacatccactgcacctacaccctctgcacctacaccctttacacctgcaccctctgcactacttacatccactgcacctacaccctctgcacctgcaccctctgcactacttacatccactgcacctacaccctctgcacctacaccctctgtacctgcaccctctgcactacttacatccactgcatctacaccccctgcacctatactttctgcatctacatccgctgcacctacaccgtctgcacctacactatctgcgcctactatctgctgcacctacatcatctgcacctacaccctctgcacctacatcctccgcatctacaccctctga

SEQ ID NO: 23098 - DNA, 455 bp, Homo sapiens
  SIMILAR (4)..(159): 881254mologous to Homo sapiens 21-JAN-1997 Human zinc binding protein ZB-2 encoding cDNA,accession number V40386_cd1,Smith- Waterman Score=240.
  misc_feature (1)...(455): n = a,t,c or g
ggctttcctttggcttttcacccggtcttcaatgcccatgagcctttccgccggggtacaggtgtggatctgggacagggtcacncagcctccagctggcaggattccctcttcctgtttctcgccatcttcttctttttttggctgctcagtatttgagctatgtctgcttcctgcccacctccagccagagaccagctccggagagcagagggggaaggaggatggattgagagaatgtctttctcctctcctaagtctttgctttccctgatttcttgatttgatcttcaaaggtgggcaaagttccctctgactcttcccccactccccatcttactgatttaatttaatttttcactccccagagtctaatatggattctgactcttaagtgcttccgccccctcactacctcctttaatacaaattcaataaaaaaggtgaaatataaa

SEQ ID NO: 23099 - DNA, 426 bp, Homo sapiens; identical to SEQ ID NO: 11479
  SIMILAR (43)..(405): 611254mologous to Homo sapiens G16,accession number U89336,Smith-Waterman Score=348.

SEQ ID NO: 23100 - DNA, 666 bp, Homo sapiens
  SIMILAR (124)..(270): 971254mologous to Homo sapiens G16,accession number U89336,Smith-Waterman Score=271.
atggcagcagcggaggaggaggacgggggccccgaggggccaaatcgcgagcggggcggggcgggcgcgaccttcgaatgtaatatatgtttggagactgctcgggaagctgtggtccagtgtggccagagaccagctccagagagcagagggggattccagccatttggtgataccgggggcttccacttctcatttggtgttggtgcttttccctttggctttttcaccatcgtcttcaatgcccatgagcctttccgccggggtacagctgccactcaaaaaagcatttgttctgtggctccttttccagatccaggctttttctactacagggtccgcaaggttatttctgctccagtcggggagccagctagcttgtggtctgttactcctctgcattcaaaaggattcatctttgtcagtgcctttctgggagagtgggcctggcttggagatgtcactgtggatccaggattttgccactggatatggaacgaagacctcgtcagtcaatcttccatgatcccggccaccgcaattggctcagccttccaagaggccgtggttgtcaccagggcgcccccacccctacccctgaatcccagctgcagggactgccattcaaacatccacgtgtccaagatggctgcggcattggcatga

SEQ ID NO: 23101 - DNA, 1218 bp, Homo sapiens
  SIMILAR (98)..(667): 471254mologous to Homo sapiens 21-JAN-1997 Human zinc binding protein ZB-2 encoding cDNA,accession number V40386_cd1,Smith- Waterman Score=323.
  misc_feature (1)...(1218): n = a,t,c or g
atcgtgggcaggaggtggtttctggtttgttggggcgtgtgtatgtgtatttggggggactgaagggtacgtggggcgaaacaaaaccggccatggcagcagccggaggaggaggtctggggcccccaatgttccaaatcgcgagcggggcggggcgggccgccngaaaacccccttcgaatgtaatatatgtttggagactgctcgggaacttgtgctcagtgtgttggccaacctgtacttttggacaatttctcatcaggtgcctggaaaacacggccagaaacggcaagagtgtccaagtatgtaaagctgggatcagcagagagaaggttgttccgcctttatgggcgagggagccaagaagcccccaggatccccagattaaaaactccacccccgccccccagggggcagaggaccagctccggagaagcagagggggattcccagccatttggtgataccgggggcttccacttcttcatttggtgttggtgcttttccctttggctttttcaccaccgtctttcaatgcccatgagccttttcgccggggtacaggtgtggatctggggacagggtcacccagccttcaagctgggcaggatttcccttttgctgtttctcgccatcttcttcttttttttggctgctcagtatttgagctatgtctgctttcctgcccacctccagccagagaagaatcaagtattgagggtcccctgctgacccttccgtgactcctgggacccccttgaacccctctaatttctgttgggtaaaggcccaagccctgggacatttgtccaaggaaggccctgggggaggaaggagtgaaagtctgtgccatagatgggagagccttctgcctcagaggctcacctcagtaaccgttgtttaattctctgcccctggggaaggaggatggattgagagaatgtctttcttcctctcttaagtctttgctttccctgatttcttgatttgatctttcaaaggtgggcaaaagttcccctctgactccttccccccctccccatcttactgatttaatttaatttttcacttccccagagtrctaatatggattttggactcttagttgcttccgcccccctcattacctcctttaatacaaattcaataaaaaaggtgaaatatttaaaaaaaacaaaaaatattaagtgggaatcttctttaccccaaaaaatattt

SEQ ID NO: 23102 - DNA, 537 bp, Homo sapiens
  SIMILAR (167)..(532): 291254mologous to Homo sapiens rapa-1,accession number AJ277275,Smith-Waterman Score=127.
  misc_feature (1)...(537): n = a,t,c or g
ggagcnagcnccccncaattgaccccgatggaacgcctgtggtaccgggcccgacccacgcgtccgtggctgctcagagtgagcttgcttaggtactggtggctactatgtggctccagtttgaacgccctcgtccccaggaaggattttgtggtcctgtgcctttgtgatccagacaaagacggtagctcagtgcgttgagtattattacatctggaaaaaaatgatcaagtttgactgtggccgagccccagggctagaaaagagggtcaagagagagccggaggaagtggaaaggacagaggaaaaggtcccatgcagccctcgggagagacccagccaccatccaactcccaagttaaagaccaagagttataggagggagtccatcctcagctccagcccaaatgcaggctccaagcggacccccgagctgttgggaagtgcagagagccagggcatttttccatgcatagagtgtgaaagggtgtttgacaagatcaagagtcgaaatgcccatatgaagcggcaccgcct

SEQ ID NO: 23103 - DNA, 499 bp, Homo sapiens
  SIMILAR (224)..(472): 321254mologous to Homo sapiens rapa-1,accession number AJ277275,Smith-Waterman Score=107.
  misc_feature (1)...(499): n = a,t,c or g
cgggcccnnnaaganaanttcgtagaccttannnnangngttgtgagtccactatccangtggtggaattctggtcctgtgcctttgtggtgagtggtaacgccaagccaaaggaagaggtgcttccggagggctttccaaaggaggcggccggcccaatggcaaggtcacactcccagggcccgcgtggcacagccacagcctgcttgttttctttcactagatccagacaaagacggtagctcagtgcgttgagtattattacatctggaaaaaaatgatcaagtttgactgtggccgagccccagggctagaaaagagggtcaagagagagccggaggaagtggaaaggacagaggaaaaggtcccatgcagccctcgggagagacccagccaccatccaactcccaagttaaagaccaagagttataggagggagtccatcctcagctccagcccaaatgcaggctccaagcggacccccgagctgttgggaagt

SEQ ID NO: 23104 - DNA, 1980 bp, Homo sapiens; identical to SEQ ID NO: 2335
  SIMILAR (968)..(1207): 251254mologous to Homo sapiens rapa-1,accession number AJ277275,Smith-Waterman Score=52.

SEQ ID NO: 23105 - DNA, 433 bp, Homo sapiens
  SIMILAR (124)..(231): 911254mologous to Homo sapiens Recombinant human myofibrillar contractile protein Troponin I,accession number W18054,Smith- Waterman Score=168.
cccacgcgtccgagcagcccggaggagactgacggtccctgggaccctgaaggtcacccgggcggccccctcactgaccctccaaacgcccctgtcctcgccctgcctcctgccattcccggcctgagtctcagcatggcggatgggagcagcgatgcggctagggaacctcgccctgcaccagccccaatcagacgccgctcctccaactaccgcgcttatgccacggagctgcaggacttgtgccgacagctccacgcccgtgtggacaaggtggatgaagagagatacgacatagaggcaaaaagtcaccaagaacatcacggagattgcagatctgactcagaagatctttgaccttcgaggcaagtttaagcggcccaccctgcggagagtgaggatctctgcagatgccatgatgcaggcgctgctg

SEQ ID NO: 23106 - DNA, 409 bp, Homo sapiens
  SIMILAR (215)..(409): 981254mologous to Homo sapiens Recombinant modified human cardiac troponin I SEQ ID NO:5,accession number Y91087,Smith- Waterman Score=323.
ctcaagcagcccggaggagactgacggtccctgggaccctgaaggtcacccgggcggccccggcactgagcctccaaacgcccctgtcctcgccctgcctcctgccattcccgggctgagactcagcatggcggatgggagcagcgatgcggttagggaacctcgccctgcaccaaccccaatcagacgccgctcctccaactaccgcgcttatgccacggagcggcgcggagagaaggggcgcgctctgagcacccgctgccagccgctggagttggccgggctgggcttcgcggagctgcaggacttgtgccgacagctccacgcccgtgtggacaaggtggatgaagagagatacgacatagaggcaaaagtcaccaagaacatcacggagattgcagatctgact

SEQ ID NO: 23107 - DNA, 490 bp, Homo sapiens
  SIMILAR (126)..(488): 871254mologous to Homo sapiens cardiac troponin I,accession number M64247,Smith-Waterman Score=494.
caagcagcccggaggagactgtcggtccctgggaccctgaaggtcacccgggcgggcccctcactgaccctccaaacgcccctgtcctcgccctgcctcctgccattcccggcctgagtctcatcatggcggatgggagcagcgatgcggtgagagcagcgggctaaggcgtggctgggacccccagggccagggctagggaacctcgccctgcaccagccccaatcagacgccgctcctccaactaccgcgcttatgccacggagccgcacgccaagaaaaaatctaagatctccgcctcgagaaaattgcagctgaagactctgctgctgcagattgcaaagcaagagctggagcgagaggcggaggagcggcgcggagagaaggggcgcgctctgagcacccgctgccagccgctggagttggccgggctgggcttcgcggagctgcaggacttgtgccgacagctccacgcccgtgtggacaaggt

SEQ ID NO: 23108 - DNA, 953 bp, Homo sapiens
  SIMILAR (164)..(805): 651254mologous to Homo sapiens Cardiac troponin I/cardiac troponin C fusion protien,accession number W41571,Smith-Waterman Score=615.
cggacgcgtgggcggacgcgtgggcaatcagcccgtaggagactgactggtccctgggaaccctgaaaggtcaccctgggcggcccccgtcactgaaccctccaaacgcccctgtcctcgtccctgcctcctgccattcccggcctgagtctcagcatggcggaatgggagcagcgatgcggctagggaacctcgccctgcaccagccccaatcagacgccgctcctccaactaccgcgcttatgccacggagccgcacgccaagaaaaaatctaagatctcccgcctcgagaaaattgcagctgaagactctgctgctgcagattgcaaagcaagaagctggagcgagaggcggaggagcggcgcggaagagaaggggcgcgctctctagcaccccgctgtccagcccgctggagttggccgggcctgggcttcgcggacttgccaggactttgttgccgacagttccacgcccgtgtgggacaaggtggatgaagagagatacgacatagaggcaaaagtctccaagaacatcacggagattgcaaattttgacttcagaagatttttgaccttcgaagcaagtttaagcggcccacccttgcggagagtgaggatctctgcagatgccatgatgcaggcgctgctgggggcccgggctaaggagtccctggacctgcgggcccacctcaagcaggtgaagaaggaagaccccgagaaggaaaaccgggaggtgggagactggcgcaagaacatcgatgcactgagtggaatggagggccgcatgaaaaagtggagagagctgagccttcctgcctactgcccctgccctgaggagggccactgaggaataaagcttctctctgagctgaagaaaaaagaaaggggggggcggttaaaaagaataccatgaggagccaaggttaatcacgcctggaaacccaatacttttt

SEQ ID NO: 23109 - DNA, 487 bp, Homo sapiens
  SIMILAR (1)..(405): 991254mologous to Homo sapiens Human secreted protein, SEQ ID NO: 4245,accession number G00164,Smith-Waterman Score=686.
aacatgctctccagtttggggagtctacttctctgtggaagtattacactagccctgggaaatgcacagaaattgccaaaaggtaaaaggccaaacctcaaagtccacatcaataccacaagtgactccatcctcctgaagttcttgcgtccaagtccaaatgtaaagcttgaaggtcttctcctgggatatggcagcaatgtatcaccaaaccagtacttccctcttcccgctgaagggaaattcacagaagctatagttgatgcagagccgaaatatctgatagttgtgcgacctgctccacctccaagtcaaaagaagtcatgttcaggtaaaactcgttctcgcaaacctctgcagctggtggttggcactctgacaccgagctcagtcttcctgtcctggggtttcctcatcaacccacaccatgactggacattgccaagtcactgtcccaatgacagattttatacaattcgctatcgag

SEQ ID NO: 23110 - DNA, 726 bp, Homo sapiens
  SIMILAR (474)..(382): 381254mologous to Conus ventricosus conotoxin scaffold III/IV precursor,accession number AF214932,Smith-Waterman Score=50.
ctacttcccatccctattcagcgacttcagctgccctccacctccagcagggacttgggtgtgcacacctccataatgacatctggccgggcatggcggcagcagtcctcgcagtgtctggcagagccactgcatcaggtacacagtatgtcccagtgcagaaatggcaatcccttggaggtctatgaattgggatggcagaccttcagggaagggagattcccttttacacccacgaagaaaacctttaccaccaaataatgtcactggaaagccaggaagtgcaggtacgttagtcatgtaccttccttttcccgccatgatttcggttttactagccaacataagctcttcttggcgtgccagtctttctccagaggcaggaactgttggttgctttatatctgtctctattctctccaagggagttccagtaggctgggtgttgaccctcaggggtggtgtagttattgggcctgatgaaatgattcttccaacaacagtcttgtgattgaaaatcttactccaaattccaccttccacattgtctttcactccaaattcataaactgtgttgggctttaggttttccacaattgtttcagtggctggacagatttgaaaaatccacttcttttctttatccttttctcgatagcgaattgtataaaatctgttgtttttcgcagatgtccctggacccagtgaaggacagctgtccagcat

SEQ ID NO: 23111 - DNA, 1418 bp, Homo sapiens
  SIMILAR (174)..(245): 1001254mologous to Homo sapiens Human secreted protein, SEQ ID NO: 4245,accession number G00164,Smith-Waterman Score=121.
ctcctaaaacatcacaacgaactcgtcgtccacgtcccaaaactaaaaccacaccaagtcctgaggttcctcaaaccaaactgggtaaatttgggtttctggttaaagtagctcatcctagctgctctcaggaatttataactgatgccaatgatgggagtgatggcctgtgtaaaactcgttctcgcaaacctctgcagctggtggttggcactctgacaccgagctcagtcttcctgtcctggggtttcctcatcaacccacaccatgactggacattgccaagtcactgtcccaatgacagattttatacaattcgctatcgagaaaaggataaagaaaagaagtggatttttcaaatctgtccagccactgaaacaattgtggaaaacctaaagcccaacacagtttatgaatttggagtgaaagacaatgtggaaggtggaatttggagtaagattttcaatcacaagactgttgttggaacaccagccaaaacagactatgtatatcccactgccaaagcaccactctggccagaggagccaaagactgaagctcccaagcagacaccacgtgctcctcctaagccaaaaacatcaccacgcccaagaatcccacaaacacaaccagaagaaacagaccaatccacccaagaacctttcacaactaagattccacgaacaactgaactagcaaagacaactcagggcctagaaatgctctcctgcttaatccacaatccaaagatgcataaggactctactaatgagcaaatagctgcgtctctacaggcttgttattacgaacagctattaatgtacatcagagtcacagatgtagacagtgtggggcctggaaatgggaaggaggcagtgacagccccgcaggctcccacactgttttggctgaatcataaagctcaactggcaaaagattgggcagggaaagatgtaaacattactcccacctttgcgacaagcaagaaagaaaacaaaccaccaaataatcttcaaatttgtaatgtttctaaaattcatcaaagagctaaagttgcagggaaacctgaaatcaaagataagcatatccaaaaagagatgccactggatgctatagaagctagtaagataaatttggttaaaatttttaatgaattcctaaaagcctggaaatgtagactatcattcgaatacagaatccctgagaaccaaggacacaaagggagtttttatctacttgtgggctcttcacgaacctcatggttacttacagaaaagatcggaagcagcaagagagttctgagaatgcctcccatggacattctcaaaaccacccagatccttttatctttcctatggagcataaacttaaccccacgggggaagaacaaccatcttgttgctccagcgcataggtga

SEQ ID NO: 23112 - DNA, 1011 bp, Homo sapiens
  SIMILAR (841)..(1011): 961254mologous to Homo sapiens putative p150,accession number U93572,Smith-Waterman Score=293.
aaatacaaactaccatcagggaatactacaaacacctctacgcaaataaactagaaaatctagaagaaatggatacattcctcgacacatacactctcccaagactaaaccaggaagaagttgaatctctgaatagaccaataacaggagctgaaattgtggcaataatcaatagctttccaaccaaaaagagtccaggaccagatggattcacagccgaattctaccagaggtacaaggaggaactggtaccattccttctgaaactattccaatcaatagaaaaagagggaatcctccctaactcattttatgaggccagcatcattctgataccaaagcctggcagagacacaaccaaaaaagagaattttagaccaatatccttgatgaacattgatgcaaaaatcctcaataaaatactggcaaacggaatccagcagcacatcaaaaagcttatccaccatgatcaagtggacttcatccctgggatgcaaggctggttcaatatacgcaaatcaataaatgtaatccagcatataaacagagccaaagacaaaaaccacatgattatctcaatagatgcagaaaatgcctttgacaatattcaacaacccttcatgctaaaaactctcaataaattaggtattgatgggacgtatttcaaaataataagggctatctatgacaaacccacagccaatatcatactgaatgagcaaaaactggaagcattccctttgaaaactggcacaagacagggataccctctctcaccactcctattcaacatagtgttggaagttctggccagggcaattaggcaggagaaggaaataaaagagaagaaaatacctaggaatccaacttacaagggatgtgaaggacctcttcaaggagaactacaaaccactgctcagggaaataaaagaggatacaaacaaatggaagaacattccatgctcatgggtaggaagaatcaatatcgtgaaaatggccatactgcccaag

SEQ ID NO: 23113 - DNA, 421 bp, Homo sapiens
  SIMILAR (421)..(281): 1001254mologous to Homo sapiens cyclophilin C, Cyp- C,accession number S71018,Smith-Waterman Score=247.
gccaattcaaagtttttttttagttttaaaaaagccccccctgaggaagggggtatatttaagttcaaagtccctaagcaggtggttttttaaagttcaagccaactaaaggggggcgggttaatttttataaccttcccggggtgtggggtgggatccccaaaaaaagtaaaaaaaaataaagcaaataattgaaagacaacacaacacacacacacacacacacacacacacacacacccctgccaaagcatatccttgttttctgccagttgtgtcaccaatcagcgatctcaaccacaaaaggcgttttcacgtctatcttgccactgttgatgatcgagcagttggtgagtggacggtcatgcccatcagttgcttggagctctatggagtgcaccactgtcatcccatcaatgac

SEQ ID NO: 23114 - DNA, 645 bp, Homo sapiens
  SIMILAR (88)..(150): 1001254mologous to Homo sapiens Human secreted protein, SEQ ID NO: 7113,accession number G03032,Smith-Waterman Score=116.
atggggcagagccacattgaggaggtccctgaggaggactacctttgttctttgtcctcctggagggtgtttaagatagaagtgctaatgaatggaagaaaacattttgttgaaaagagatacagcgaatttcatgctttgcacaaaaaggggcctgacttgttcattagagcccactgcgatttgtggggcctgataggtggacttatgagttatattatctgcattcacctaaacctcacaaaaggcacacatggcttaccaggagtcctgctgggaaaccaccggttgaagattaaaccacgagctcacgtgaatggcagtagcacctgcgctgtcgcttctgcaagtcctcctgaaagttctctgcagccctcccttaatctgacccttcagagtaaaggcccttgggacaccaagtgggaaagctatagagagccaagaggcaatagaaatattcagaaaggcaaactcagaagaggtatggagagacacagcagggtacagcctatgagaagagtgagtggcactgccaccatgagtacacagggaagatgggtgaacaaggaggagtgtgaacaagggccagaagccacagagattactgacagagagctgaatgcccagatgaaagacagacaatga

SEQ ID NO: 23115 - DNA, 1317 bp, Homo sapiens
  SIMILAR (1)..(750): 591254mologous to Homo sapiens putative p150,accession number U93567,Smith-Waterman Score=646.
cttatgccaaagcctggcagagacacaacaaaaaaagagaattttagaccaatatccctgatgaacatcaatgcgaaaatcctcaataaaatactggcaaaccaaatccagcagcacatcaaaaagcttatcaaccatgatcaagttggcttcatccctgggatgcaaggctggttcaatatccgcaaatcaataaatgtaatccagcatataaacagaaccaaagacaaaaaccacatgattatctcaatagatgcagaaaagtcctttgacaaaattcaacaacccttcatgctaaaagctctcaataaattaagtattgatgggacatatctcaaaaattaataaggagcttacctataacaaacccacaggccaatatcattactgaatggggccaaaaactggaagcattcccctttgaaaaactggcacaagaacagggatgcccctctctcacccactccctattcaacatagtgttggaagttcctggccccgggcaatcaggcaggagaaagaaataaagggtattcaattagggaaaagaggaagtcaaattgtccctgtttgcagatgacatgattgtatatttagaaaaccccattgtctcagcccaaaatctccttaagctgataggcaacttcagcaaagtctcaggatacaaaatcaatgtgcaaaaatcaccaagcattcttatacaccaataacagacaaacagagagccaaatcatgagtgaactcccatttcacaattgcttcaaagagaataaaatacctaggaatccaacttacatgggacatgaaggacctccttcaaggagacctacaaaccacttgctcaacgaaataaaaagaggacacaaacaaatggaagaacattccatgctcatggctaggaagaatcaatatcgtgaaaatggccataatgcccaaggtaaatttatagattcaatgccatccccatcaagctaccaatgacttttcttcacagaattggaaaaaaactactttaaagttcatatgggaaccaaaaaaggagcctgcattgccaagtcaatcctaagccaaaagggcaaagctgggaggcatcacactacctgactttcaaactattacttacaaggctacagtaaccaaaacagcatgatactgtagccttgtagtatcatgctgttttggttactacaaggctacagtatcatgctgttttggttactgtaccaaaacaaatatatagactactgaaacagaacagaggccttagaaataacaccacacatctacaaccatctgatcttcgacaaacctggcaaa

SEQ ID NO: 23116 - DNA, 3537 bp, Homo sapiens
  SIMILAR (259)..(522): 871254mologous to Homo sapiens NAG13,accession number AF194537,Smith-Waterman Score=375.
cttaagaaatgtataaaaactccagaaatcccttctaaacatgttaggaactgggtccccaaagtcttggaacagcgacgacaaggcttggaaacatacttacaggtagccagcattaccctgataccaaaggcagacgaagacacccccaaaaagaaaactacagacaaaaattcctggacaggcactgatgcaaaagtcttcaataaaatactggaaatcaaattcagcagcatattaaaaagactatattggccagtgttggaagttctggccagggcaatgaggcaggagaaggaaataaagggtattcaattaggaaaagaggaagtcaaattgtcccggtttgcagatgacatgattgtatatctagaaaaccccattgtctcagcccaaaatctccttaagctcataagcaacttcagcaaagtctcaggatacaaaatcaatgtacaaaaatcacaagcattcttatacaccaataacagacaaaaccgagagccaaatcagaataaaatacctaggaatccaacttacaagggacgtgaaggacctcttcaaggagaactacaaaccactgctcaaggaaataaaagaggatacaaacaaatggaagaacattccatgctcatgggtaggaagaatcaatatcgtgaaaatggccatactgcccaagagataccctttctgccagttgtgtcaccaatcagcgatctcaaccacaaaaggcgttttcacgtctatcttgccactgttgatgatcgagcagctggtgagtggacggtcatgcccatcagttgcttggagctctatggagtgcaccactgtctgaagacagatggattttggagaatgacagtgtattcgcataagcttagccaagtggtaactccaactgcagctgctgtaccagatgtggtttcattgcctgagcaaattaacacatttcctggtacctgcgtacaacaactctcgattttgtgtcataatcttgttcacagagattttgatccattttcccttccacaaggtatcacactggtccataacactgataacattatgctgactggatcctataagcaagcagtagcaagcacactggacttattgatcaggaaaactgttttggactgtttgtgcaaagaggcaaacctgggcctgatgggcagtggcttccgcattttatggaagcagagaaactctaagagattgcatgtaaatcggcatattgggaagagagagtccagggtatctccatttggaccagccatgattatgagcgtacctgaagtggcgcgggtatttggcaaaaccgggaaagcggaaaccgccaccgattctgctccgctggagatggtagaaacgaccatccagcttaagccgcaggagcagtggcggccagtgcagtactttcagcaacagcggatgataaacacgaatcaaaaagcgccgttggccatttcagaagcacgctattatggaaaagaacatgttgaaatgagagtgatgagcattcagttaaggttaaagaatcagtggatttggaataaggatggaggtttggaggattctgggcttgggaaaaataagagcaaagttaaaaagtacttcacagttaaaggcggcattttagaactgcagcgtgaagccagagcgtttgtcttagtgaccggccaactttcgggctcactttcgagctctgtggtacaccaccattctcagattcgacgtctaactcaggagacgctgaccttcgaatcgaagggaattcggagagtcttggcccgaaacccaggcgcctggagccctgcgccctctgcttccggcccccggcacgcccagggcgcgggagcggccggccggctggccggcgcggccaatggaggtctacatcccgtcctttcgctatgaagagagcgacctggagcggggatacacggtgtttaagatagaagtgctaatgaatggaagaaaacattttgttgaaaagagatacagcgaatttcatgctttgcacaaaaagcttaagaaatgtataaaaactccagaaatcccttctaaacatgttaggaactgggtccccaaagtcttggaacagcgacgacaaggcttggaaacatacttacagggctgtcattttagaaaatgaagaacttcccaaactgtttcttgatttcctaaatgtgcgacacttgccctctctaccaaaggcagaaagttgtggatcttttgatgaaacagagtctgaagagtcaagcaaactgtcccaccagcctgtgctgctgttcctcagggatccatatgtcttgcctgcagccagcgattttccaaatgtggttattgaaggagtcctccatgggatattttaccctcatctacagcccaggtagaaatcctacatggctaaaagaagcagaagcaagtttcgaagtcacagtcaaggaaatcaataccgtaccaatttaacctagacgctatgatatataacagctctagctagtggtaaagtgcacagtcccagcttaattcagggcagggacatttccattagaatggtgctcttaaaaatagaaactgaacccggggcggtggtcaggctaaggccaagtgtttaagaagtagagtgtagctgccagcgtagaaacccatgaaaaggaggccacaggagattcctgggagcactgggtgtagcaaaaccaaagccactctctggcttcagtcgcacccatttgctaattgaaaatcatatcctgaatcataccggggacctgatccacctttgggtagcctttttggtccagatcttatgacaccactacttcttctccaccgtgagattttcctccagcccagtgatagtacattctgaaatgctggccccaggagacggccacagacacacactgctaaatgtgaagatggaactaaactggaaattaaattatactgacaatattatggcatttttaagatcatggcatttttaatttacattgagagtggagttgcatcatactcaggggttagcttccaaggtcagtacataggtaaaatgggctattaggatgatccttgaaagccctttagaagggtgccatgttggaaacctgtacatccacaacaagtagcttttcctcctatgttggaaaaaaagacttgtttctttgtttgaagaccaagtgaagttgttggtgtttgtttaggggccattttgttaaaaaaaaaaaaaaaaaaagcacataacttttaacactagaatcagcccgcaagatgcttgccccgctagtggcagatgtgaactgacaaggagtgaagcgcccacccagcggatggacagcacccacctgggtttactcaagggtgtgcattcattttaggtgggatcgccacaggatttcatgttattttccttacgggcttccttttcactgacctcatttgttgagttaatgtaagttaaatgtggtttatgatataactccactgtacatcatcctttgaggtagtaaaggataaaagcatatatactaccta

SEQ ID NO: 23117 - DNA, 457 bp, Homo sapiens
  SIMILAR (1)..(72): 1001254mologous to Homo sapiens CGI-125 protein,accession number AF151883,Smith-Waterman Score=127.
gctggaaatcgacttcggtttcagttggagttggaatttgtgcaatgtttagccaacccaaattaccttaattgtaccctcagtgtttacacatgttagagctgctccaatatgaacacttccgaaaggagctggtgaatgctcagtgtgcgaaatttattgatgaacagcagattctacattggcagcactattcccggaagcggatgcgccttcagcaagccttgggcaaagcagcaacagcaaaataacacatcgggaaaatgaaaaactggatacaaacgaggcacttaatacatgtatataatgtatttcttttgtacagtgaagacaaaaaaaatgaaaactcttcctatctacctttattatggtagcccctagaacctttagtgtgctttttcatccaactttttattgttaatagactatttctgttaaacctgaattgttctttgaa

SEQ ID NO: 23118 - DNA, 990 bp, Homo sapiens
  SIMILAR (686)..(715): 901254mologous to Homo sapiens CGI-125 protein,accession number AF151883,Smith-Waterman Score=42.
atgattggtccacctggcagctggctggctggctggcaactggaggcctttctgtcctggctgagggccctggccccttggtggcctttgggaagcagcatctcatcgggccgttttttcgttctggcgggcggccggcttggccgcggggtcgggctctccgcgcagtgcagagacgtctccaccctcagggacgaggctctgacgtggcgggaggtcgtttccgtgcgctgcgaggaggattccacgtgccgggaggacgcctcgaggatgcgagggagccgcttccccgagggggagagggagggcccctcgctgcggcgctgggaggtctccacccgccgggacgacgtctccacgcggcagaagagaggaaaactacggtactgccatagccgggagcgccacaacacgatgacgtggaagcaccatggtccttcgaaggctaaaacactggactcctgcccctcaggcgctcccacggcccgggccccgccccctcgctattttggagccagcgcgggtggagccatcccagggctggtcggggatgggcggagccgccccgccccatatcccacagtgccccgggaccggaagagggagccgtggtttccggaacttcgcccgcgtctctgggcttttgctctgtcaggctggtggcgttttggtgtcttcgtttgttatggccgctgctgtcgctatggagacagaggttacttcaaagacaaagcttttgttaattatcttaaatacttgctttactggaaagacccagaatatgccaagtatctaaagtaccctcagtgtttacacatgttagagctgctccaatatgaacacttccgaaaggagctggtgaatgctcagtgtgcgaaatttattgatgaacagcagattctacattggcagcactattcccggaagcggatgcgccttcagcaagccttggcagagcagcaacagcaaaataacacatcgggaaaatga

SEQ ID NO: 23119 - DNA, 1220 bp, Homo sapiens
  SIMILAR (79)..(489): 621254mologous to Homo sapiens CGI-125 protein,accession number AF151883,Smith-Waterman Score=357.
cgtggtttccggaacttcgcccgcgtctctgggcttttgctctgtcaggctggtggcgttttggtgtcttcgtttgttatggccgctgctgtcgctatggagacagatgatgctggaaatcgacttcggtttcagttggagttggaatttgtgcaatgttacgccaaccacaataccctcatctttctgccccaaaggaggttacttccaaagacaaagcttttgttaattatcttaaatacttgctttactgggaaagacccagaatatgccaagtatctaaagtaccctcagtgtttacacatgttaggagctgctcccaatatggaacacttccgaaaggaggctgggtggaatgctcagtgtggcgaaatttattggatggaacaggcaggtttctacattgggcaagcactattccctggaagcggatggcgccttcagcaagccttggcagagcagcaacagcaaaataacacatcgggaaaatgaaaaactggatacaaacgaggcacttaatacatgtatataatgtatttctttagtacagtgaagacaaaaaaaatgaaaactcttcctatctacctttattatgggtagcccctagaacctttagtgtgctttttcatccaactttttattgttaataagactatttctgttaaaccctgaattgttctttgatttccctgtggatttgtaaggtgtttttcttttttacgcatttagcataatcagctgattaagaatggaaaagttaggtgctttagaccaaataaggcactgggggcatggggtaggggtgggccaccaagtatactgaattctaaggctagctgttcctgacatatagtagggcaagaccatctcctggaaccttactgtctcagatcaactactctaccactctactctaagatgtagtgagagtagcggagtccctgacctctttaaatcataggacaggaactgcataaaggttcttgaattctgcaggacaggaaataactgtattacctgctttgcaacggtggctttaagaatcactgaatcactgtggcctcacttgacctagtcatggcaggacaactagtggttagttactaactggactcttgactttagaacaaacatgaggagcctcaaatacttgtgttcatttgggaaagctaccattgatttgggaggtaccacaaaccaggtgctatgttaagtgcttc

SEQ ID NO: 23120 - DNA, 478 bp, Homo sapiens
  SIMILAR (478)..(32): 1001254mologous to Homo sapiens dJ261G23.2.1 (novel protein, isoform 1),accession number AL136131,Smith-Waterman Score=832.
ttttttttgaagcttaagaaaatcatgtttagactctgtttaaaaacatccaggctggctcccattctatagcatgaagggcaagtccatgttcttctcgccagtgcccacgtagacgtagccatagttcttggtgcggggagcatggtagaaggtgaggcccggccagagcaggctgcgcagcaccaccagggcattgcccctctccatctggatgctccaggaccctcatggacacagagcaggagtcccaggaacagggccaaccaaaaccacacctgctcagaagccacgtgaagtcaccctgaacaactgcctcagaccctttgggaatgtcatgctccaaggagtccatgaaatccagggaggggtccaggtcagccttctcaagcaaggtcttattctttagctcaacaggctccctgaaatggaagtaggagctgagcttcttggcctcagacaaggacagtccttcaaa

SEQ ID NO: 23121 - DNA, 504 bp, Homo sapiens
  SIMILAR (1)..(438): 971254mologous to Homo sapiens dJ261G23.2.2 (novel protein, isoform 2),accession number AL136131,Smith-Waterman Score=741.
atggtccagatcaaggaagagacccgcttggtgtctgtcattgaccagattgacaaggctgtggccatcatcccccgaggcgccctcttcaagaccccttttggacccacccatgtcaatcggacctttgaaggactgtccttgtctgaggccaagaagctcagctcctacttccatttcagggagcctgttgagctaaagaataagaccttgcttgagatggctgacctggacccctccctggatttcatggactccttggagcatgacattcccaaagggtcctggagcatccagatggagagcggcaatgccctggtggtcgtgcgcagcctgctctggccgggcctcaccttctaccatgctccccgcaccaagaactatggctacgtctacgtgggcactggcgagaagaacatggacttgcccttcatgctatagaatgggagccagcctggatgtttttaaacagagtctaaacatgattttcttaagcttcaaaaa

SEQ ID NO: 23122 - DNA, 1242 bp, Homo sapiens
  SIMILAR (396)..(232): 901254mologous to Homo sapiens dJ261G23.2.1 (novel protein, isoform 1),accession number AL136131,Smith-Waterman Score=250.
tcatcttttaattccctggttgatgctgatgagcagccaggaatgagagcccttgctgatggaatcatccaggcaggatggattcactcccaatctcactgggcagatggtcaggggaagagtctgccctttcttctggctttggtgatgggctgcaccttttctgaggacgctgtgcaggccaatgcgggtgggccagacagaacatgttgtgtccttgggtttaactctctgagcccctgtttcttcatctttgggaatgtcatgctccaaggagtccatgaaatccagggaggggtccaggtcagccttctcaagcaaggtcttattctttagctcaacaggctccctgaaatggaagtaggagctgagcttcttggcctcagacaaggacagtctgccctttccctgggtgtgtttcttgctttgccagttgctgctcctcttctgcacgtcttctccttggctagtgcagggtggtggagggtctccagaattccccacgatgttcctgtaggcctcagtgacatggccaacggtttcttcatggtcctgtaccctcattcccactatgacaatcacatcactccctccaccaccatcgctgtctccatcattgccacctccatcaccaccgccatcaccttcaccatcatccccttcactgttaccatcaccaccctgggcaaaatggctaaaccttgtctttggtcccctggacctctccaccatccagaaattgaggtttatgtctggcttggcatacgccgtcagctctatgtgaactgtgcctgagccatagcaggtgttaaatgttttggccatcatcctgagctccgcaggggccttgtgccccacagctggagctgactgcgaccaggtcctggaacttggagaagcttgctgggtaccaccatggaggacagttggcttatgggggtggggggtgcctggggccacggagtgactggtgatggctatccctccttggaacccctccagcctcctcttagcttcagatttgtttatttgttttttactaagacctgctctttcaggtctgttggctcttttaggggcttggtgggggtcgagcttccccttcattgcggcgggctgcgggccaggcttcactgagcgtccgcagagcccgggcccgagccgcgtgtggaagggctgaggctcgcctgtccccgccccccggggcgggccgggggcggggtcccggcggggcggagccat

SEQ ID NO: 23123 - DNA, 565 bp, Homo sapiens
  SIMILAR (19)..(219): 371254mologous to Beta vulgaris putative cytosolic malate dehydrogenase,accession number AJ251083,Smith-Waterman Score=140.
gggtcgacccacgcgtccggctcaccacctggggagattgtatctttaggaatattgagtgaaggccagtttggtattccgaaagggatcgtcttttctatgcctgtgaaatttgagaatggaacttgggtggttcttacagatctcaaagatgttgaaataagtgaacaaataatgacccgaatgacaagtgatctaattcaggagaaacttgttgcacttggagacaagatacattttcagccataccaatcaggacataaagatctggtccctgatgaagaaaaaaatctagctatgtcagatgcagcagagtttccaaatcagattcctcaaaccacctttgaaaagccacagagtcttgagttcctaaatgactttgaaggcaaagccgtggaatcctaacagatcaaattggatgaaatatataattacttgatagcacaataaacatagaaagaatttatatgaatgtctatatttaaggaagaataatttgaaagatttatgtcagtcttagataataccatgcaaggcaattaaatcactgtgacagcacaaaaaa

SEQ ID NO: 23124 - DNA, 4549 bp, Homo sapiens
  SIMILAR (2810)..(3076): 711254mologous to Homo sapiens DCRA,accession number D87343,Smith-Waterman Score=302.
cggacgcgtgggcggacgcgtggggtcatcgcgggtatagcagattgtccatattatgctaaaacagaacttgtggcagactatttacaaaagaatcttcctgattttcggatacataaaatcacacaacgtcctgaggtttgggaggattggctaaaagatgtgtgtgaaaagaataagtggagtcacaagaattcccctatcatctggagagagctgttggatcgtggaggaaagggtttgcttttgggaggatataatgagttcctggagcatgctcagctttactatgatgtcacctctagcatgacgactgaactgatgatggtaattgctcaagagaacctgggggcacatatagaaaaagagcaggaggaagaagccctgaaaacttgcatcaaccccttgcaggtctggatcaccagtgcctctgctcctgcctgctacaacctaattcccatattgacgagtggcgaagtgtttgggatgcatacagaaattagcataactctatttgacaacaagcaggcgggaagaacatctcaaaagccttgtggtggagacccaagacctggcatctcccgtcctgcgcagtgtctccatctgcacgaaggtggaggaggccttccgccaggcccacgtcattgtggtgctggatgacagcaccaacaaggaggtgttcactctggaggactgcctccgaagcagggtgcctctctgcaggctctatgggtacctgatagagaaaaatgctcatgagtctgtcagagtcatcgtgggagggagaacctttgtaaacctgaagacagttttactcatgagatatgccccacgcattgcacacaacattattgctgtggcgctgggggtggaaggtgaagcgaaagccatactggccagaaaactgaagacagctccttcatacattaaagacgtgatcatttggggtaatatcagtggaaataattacgttgatctgagaaaaacaagggtgtacagatatgagagtgccatttggggacctcttcattattcacgccctgttttaaacttgatttttgacagtgagtgggtaaaaagagaatttgtggcaattcttaaaaacttgaccaccacaggaagacaatttggaggcattttggctgcacacagtatagccactacactgaaatactggtaccatggctcaccacctggggagattgtatctttaggaatattgagtgaaggccagtttggtattccgaaagggatcgtcttttctatgcctgtgaaatttgagaatggaacttgggtggttcttacagatctcaaagatgttgaaataagtgaacaaataatgacccgaatgacaagtgatctaattcagggtcctcaacccaaggaatgtgaccacagagaacaagagctggatgggaaatcaaatggtgctttacgcagagctgggcacatggcgattgctcctcaacatacagggcttcttatgataaaactaagcgagattagaaactgtgattcagaccaagaagcccaagctaaatttcccgctccataccccttgaatcagttatgtgactcacttattacccataaccagatagaaaagctagaccaaagaacacaaccacgaacacatcacctttcaaacagaattcatgttgctctcaagagctattttcagactgatatcttatccttcttaatgcttcaaactaaatcctgttcagacatgcttcaacaatctagtgaaatttgtgaaatggatccagataaacaagatgctcttaatagtattgagaattccatttatagaacagccttcaaattacaatcagtgcaaactctgtgccagttggacttgattgacagctccctgattcagcaggtcctactgcgtccaagtttctgggaagctcgcaagcactccctttctgtgcagcaactttctcaggcactccaagagctgtttcagaaggccagggaggaaaacccaggacaagtgcatcccagagctccggaactcactctgagccttctcacgacaatgtacaacagccacaaagagactgttacttcaaagcaagtactcttcaaagatacattgcaagtattcaatttaaagattgttcctcctacatgtctagctctttttcaactctatgcagaaaatagcaggggaggctatgattctgggccacgcatgactcgaagggttttgagaaaactactaacagatctacagcagatcccaactttcgtgggagagagtcgtgctctgtgccctgtggaaagtgccacccgcagctgtttccaaggggtgttgagcccagcaatcaaagaagaaaaattcctgtcttgggtccaatctgagcctcccatcctcctgtggctcccgacctgccaccggttatcagctgctgaaagggtcactcaccctgctcggtgcactctctgcaggactttcccaatcacgggactcagtgacgtaagctgtgcttctattttaactggcagataccgctgtctgaagtgtctcaactttgacatctgccagatgtgtttcttatctggtcttcacagcaagtcccatcagaagtctcatcctgtcattgagcactgcattcagcagatgtcagcaatgcagaatacaaaacttctcttcaggaccctcagaaacaaccttcttcaggggcgctgtaggaagaaagaagcagcgagaaggcagcagctgctggaccaggtgaatccaaagggtgtgcctcaccatgcgcaggccagaagtgttggctgctgtggagaattcaaaacagggacctccctggacatcaagatggaagagcaaatagtttctcatgctggagaaatgctctccagtgtggtggtcgtatcttgtaaggattcagtcccacatcaagtagtgtctttgacaatggaaggaattgcaatcccccagctcagtgccaaaagtgtgggcagttttgaagctttttataattccattaaacctatccagattatcaacagtgccatagaaaggatgaagccagggaaatttccctatggcaaaacaaatttatttcgcatttcttctgtatacattcagtatacactacgctgtgacatgaggcagtctctgttgaccaaggacttgacaaaggccggtgaatttaccatccactctgctcctcaggaggggaagttgactccaagtcctgtggacttcacagattatacctgcaaccttacagaatatcaaagagagagccttgctccccagatttctcattcgagaacaccccaactcaatgaattgtgtcatcgtgcagctgcttacaggagagctggtggtgaaaaggcatggggctgcaactggctgtttacctgccgcatgctgaagaccaacttcaaagtggaatttgaggccaccatcgacatgcgtcttcatgctaaccacctggtcacagagaacttcctattgcagctctgcaggactcagcccaggaggagggaagcacagaaaacaggggtggccttgtggatatcctgctggaacttgggctacatcaatgaagaaaaagagacaaggatttctgctctcggctgttcctgtgcaacaatgttcctaaaatggccagcccctcttcagatcatttgcagggatgggagaagactgcagattgtagccacagctgtttataaatggagtgtaatgaaatccaatctttcattccgatgtgtgggagccaagggctggaacatggtgccccaggagcctgggccagactgggtcaggctccttaaaaaacagttaaaccaatacaaagacaagttgcaagctatatacacctcccaggaagaaagaatttgtcgatttgaaacaaggattcacaaactcaaaaccaaccaggatagtctatggaccaagctacaacagataagacgggacctacaggcaaggttgcagccacccggtccttcatcttcttcctttcaaaatgtggggaacaaggttgaccattcttcaactgaaaaggttccaaagggaggggattatttgcagatcaagaatgccactgaagatgcttcaacaggggaacctcttcctaagcttgatgaggttgacagaagtcacagaagtcacacaaatgcagagcatgctctgcgaaatccagaatcaccagagaccactttgcacagcaccagggcacaaagccaaacacaaaagatgccacagaaagtcattagtgccctacccagttatcaggagggactgaagcaggacatccccaaaatggttcctgctgaaatgagcagtcctgctctggcagccgtggaaaagaaagaggcaggtaacatcaaggagagaaaggatgagctggaggaagaggaactgcaagaactattgtcaaaacttatggatgccttcaatctagaaacgccatcaggcccggagtcttcagtaaacatggacctgtacagtggagctcagcgagtgtgcagggccttctctgcccttgttgatcaaattgccttgcccaatttgaagtga

SEQ ID NO: 23125 - DNA, 290 bp, Homo sapiens
  SIMILAR (166)..(279): 391254mologous to Homo sapiens Protein sequence encoded by clone p199-7 (PL mutet.rsT4),accession number P93374,Smith-Waterman Score=68.
tttggcggattatcggaatacctctgttactggggtattcgctggtttgttctagagtgcttttggcctgcttttggcctggttccgatttttggccgcgaagcaggcgaaaaacgtcgcacttgactgtggaggcgtttcccgtctggtcatatttgtatcctggcgaaacccccaggttgcacccacgagcgcacaccagaaccgtcccagccgcaatccggtatccagaccgccaaacacccaacgggttgcgaggcgcaaacactatgcactcgcagatggataca

SEQ ID NO: 23126 - DNA, 996 bp, Homo sapiens
  SIMILAR (34)..(435): 691254mologous to Homo sapiens FLJ00026 protein,accession number AK024436,Smith-Waterman Score=482.
atggtcactgaggagcatcgtctcatatgcctggcctacatccagatcacgtatgtggaaccgtactttgatacctacgagctcaaggaccgggtgacctactttgaccgcaactatgggcttcgcacattcctgttctgcacgccgttcacgccggatgggcgcgcacacggggagctgcccgagcaacacaagcgtaagacgctggtcagcaccgaccacgccttcccctacatcaagactcgcatccgtgtgtgccaccgggaggagacggtgctgacgccagtggaggtggccatcgaggacatgcagaagaagacacgggagctggcctttgccaccgagcaggacccaccagatgctaagatgctacagatggtgcttcagggctctgtagggcccaccgtgaaccaggcacggctggtggaagtgagcttgcaagctagcaagctggacgtcacatgtgagtgcttttggcctgcttttggcctggttccgatttttggccgcgaagcaggcgaaaaacctatggcaccgccccccagtcgtgctactctttttacgtcgcacttgactgtggaggcgtttcccgtctggtcatatttgtatcctggcgaaacccccaggttgcacccacgagcgcacaccagaaccgtcccagccgcaatccggtatccagaccgccaaacacccaacgggttgcgaggcgcaaacactatgcactcgcagatggatacactgaacggagatggacgaacgcaccttgcagggcagagagctcgttccccccgaactgcccgtccgcagcgccaataccggattcatacgacaagtgaccttcccggattggttcgtaaatacgcctcaggctgctgcctcaggatctggtattgctgtgcgtggatagagcgggcgctgtctctacaagttggggggggggtcttcggggatccattgtctgaaggacaggcagagtgcgatcacggttcgacgtga

SEQ ID NO: 23127 - DNA, 3117 bp, Homo sapiens
  SIMILAR (1141)..(2049): 921254mologous to Escherichia coli yjdB,accession number U14003,Smith-Waterman Score=1413.
atgttgcagcaggatagtaatgatgacactaaagatgtttcactgtttgatgcggaagaggagacgactaatagaccaagaaaagtcaaaatcagacatccagtagcatcgtttttccacttattctttcgagtcagtgcaatcatcgtctgtcttctctgtgaattgctcagcagcagctttattacctgtatgagtaaaaagtggttggcggtggttatcgtgggtgtggtgctacaaggtgccaacctgtatggttacctcaggtgtaaggggcaggaggtgagagaaacatttgcagagccatccctgcaggctactcagatgaagttgaaaagagcccgactagcagatgatctgaatgaaaagattgctcaaagacctggtcctatggagctggtagagaaaaacatccttcctgtggactccagtgttaaagaagcaattataggcaagactctaaaaatttactatttgggtgctccagctgaggctgcaacaaaggaggacgagagaacaactagtggaccagggcatcatgccacgaattaccacttcctcttgaaattcgacttctatctttcttggttacacttcgtccataaagatgctattctttcgggtcaccctcttgttcggcttctttccactcgtgtgcttcgggggcctaatgatgtgtttcacggggtgtcatccgtggacagtgttttggccattttcgtccttgccgaacctatgggcagtttatctgccagcttagagaaccaactagaagctttcttggatggaactttaccctcagccaatgaaattcctccactacaaagcagcagtgaagacagagagcccttctctctgatcgaggacctccagaatgatctgctgagtcactcaggtatgctggaccattcacactcacccatggagacttccgagacccagtttgctgcaggttttcgcctgcttcgcagccaaaatcggaaaccaggccaaaagcagcccaaaggcactctagaacagaccagcgaatacccaggtaacagaggtattccgataatccgccaaagtttggttttccgtgtatcagtgacaggtactacagtcaacttctgtgatgctagcaccaatcataacagggtttttaaggtgttgcaggcgctgccgctggattcgctgcataacgtactggttttcttgtcgatgccggtcgtcgctttcagcgtgattaatattgtcctgacactaagctctttcttatggcttaatcgaccactggcctgcctgtttattctggcgcggctgcaccaatatttcataatgacttacggcatcgtcatcgaccgctcgatgattgccaatattattgataccactccggcagaaagttatgcgctgatgacaccgccaatgtcatcaacgctgggattcagcggcgtgcttgctgcgctgattgcctgctggatacaaatcaaacctgccacctcgcgtctgcgcagtgttcttttccgtggagccaatattctggtttctgtactactgattttgctggtcgccgcactgttttataaagactacgcctcgttgttccgcaataacaaagagctggtgaaatccttaagcccctctaacagcattgttgccagctggtcatggtactcccatcagcgactggcaaatctgccgctggtgcgaattggtgaagacgcgcaccgcaacccgttaatgcagaacgaacaacgtaaaaatttgaccatcctgatggtcggcgcaacctcgcgggcggagaacttctccctcaacggctacccgcgtgaaactaacccgcggctggcgaaagataacgtggtctatttccctaataccgcatcttgcggcacggcaacggcagtttcagtaccgtgcatgttctcggatatgccgcgtgagcactacaaagaagagctggcacagcaccaggaaggcgtcgcccggatatcattcagcgagcgggcatcaacagtgctgtggaatgacaacgatggcggctgtaaaggtgcctgcgaccgcgttggctgtctgaatctggtgtatattggcgaagcctgcaatgaccatttggcaaaaaaacccccaaagggccagcgtgaaaagcatcttcccggcgctacaacggagtatgccggtgtctcttatcagaccgtttcccgcgtggtgaaccaggccagccacgtttctgcgaaaacgcgggaaaaagtggaagcggcgatggcggagctgaattacattcccaaccgcgtggcacaacaactggcgggcaaacagtcgttgctgattggcgttgccacctccagtctggccctgcacgcgccgtcgcaaattgtcgcggcgattaaatctcgcgccgatcaactgggtgccagcgtggtggtgtcgatggtagaacgaagcggcgtcgaagcctgtaaagcggcggtgcacaatcttctcgcgcaacgcgtcagtgggctgatcattaactatccgctggatgaccaggatgccattgctgtggaagctgcctgcactaatgttccggcgttatttcttgatgtctctgaccagacacccatcaacagtattattttctcccatgaagacggtacgcgactgggcgtggagcatctggtcgcattgggtcaccagcaaatcgcgctgttagcgggcccattaagttctgtctcggcgcgtctgcgtctggctggctggcataaatatctcactcgcaatcaaattcagccgatagcggaacgggaaggcgactggagtgccatgtccggttttcaacaaaccatgcaaatgctgaatgagggcatcgttcccactgcgatgctggttgcacatttccgtctgcgcgtctgcgccgtcgtcacttctccctcgctgtctccgtcgctcgcgcctgtgccctccgttgccgccgctgttctcctcgtctccttgtccccggtaaaaaccaagcctgtagtggagcacaagtatgccggtgggcaatgtcttgtacatatccaagcattgatgaacgaggatactgagaagcaccaggtgcattattctacgccgaagtgtgggcggcatgcacaatggtcagacgcgtactga

SEQ ID NO: 23128 - DNA, 1440 bp, Homo sapiens
  SIMILAR (532)..(585): 381254mologous to Homo sapiens metallothionein I-F,accession number K03473,Smith-Waterman Score=41.
  misc_feature (1)...(1440): n = a,t,c or g
tcacgtccagtctttctctgtcaggtaaatcggggaggtacatagtttttctacgccgctctgtaggaattcaaagtccgagtgctgtagcgacggtacgccttcttctagccggttctgatcgtcgttttgccgctggatctgctggatgcgctgtactatcccgggctgaaagaagctaggagccgggttgttgctaccgaatccgccggtcagcctttcgactgcgtgcaggaagtataggaaatcgtgataagccggttgcgtggccagataccggtagcggtgacaataccgaggtttactttcgcgctcatcaggcaggaatccttccagatactgttctagcgggccctgctcaaagggtggcagtttctggaggtactccagtggactggtgaacgtgtcctgccaggccttcttgtcgtctgcccgacacatcatttttatcttttttaatgcccagactctctgcttttgatcgaggctagccatgttgttcaacgagttgcacaggtgtacacccccaacaacttgtccctcgtggagcgtgcccaggcaacctgccagggcttctgtgagtgtcacagacacttcttcttcttcttcttcttcttttaatgcctgtttaagcaagttccctgatggctgctggaagctgccagggctcctgtgagtgtcacagacacctttttcttgcttctgcacggccaggaggagctctccagatgacactgcatcactggtggcagtggccggttgtagcctctgtcgccctcgagagctctgtgctgtctccagcagaccttgctgggcttgtgaaggctcatactgcagagggtcatcgtcctggaccgggtgtgcttccagctgccacctcaaccctggaacttgagtaggggtaccacatgtgacgtccagtctgctagctatggtacccccttccggtaatgctgcaggggcgcccacaggattggaagggttgcccagctttgatttcaggtaggcaaacaagnccgccttggtacagtaggcgctggggtacttgtacagtacttgtgtctggtagtggtacgaaacgctagtaagttcttgtaggtaagctcgctggaacaccggccgcaagggaggtgtggcataacggcatagtcgggatccgtgcacgttaacgattactaggatttggcggattatcggaatacctctgttactggggtattcgctggtttgttctagagtgcttttggcctgcttttggcctggttccgatttttggccgcgaagcaggcgaaaaaccttgcagggcagagagctcgttcccccgaactgcccgtccggagcgccaataccggattcatacgacagtgacttcccggatgtctcgtaatacgcctcaggctgctgcctcaggatctggtatccttcgtgaagatgcggcat

SEQ ID NO: 23129 - DNA, 3243 bp, Homo sapiens
  SIMILAR (2691)..(1912): 921254mologous to Escherichia coli 4-aminobutyrate aminotransferase (EC 2.6.1.19) (Gamma-amino-N-butyrate transaminase) (GABA transaminase) (Glutamate:succinic semialdehyde transaminase),accession number D90768,Smith-Waterman Score=1218.
ttagtcgactctaaggatcccccggactttccagcagtcgagcattaaccagaaatcctcaccgcatttttcacgcatatccgcgaccatagcggcatctttgcggatccccgcatcgccatcatgtggcccccagtgcgtcggcattttgccaccgataaagcccatcatcttttgccagatccggacgcgcacagagccagatcgacacaagaaatcgtattcatcaccaggccaccagagccggagtaatacagggtggcactgagcatttgatcgtggatcagttctgatatcactgacacatttaccctcaatgaaacggttaagatgtttttcgacaataaaacagcccatttcaccggctgtcgaaacggcgaatccggtctggccgttttctgcttcgacttcaacaaccaacgtgccaagaacgttaatgccaaatgactggcgtgactgctcgtaatcgcggtatttactcatcggggtggcaatatgatcgtctatccagtgattcgccccctggtcgtgataatcaccgccgccagcgcctttttctgctgtcgcaccgccagtaaaccaggcgcgaacctgtttaatttttggtagggtcatgatgttctccattgttatgagggtgaaatatgcgctggcgcaggcaatggccttgcccgccagataatcacggtattcttcattgatttgtaagcgggtaccgaccaccgagatcgcagcggtaagctcgttattggcgttaaacaccggcgcagcgacacaacggacatcggcgtaatcttcgccgttgtcatagctccagccctgacggcgaatacgcgccagttcttcgtgaagttgcagcccttcgataatactttgctgtaccgctgcaggttgccaggcaagcaggcatttacctattccggagcgataaagcgaaaggctttttccttcatgggacgacacgctgatagtggctgatgactccactatataaatggaatggtaccgagctgattgacctacgcgcagagttggcttcgctaccggcagcggcagacgctgctcaataataccgccaccgaggcacacttcaccgttatagaagacggcagactggcccggtgtcacggcggcaaccggttcatcgaaaatcacttcaatgcgatcatcgtccagcgccttgacggtgcaagggatatcggtctggcgatagcgggtttttaccgtgcaacgcatagtgccggtgaatggttcgcgatcgacccagtgcaactgctgggcaatcaacccgacagacatcagccgcgggtgttcatggccctgagcgacaaccaggaatgtttgttttcgacgtctttgtccaccacataccacggttcttcggtaccttctttggttgccaccgatacccagacctttacgcaatttcatcgccatcgacggtaatgataatgcccggttgcgtccgggagataacggtcccaggaactcgcggaatttacgttcgccaatgaagcaaatgccggtagagtcttttttcttcgcggtgaccagaccaagatcttcagcaatcttacgcacctgcggtttttccagttcgccgaccgggaacaggctttgcgcaatctgctcatggctgagcgtataaaggaagtagctctggtctttattgctgtccagaccacgcagcaggcggctcttgccatcgacatcggcccgacgtacgtaatgaccggtagcgatataatcggcacctaaatcttcggcggcaaattcgaggaaggctttaaatttgatctctttgttgcacagaatatccggattcggcgtgcgaccggctttatattcggcaggaacagttcgaagacgttgtcccagtactcggcagcaaagtaacggtgtgcagttcatgccgagagccgggtccaggatcgtctttaaatccggcttatcggcgtaatgatccatggcaaacagcttaccggtacgcgcaaagccgctttgcacttcatcagcaatcatcacaataccgtgctcgtcgcacaggcggcgaatagcggcaaccagctcttttggcgcaacgttgaaaccgccctcgccctgcaccggttcgaaaataatcgccgccacctgcttcgcttcgatgtctgatttaaacaagcgttcgatggcgtcgagggagtcctgtgttgaaatgccgtgtaaatctgacggataaggtacgtgatacaccgaaccagggaacgggccgaagccgattttgtacggcgcaacttttccggtcagcgccatggtcatatacgtacgaccgtgaaagccgccgctaaacgcaatcacgccagggcgtccggtatgggcgcgagcaattttcaccgcgttttccaccgcttccgcaccggtggtgaagaacgcggttttggcctgcccgctcaccggggcaagggcgttgattttctccgccagggtgacgtagctttcatacggcacaatctgatacgcggtgtgggtaaactgttgcagttgctgctccaccgccgcgaccagatcagggtggcgatgtccggtattcagcaccgcaatgcctgcggcgaaatcgatgtactcgttgccctcaacatccttcagcgtggcgttttcagccgagccgcgcccatcgcggtaaacggcacacgcagcgtgcgcccgccggggaacgggtaatgcggcagattggcgaaggcatcgaaacgttcggcgtcgccgcgcagcagttcggcaatcaaacgtccggctagatgagtacaggtcacgccgtggccgctgtagcctcaggaggtcgttttcaaaccccacggctcggagagaacacaggcccttggtgaccacagtgttgagggaaccgggcaggggctctgccaggagccacgctgttgatcctggcagggtttctgccgagcgcacaccagaaccgtcccagccgcaatccggtatccagaccgccaaacacccaacgggttgcgaggcgcaaacactatgcactcgcagatggatacactgaacggagatggacgaacgcaccttaagcaactccaccacggtttctgcaaatccaaccacatacatagcaactgcaacagcgttggcaaaggcgaagattagaccaattgcaccaccaaattctggccctagacttctagatattaaataatatgctcctcctgcttccaacagcagtttcctcaaaaacaagggcaacatcgccat

SEQ ID NO: 23130 - DNA, 4632 bp, Homo sapiens
  SIMILAR (836)..(1027): 281254mologous to Homo sapiens Nip1 isoform s2,accession number AF083957,Smith-Waterman Score=44.
atgaagaaccctaatcatggacttggtacgatggtttatcaagtcccgttttcttttacaaacttccccttcactgcctgtctcttatctgaggcctggtacagaaattcagaccgctatttatccaagtacctccttaaggtagtcttaaggctcaagccagctcagaaacggcagaaagacttgctttcttgggttaaaggagggcgattacagggtttggcggccagctcgtgtgaggagaaaggcgggtcgaggtcaggctcccctgagctacttcctggtccgatcggactcgccttcggacacccgaaacacccccggcccggctccctcgccctttgccctgtctcctcccctctcagtgacccaccaccactgagcccgtgtgcgttaccatacccttccactgctgtgaacctctgtgaacgcaatatacacgtacaatcagcatgcacccccatcaatcgatccggcagtaaagcacgagaaacggagaacgacgcaaaatcatgcacaaacataaaaaacaaaaaaccagaaatatatagaagtaataacgacagcgcaccaaccagccacgccagagaggatggctacacgagacgctgggcaagagaccgaagacacaacgcgcagagacccaacacgacccgccagagcaaaacacacgcgagtgggaccgaggaggacatcagctcgcaagcggacacagagcacacaaccagcaagagagacacgacagagagcggagatcgagcagcatcagagaagcctaccacgacagagcgacggaagcgcaagagcgcagagacacagcgacgacggacgcaccaccgcgctcaccacacagctcgagaagacgatgaagaccgacacagcagaccacgacacgactacacacgcgcgcacacagccagagccgcaccagaagaactcggaccagccgaaagagcacgcagtgaaggcccagacgacacgaaaccacgaacagagaacaacgaagtcagtagcgagcagacgacgaagactcgcagcaacacaacaaggatagcgacactacagcgtgcacacgacaacgcacacagtcgcggacaagcgcagccgcgaaatatagacagcacacagcaatcggcatacagcacgaagcacggggcaaagacgcactcgagacagacagtacaactcagaacacaaccgacgcaagccaacaagacacgcgaagcacagcagagcgacgagaagaacaggccagaagagaagactcaaatcaagcaaagacaaggaggcgacgacaccacagcgaagacgaggaaccgacacgagctagcagagggcgaggaggtacgagagacgagacgtgacacggacgagaagcacgatcgcgaagaccgagacagcatactggagagagccgcgcacacgagccaccacgagccgatacacagaagcgcgaacagtagcagagagactacgcgcataccgcacggccaagacagtcgacgcagtacgaacgcacaacaagaacagacaggagaccagcacagacgagcacagcagcggagacaaggacggagagctcgactaacggacagcaataaaaatgctttgtacaaaataaaaggacacagaaaagcaaagaaatgcctactgaacagaatacataaacacatcacaactatcatcaacccatttgaaggaaaaagtcaagcacacgcaattaatccatatgcgaagcaggagcaagctggaagacaatttgggcatcactgtctagtacaaccaatgcctgcaggaagatgtcagatacaccatgttgaagatcctgcatcagtatatgatgaagctatggaactaattgtcaaacttgcaaatcatgggctgattcatggagattttaatgaatttaatctcattttggatgaaagtgaccatatcaccatgattgattttccacagatggtttcaacttctcatcccaatgctgagtggtacggaggccactggagaattctcaaggaggccatggcatgtgcctctgaaagagaggggctgacgcagggcaccaacttgaatgaggaaagtccggctgcattgggcccagtcagaagctgccagaatgacccaagcaaggcacagggaggcccaagggaagtctatcaaactaacagcagacttctcagcagaaatcctacaagccagaagagactggggggggatcctctagatcgacctacagctacctggaccaagcagcgtcaggcccagatacccatattcagaaatacatctgactctggggacagtgattccttaagggacgtgggcctcttcttagtcacttcttcacgaacgatcctggatgcaaatgaagaatttaagtccatgtcgggcaccatccagctgggccggaagcttatcacaaaatacaatcgccgggagctgacggacaagcttctcatcttccttgcgctagccctgtttcttgctacggtcctctatattgtgaaaaagcggctctttccatttttttgcctgcaggttggatggaacacagtgccccacttttctgcaagtagctggcttgtaaagggtgaacagagccatgggaggaaggtctggcattgggatgccgccctggggacatacgaaccgcctccttccaccattgtgcactatgggaggccgctgctgcgtggagcacttaaagtccagcctccaggaccggatgcccctcctgtctcccgctcccatcgtgcccttaaatgccagatctggtggagggaagagagaagagcgataagggcgcacaaccgcaaccacgcactcagtcacgcagcgcacggacgaacggcagcggcgtgcggatactgcactcactttggcggattatcggaatacctctgttactggggtattcgctggtttgttctagagtgcttttggcctgcttttggcctggttccgatttttggccgcgaagcaggcgaaaaacctatggcaccgccccccagtcgtgctactctttttacgtcgcacttgactgtggaggcgtttcccgtctggtcatatttgtatcctggcgaaacccccaggttgcacccacgagcgcacaccagaaccgtcccagccgcaatccggtatccagaccgccaaacacccaacgggttgcgaggcgcaaacactatgcactcgcagatggatacactgaacggagatggacggacgcaccttgcagggcagagagctcgttccccccgaactgcccgttgtagcgccaataccggattcatatcgtggatgcttccgtttgtgggccgtgaagtcccagcggtgtgagggaaaagaacgagggccactcagcgcgtgcgcccgcgcgtgcggggcgctgctgttcgtcggctgcgtcggcgtgtcgtgaggctgtgtcggcgactggtggggggtgaggcgtcgcgtcgccgcgtgcgtgtcgtgtggccgtgtggcatgtgacgacaggcaatactgcttatattgcttgactgcgcctgggttaacagtaggagctgatgaacgtatagagatatgaatgccataccggatgctaaggcgatatagagtgctacgacggagcgagccgtagatatgcgcgacagaggctggatttggcccgacgtagccagaaagacggcgactatgacgcgtagggagccaggggagccggggatgtgaaattgcggatttggtggttgtgggtgccttgcacttgactaacttgactttacttgccatcgtataagctgcctgatttttcagtgggcggttgtccatttgtatcagatcatccaacgaagaagcatacccgttgtccatttgtatcagatcatccatacgaagagcatacccgttgtcgatttgtatcacaacatccatacgaagatccataccgttgtccatttgtaacagaacatcgatgcgtagatgctcacgcgtagcgaattgatggacgcgggagccggtgtaaaagtgtacaaccacccgtacagggtagcatggtttaacaccgggatgcacacctcgaattttgcccgatagcggtagcggagttgaaacgtttgcttgatttgaagtacccagagagtttgggccgtgagggatgactactagagggcgtgtgactgtgtcagacaaagaactgcttagaatgtggagctgggcgtaaccggttggtttgggacattggtggccggcgtaccgaaggcggggacacctgtcagagtgttgaccggagtagaagcccgcctgcttacagccgcctgctttcagtctaactactactgccatcgtatagcgccgatttacacccacgctcgtgcacccgtgtatcgcaaccgtaacacgcaagtacgggacgcctttaactaggggccggagtgccgtaagaaaggggcagctacatatacgccggaatacccggtcttgcgggaaatgatatacggcctgggtgctttttgggggcaccgaaacgcccgtgtgtgacgtggatcttaacatgttgatagagacatccatgaaaaaggttgggcgtggccccggggaccaggcgacactgactagtgcggcgccccgcttgtccatgaatgtatgcat

SEQ ID NO: 23131 - DNA, 1440 bp, Homo sapiens
  SIMILAR (786)..(190): 401254mologous to Schizosaccharomyces pombe putative Trp-Asp repeat protein,accession number AL034382,Smith-Waterman Score=397.
ttacttgtctgccttactagagtgggtagcaggttcgtcttccccttgactgcaatccaacttgccattacacagctttgatatttccaaagtgacccattggccagagttgctaaacagctctgaacctccctcaggggctgagtctggagttgcgggatctcttgggcccccacctaaggaactagcactcaaaccccctgctgacaccagaagacctccagaggggaaaagtaggacactctccactggctgcccatgctcaacggagagaacactctcactcgttcgtgcatcaaacatcttcacagtatgatcatatgatcctgttataaagagatccggattaagtttgctagcacatccacacctcacataatcagagtgttctttaaatgtcaaaatttctttggagtttggaatatcccataatttaactgtataatcatcagccccagagaccacgtgatatttgtcagctgtaaaatctactgtatgaactgcttttgtatggccttcaaactgcctgaggggagccctcccacttatatcaaaaagttgaactccaccatcttcactgccagccacaagcaatctaccatcttgtcgaaaagtagcacagtatgctgtgtctttaaatcgagaaaaggtttttataggttcttgggagtatcggccataaatgtgaattcttgaggaagctgtgacagcataattatatggaggctgaggagaaaagtctacttttgaaactgcaccaaattccttaatctgaacaggggtctgagggagcctcgtaagcaaaggcaaagatggaaatgtgtccattgccttggagagttgctgattactccgggaactaacaacggtggacaggaaagggtgtaatcgcagagaagaacctaggtcgaagcttaattgaggggaacttgagccggttaaagaatttggccactctcctatatagcccgaaagtttcagttgcattgctgcggaacgttttttagccagaaggcgaaagaagaaatcggaagtgacgtcgcggccaaaacaagcccgggcttggaggcctgtactgaagctggcctcagatgggaaggcccgactcgctgtctgctgtcgtcggtggtcgcgagaccttgcactctcaccgggtcggcctccagcccctgtgcccgggatccgctcgccgcggatgagcgagagtttcttcctgggacttttcgggcacagctggccggtggcgacagaacggactttctttcctgcaagagtctcccctccagcgggagacagcgggctcctgtctcgggacgctgggacacctgtcgcctgtgaggcatcatttattttcatagcaccttcctctccttgtagaataattccaggatcaggaagaaacgaggggctcctgttattagcatccacaggaactagcat

SEQ ID NO: 23132 - DNA, 766 bp, Homo sapiens
  SIMILAR (470)..(447): 871254mologous to Homo sapiens Human secreted protein, SEQ ID NO: 6477,accession number G02396,Smith-Waterman Score=40.
tgcttagcgtcgtgcgctcgcgtatacatatgggggtgggggtgggggtggggtgcccagttcgctatcggaatcaggatgaccatgagctacaaattacacacgggaacaagattctatgtggaattgtgtgcgataagggcgcacaaccgcaaccacgcactcagtcacgcagcgcacggacgaacggcagcggcgtgcggatactgcactcactttggcggattatcggaatacctctgttactggggtattcgctggtttgttctagagtgcttttggcctgcttttggcctggttccgatttttggccgcgaagcaggcgaaaaacctatggcaccgtcccccagtcgtgctactctttttacgtcgcacttgactgtggaggcgtttcccgtctggtcatatttgtatcctggcgaaacccccaggttgcacccacgagcgcacaccagaaccgtcccaggcggaatccggtatccagaccgccaaacacccaacgggttgcgaggcgcaaacactatgcacctcgcagatggatacactgaacggagatggacgatcgcaccttgcagggcagagagctcgttccctccgaactgcccgtccgcagcgccaataccggattcatacgacaagtgactttccggattgtctgtcaatacgctcaggctgttgctcaggatttggtaatgtgtcgtggataatggcggagattttgataagttgggaggcatctcaccctcttccccgctcatgcttctaa

SEQ ID NO: 23133 - DNA, 3797 bp, Homo sapiens
  SIMILAR (2511)..(2564): 381254mologous to Escherichia coli similar to melibiose carrier protein,accession number L10328,Smith-Waterman Score=41.
  misc_feature (1)...(3797): n = a,t,c or g
atggtttacaaaatgcgttatcggtctcagcacccctatagcatcaaggaaaagcagatgaagagtgaagtgttgtccgttaaagagaaaattggttatggcatgggagacgccgccagccacattattttcgataacgtaatgttatatatgatgttcttttataccgatatttttggcattcctgccggttttgtcggaaccatgtttttggtcgctcgtgcactggatgcgatttccgatccttgcatggggttgttggccgatcgaacgcgctctcgctggggtaaatttcgtccgtgggtactgtttggcgcactgccattcgggatcgtctgtgtactggcctatagcacgccagatctcagtatgaacggcaaaatgatctatgcagcaattacttacaccctacttaccttactttataccgtcgtcaatatcccttactgcgcattgggtggtgtaatcaccaatgacccgactcagcgtatctcgctgcaatcctggcgttttgtgctggcgaccgcgggaggcatgctttctactgttctgatgatgccactggttaatttaattggcggtgataataaaccactcggtttccagggcgatttaagcccgatgttctctacacctgaagagatcgcccgacctggaccgtacgaaaacgacgttcacgtagtgggcgcatcctcactggctgccggtcataaaacgctgatcccggaactggtacgaagcgctgaacaacacatggggacgcgaagatatctgcgtggtcgacgggtggcagtcattccgccgacaggattacgccttcctgcaagagcgcggcagtggcggcgatttatggtccagcacactcgcccaggccatgacgctggtggaaaggcgtcaccgcgtcatcaggcactaagtacgcagctgcttgatgccattatgccgtactgcggtaacaccctgcgactgggcgttaccggcacccccggcgcggggaaaagtacctttcttgaggcctttggcatgttgttgattcgagagggattaaaggtcgcggttattgcggtcgatcccagcagcccggtcactggcggtagcattctcggggataaaacccgcatgaatgacctggcgcgtgccgaagcggcgtttattcgcccggtaccatcctccggtcatctgggcggtgccagtcagcgagcgcgggaattaatgctgttatgcgaagcagcgggttatgacgtagtgattgtcgaaacggttggcgtcgggcagtcggaaacagaagtcgcccgcatggtggactgttttatctcgttgcaaattgccggtggcggcgatgatctgcagggcattaaaaaagggctgatggaagtggctgatctgatcgttatcaacaaagacgatggcgataaccataccaatgtcgccattgcccggcatatgtcgagagtgccctgcatattctgcgacgaccgcctatgcatcgtgttcctagaaaccctaaggtcaacctgcttcctggaaccgctatggccaatctgctgtcctaggaccgcaatggccacgctgggtcctaggaaccgctatggctttgatccattggctgtttcctcggggacccggtcttgttccttgggggttcctcgggcacaccgcttcgcccttgcgggttctcgggacccaggctatacgcacaagcgcgttcttgccatattccaagcctttaacgcgttcccggaaccaccggccaacacgccggaagatccggcaggtctctctctactgccatcaggccacacgtctgctcgagagcctggcctctgtctcccaatcaactcgctttgccctattgttcagtctctctggccctcatcactgcgctctacccaaccgctcacaccccttcccagctgcccctcccaggcccatcaccctggcagcgtggctccgtgcggtgcagcctggtacccggcggggcacacgcacaggaagctgcctggcgtgttctcgcagcgcccgaggtcacacggcggcggcacgcggtggcactcgtccacatctgtaggcacagaccaggcggctgggactggggcagacagccccgggagaagcgacgcaaggaggcaggggtcagcagggaagcgggcagcgggaccaagcttgggccagagccaggatggggacccggccaggaccagccggcagcaggggcacagtgcagcagcaggcaatcgtggcagggcagggtttggtcagcgccacagggcagaaaggcagcagctttggggaccaagctcacgggaaggtggggtaggggctagagaagaacaggagcagtttggggataggggctctggtgtggcagggttggaatcggggtcgcggtcaggagattggttgccgcagtttgcaggacagtggccgcggctgcgggaggcagtcagtcagcgcagggctcacgcagcgcacggacgaacggcagcggcgtgcggatactgcactcactttggcggattatcggaatacctctgttactggggtattcgctggtttgttctagagtgcttttggcctgcttttggcctggttccgatttttgggcgccgaagcaggcgaaaaacctatggcaccgtcccccagtcgtgctaactctttttacgtcgcacttgactgtggaggcgtttcccgtctggtcatatttgtatcctggcgaaacccccaggttgcacccacgagcgcacaccagaaccgtcccagccgcaatccggtatccagaccgccaaacacccaacgggttgcgaggcgcaaacactatgcactcgcagatggatacactgaacggagatggacgaacgcaccttgcagggcagagagctcgttccccccgaactgtccgtccggagcgccaataccggattcatacgacaagtgaccttcccggaatgtctcgtcaataccgctcaggctgctgcctaggattctgtcaggtgttgttgcccgatgacaacggtaaattgcagccgttaacacatccgcaaggaatgacgccgtgggacgatgccatcgcgcagtggagttttgataaaggcctgcctgcgggcgcgggcaccgacacgttacccggtgtaccgtaccangattttgccgctaaaaagcggcgagaaaacctacgggctggtgaaatcttaacgctcgatctggcaagcgaaggatcaccccacgcccgccaggccagcgagatccgtcagcatgtgctgaacactacccgactggtgaataatctactggatatggcgcgaattcagtccggcggctttaatttgaagaaagagtggttaacgctggaagaagtagtcggcagcgcgctgcaaatgctggaaccgggtttatcgtcgcccatcaatctttctctgccagaaccgctgaccttaatccacgttgacgggccactctttgaacgggtgctgattaatctgctggagaacgcggtgaaatatgcgggtgcgcaggccgaaattggtatcgatgcccacgttgagggcgaaaatctacaactggatgtctgggataacggccccggtcttccgccaggccaggagcagacgatatttgataagtttgctcgcgggaataaagagtcggcagtaccgggggtagggcttggactggcaatttgtcgggcgatagtggatgtacacgggggcactattaccgcgtcaaccgaccggaaggtggtgcctgttttcgtgttacacttcccccagcaaatggccctgaacttgaaaatttcctga

SEQ ID NO: 23134 - DNA, 1488 bp, Homo sapiens
  SIMILAR (816)..(454): 971254mologous to Escherichia coli similar to,accession number D90889,Smith-Waterman Score=603.
atggtgggggctgagttcaccggtggtcagcatcgatgccatctggaggataaagtgcgggaatgtttcatccagcttccggcattcgatgtcactgaacttgccggtgatgctggcccggtcagccagataatgcagtcggttgccttcctgcaccagacgggctcccaggcgcagtgtaatctcccgctgcaggcccctggtagggttgctcattacagttctccactattgtcagttcagggtgatgctcatcaggcaggtatagggcccattgcggtcctggcggcgttcggcgtataccgcgaggactccggcgatatccggaacgtccctgccggtgtaatgacagacgctaccgtgccactggtatttgccggtgcagtagcgaaagattcgggactcaggatgctggcggtatatcgtcattgccctgcgtttactgataattttcataccgtgttctgcgaacgaatagatttgcctgccaccaacaatcagatggtcagggacacggatatcaacgagctgaagcgcctgcaccagacgctgcgttatagtcttatctgcctggctgggagtagtgtcgccggaggggtggttatgcgccagtatcactgctgctgcattgaaatacagggcgcgtttgaccacctcacggggatgtacctcggtactgctaatagaaccggcaaacagggtttcgtgggcaatcaactggttctgctggttcagatacagcatcataaattcttcacgctccagccccgccattttcagcttcagccagtcacgagcagcctgagtggagcgataagggcgcacaaccgcaaccacgcactcagtcacgcagcgcacggacgaacggcagcggcgtgcggatactgcactcactttggcggattatcggaatacctctgttactggggtattcgctggtttgttctagagtgcttttggcctgcttttggcctggttccgatttttggccgcgaagcaggcgaaaaacctatggcaccgccccccagtcgtgctactctttttacgtcgcacttgactgtggaggcgtttcccgtctggtcatatttgtatcctggcgaaacccccaggttgcacccacgagcgcacaccagaaccgtcccagccgcaatccggtatccagaccgccaaacacccaacgggttgcgaggcgcaaacactatgcactcgcagatggatacactgaacggagatggacgaacgcaccttgcagggcagagagctcgttccccccgaactgcccgttcgcagcgccaataccggattcatacgacaagtgacctttccggattgtctcgtaaatacggcttaggcttctgcctcaggattccggttatgcccattgcctgggatcgccgctcatcctataccccagttcgctatcggaatcaggatgaccatgagctacaaattacacacgggaacaagattactatgtggaattgtgtg

SEQ ID NO: 23135 - DNA, 1417 bp, Homo sapiens
  SIMILAR (19)..(147): 651254mologous to Homo sapiens Human secreted protein, SEQ ID NO: 8172,accession number G04091,Smith-Waterman Score=114.
atgcaggacaatggcacgggcaaagatttcatgatgaagacaccgaaagcgattgcaacaaaagcaaaaattgataaatgcgatctgattaaagagcttcagtacagcaaaagaagctatcaacagacgataagggcgcacaaccgcaaccacgcactcagtcacgcagcgcacggacgaacggcagcggcgtgcggatactgcactcactttggcggattatcggaatacctctgttactggggtattcgctggtttgttctagagtgcttttggcctgcttttggcctggttccgatttttggccgcgaagcaggcgaaaaacctatggcaccgccccccagtcgtgctactctttttacgtcgcacttgactgtggaggcgtttcccgtctggtcatatttgtatcctggcgaaacccccagggttgcacccacgagcgcacaccagaaccgtcccagccgcaaacccggtatccagaccgccaaacacccaacgggttgcgaggcgcaaacactatgcactcgcagatggatacactgaacggagatgcgacgaacgcaccttgcagggcagagagctcgttccccccggaactgcccgtcccgcaagtgcccaataccggattcatacgacaagtgaccttccgggattgtttcgtcaatacgcctcaggctgctgcctcaggattctggtaatgctgtgcgtggatagactcggcggagcatccgtgaacaagttgaggaggccattcatcggcatctcatgttgttctgatacggatacagcgcacagcagttgcctgaatccaaggtttcgtgaggatgacagtaccggttttttctcgaggatcgcaagtgaatcctgggttttaacatccagtttttacaggggaattcgcaagtctcatttttcaacccaaatccactacaatcaactgttcatttcatttggctttaacaactctttcacctgtaagccacaacttgcagcatattttcttctcaatttcaccagcaaagccaggcaatgcagggcccaacagcctgcagcaaccactggaacacagcctgtggttgcacatgccttccggcaattcaccccaagtccaaggttcagcaataacacccagggtcgcaacaaaatcattcctgtaaggccacataaccttgtggccaatgtaaggattactacgacatccaaatcaccctcacatgggccagcctttgctatttctggaacatgtttcataaaccccacgggtactatggacgagagtggggaaaacaacgttcagtggggttatcttctagcgttcacgcgtatgtgttgggcacactcgcacgcgctgacagcggtctcctgtcaacagaggggcacaacagacagaccacaaccagacagttgtcgcagctaa

SEQ ID NO: 23136 - DNA, 1780 bp, Homo sapiens
  SIMILAR (673)..(831): 861254mologous to Homo sapiens ankyrin-repeat family A protein 2,accession number AF314032,Smith-Waterman Score=214.
gagtaggaggtgtgaccggagggcgaaattggggcttcttctgctctgtgtgacccagaaccgtcaactgaaatgaccctgtctgtgtagtactccggcaggatgggcctcggagcgtaaaggcggcaaaaacaaaaatattaaaaaaaaggagagagggacaaaaaaaagaaaacccgaaagtttcagctgcattgctgcggaacgttttttagccagaaggcgaaaagaagaaatcggaagtgacgtcgcggccaaaacaagccccggcttggaggcctgtactgaagctggcctcagataggaaggcccgactcgctgtctgctgtcgtcggtggtcgcgagactctgccactctcaccgggtcggcctccagcccctgtgcccgggatccgctcgccgcggatggagcgaagagtttcttcctggggacttttcgggcacagcttggccggtggggacagaacggactttctttcctgcaagagtctcccctccagcgggagacagcgggctcctgtctcgggacgctgggacacctgtcgcctatttttaaatatccagattccaagaacacactggatactgctcttacaaaaccaagaggaaatcatgaagaaatgttttagttattgaaactacagttgaaatcatggatacatcaaacaaatcctggatattggagcccagcttatcgtggaaagaagtgtccccagcacttattagcctaacttgggcatgccagacattaaaatagaacatccactggacccaaattcagaagaagggtcagctcagggtgttgccatgggaatgaaattcatattgcctaaaccgatttgatatgaatgtgtgttctcgatttgtgaagtccttaaatgaagaagatagtaaaaatattcaagatcaggtttttcgcctgcttcgcggccaaaaatcggaaccaggccaaaagcaggccaaaagcactctagaacaaaccagcgaataccccagtaacagaggtattccgataatccgccaaacgataagggcgcacaaccgcaaccacgcactcagtcacgcagcgcacggacgaacggcagcggcgtgcggatactgcactcactttggcggattatcggaatacctctgttactggggtattcgctggtttgttctagagtgcttttggcctgcttttggcctggttccgatttttggccgcgaagcaggcgaaaaacctatggcaccgccccccagtcgtgctactctttttacgtcgcacttgactgtggaggcgtttcccgtctggtcatatttgtatcctggcgaaacccccaggttgcacccacgagcgcacaccagaaccgtcccagccgcaatccggtatccagaccgccaaacacccaacgggttgcgaggcgcaaacactatgcactcgcagatggatacactgaacggagatggacgaacgcaccttgcagggcagagagccgttccccccgaactgcccgtgggaagcgcaataccggatcatacgaaagtgacctgccggatgttcgtaaaaagcccaggtgcgcttagaatccggaagcgtgctggtagatgcgagctcgttaccattgagagcattatggactcattgttcgaaggaaagggcagattcgatccaatttgtgggcaatacggttttcccggtcggggaagaagtgccttacctttagccactccccatcactcacattaccacctgagctgcacctcctgtcagatcagtggcagcattagattctcatag

SEQ ID NO: 23137 - DNA, 714 bp, Homo sapiens
  SIMILAR (67)..(303): 311254mologous to Mus sp. ICER=inducible cAMP early repressor,accession number S67786,Smith-Waterman Score=82.
atggcagaagttgaaggggaagcaggcacatcttacatggacagagcaggagaaggagagcaagaggctatacaaggagatgaaataatcctgaaagatatacagtcaaaaggaacgatactagcagctcagaaatacatggaacctgttcttctgtgtacctctcaggcctctcagcactcaccaacaccattagcagaggagaggacaagtgaaggaagaaagagagcaatgaagctgactgaagcaaaagagagacaaggaagacagatccagcagggtgtccgctgtgcttctgatcaagcaaggcgcccattgccactaccgatcgggctaaaggcttgccattgttcctgcacagctaagtgcctggggggctgtgaaagcccacgcaagggaggtcagttattaatttttgagggacatgtaaaaatagacctggaaatattcactaaatctctgtggttgactagacaactcattgtaaagaaagaaactgagaaagctgttaagcatgcctctaacatctgtatcatgaggactggcttaacttttcagtctcataaaattgaagatgggctgtttggtttattggtaattgcaacagaagcagaatggtcttatgtttgccagtccacaaaccccgtagatgtttatccactcacggcagtgccagcctgctgcattatttcagctagtgacgttcctcgatga

SEQ ID NO: 23138 - DNA, 459 bp, Homo sapiens
  SIMILAR (385)..(459): 1001254mologous to Homo sapiens Human protease HUPM- 8,accession number Y06439,Smith-Waterman Score=140.
gtgcgtgaactcgcaaattgggcgagggcacaaaataaccacttaccccttctcaccgaggaagagcgggagaaagggtatggcacagtcacaagggtgggtgaaaagatacatcaaggccttttgtaaaggcttctttgtggcggtgcctgtggcagtgactttcttggatcgggtcgcctgtgtggcaagagtagaaggagcatcgatgcagccttctttgaatcctggggggagccagtcatctgatgtggtgcttttgaaccactggaaagtgaggaattttgaagtacaccgtggtgacattgtatcattggtgtctgctaaaaacccagaacagaagatcattaagagagtgattgctcttgaaggagatattgtcaggtttccctaggacttctgcatgcccatgccacacatatcctgtggcccccagagcgctggcagaaattggaatcc

SEQ ID NO: 23139 - DNA, 477 bp, Homo sapiens
  SIMILAR (145)..(255): 941254mologous to Homo sapiens Human protease HUPM- 8,accession number Y06439,Smith-Waterman Score=209.
atggatgctaccagctctagtttctggaagccagcgatactactcaacatcgtaaaatggacagaagcacctcctaactattgtttggctcaaaatgtccataatgttaaggttgggaatctcagatacagggcttgtaagccaaaaaccataggacacaaaaaccggtatgtcaaagtcccccgtggtcacatctgggttgaaggtgatcatcatggacacagttttgacagtaattcttttgggccgatttcttccatttcagtagatggcactatccacccagttactcaagacaaaaagttaggcggcatccttggggtctcactttttattgccctcaactgcctgtggaactggcaaataatagatgtcgaaaaatgtttctcagatgaatacactagccagcgcacactgggaatccagaggcttctcttttaccacactgttggctcagcaatggcagtgatcttttaa

SEQ ID NO: 23140 - DNA, 1515 bp, Homo sapiens
  SIMILAR (400)..(921): 681254mologous to Homo sapiens Human protease HUPM- 8,accession number Y06439,Smith-Waterman Score=560.
tctgaggcgcgtgcggcggccaccccagcctagtcctcttcttggtgccactggctaactaggttgagaaaccggcgccacaggcggcagcacctggcccggagctggcccgctcctccccgccgagccggcgccccaacaacgcgccctctcccagtcctcacaaaggggcctagtccggcccccggctctggccgtgagggagcgctgtgggggcgcgctgcctttctgcctggaaagtgttggcagggtggtgggagaagcgtcaggcttgaacaacatgattttaaagcacgtgtctgtctgtcgttttttacttttagggttttggccaaattgggcgagggcacaaaataaccacttacccctttttcaccgaggaagagcgggagaaagggtatggcacagtcacaagggtgggtgaaaagatacatcaaggccttttgtaaaggcttctttgtggcggtgcctgtggcagtgactctcttggatcgggtcgcctgtgtggcaagagtagaaggagcatcgatgcagccttctttgaatcctgggggggagccagttcatctgatgtggtgcttttgaaccactggaaagtgacggaatttttgaagtacaccgtggtgacattgtattcattggtgtctcctaaaaacccagaacagaagatcattaagagagtgatttgctctttgaagggagatatttttcagaaccataggacacaaaaaccggtatgtcaaagtcccccgtgggtcacatctgggtttggaaggtgatcattcatgggacacagtttttgacagtaattcttttgggccggtttccctaggacttctgcatgcccatgccacacatatcctgtggcccccagagcgctggcagaaattggaatctgttcttcctccagagcgcttaccaggtacagagagaagaggaatgactgcatgaatctacctgagttgctggcattgggaggccagttactggaaaggaatggaaaaaagaagcctccaaaagggaaaaacttctgacaatatgatgctgtgcgagaaatatttacagcacagttaaacggatctgtgttatttaaaatagataattttcaaatggttaaacagtattaaatgggcaccctgattttgtgttaaattttaggttcccctgttgtttaatgcccccccaaaatatgccagaccctttgggaatataaaaatattggcaccccacatgtcttaatggggctgaatttcagattatttgttacatataccctattatattgattgttgggttttgattttggtgcttgctgctgaaataaattgaaaattaatattcaataaaaatgatgtatttgtcacttgctgttaaggtagaacaagaaggaacacatattatacacataatgatgggaattacattgtgatttgtactatctacaaaggagtaactgccagttaggaagaacagtaaacacgtgatgttaaaataaaacaatgatttgctaagaaa

SEQ ID NO: 23141 - DNA, 852 bp, Homo sapiens
  SIMILAR (248)..(619): 371254mologous to Homo sapiens RNA polymerase I 16 kDa subunit,accession number AF077044,Smith-Waterman Score=101.
agagcgagcctgggcggcgaaaggttgccgaggcgggggctgggcgcctgggaacaaagttgaaaatgcaactgcaagctccccggtgaaacaaataccgccttcaaccttcgcctccgcgcctcgcgctatgggacagagcctccgatccgccagcaccacctgaggatccagaaaccgccccagcgatggaagaggatcaggagctggagagaaaaatatctggattgaagaccctcaatggttgaaggccgagaggaagaccacccctggaattggtcccaggcagctgggaacagatagacccctgtgtgacatttgtattgcacgaggaagaccataccctagggaaattttctacgttaccatgatcatgaagaaccccggaaagtggaattttgtggttacacctacggaccccatcctttcagagagcaaaattaaatttaccgcattccagattccgagggtaccccttcccagctgttgagcccatttccagagaggccttgaatgagctcatggaatgtctgcccaaccatgtgctttcacaagttttagggccagcataaaggactataaggaatcaaaaagcaagcaggaaatggaatccacatttctagtccttttatggcagttttacaagggaggaactgtcctgtaggatattctcttcctgatggtgcagaacccaggaattaggaagtttgtgggttacagcatacttctgtcccttcaggaaagggcgtgattctagctgttgaccccttggcagctgttgggattctctggcaagaacccctgtattcttctaataaattccctcttttattttaaaaaaaaaaaaaaaaa

SEQ ID NO: 23142 - DNA, 567 bp, Homo sapiens
  SIMILAR (301)..(357): 891254mologous to Homo sapiens putative p150,accession number U93569,Smith-Waterman Score=87.
  misc_feature (1)...(567): n = a,t,c or g
gatcctctagagtcggcccttagataacatcattgaaactttgcgtgttactgcctttnacatttgttggagttcattgtagattctggatatnagccctttgtcagatgaacattgatgcaaaaaacctcaataaaatactggcaaaacgaatccagcagcacatcaaaaagcttatccaccatgatcaagtgggcttcatccctgggatgcaaggctggttcaatatacgcaaatcaataaatgtaatccagcatataancaaagccaaagacaaaanccacatgattatctcaataggatgcagaaaaagcctttgacaaanttcaacaacccttcatgctaaaanctctcaattaaattaagtatcgatggggacgtatttcananttanttaaggggctatctntggncaaancccgcagccantntcatactgntttggggcaaannctgggnggcnttncccttttgggaaannttggnttctngntttctttccaaccctnnacagggnnnctttngggtttngaaanggttggnncttttnntncangggtttttaaa

SEQ ID NO: 23143 - DNA, 1030 bp, Homo sapiens; identical to SEQ ID NO: 6900
  SIMILAR (4)..(39): 911254mologous to Homo sapiens putative p150,accession number U93563,Smith-Waterman Score=64.

SEQ ID NO: 23144 - DNA, 3045 bp, Homo sapiens; identical to SEQ ID NO: 6847
  SIMILAR (832)..(2844): 941254mologous to Homo sapiens putative p150,accession number U93569,Smith-Waterman Score=3249.

SEQ ID NO: 23145 - DNA, 3159 bp, Homo sapiens
  SIMILAR (709)..(3156): 941254mologous to Homo sapiens putative p150,accession number U93572,Smith-Waterman Score=3959.
atggggaaaaaacagagcagaaaaactggaaactctaaaaagcagagcacctctcctcctccaaaggatcgcagttcctcaccagcaatggaacaaaggtggacagagaatgactttgacgagttgagagaagaaggcttcagacgatcaaactacgagctacaggaggaaattcaaaccaaaggcaaagaagttaaaaactttgaaaaaaatttagatgaatgtataactagaataaccaatagagagaagtgcttaaaggagctgatgaagctgaaagccaagcctcgagaactatgtgaagaatgcagaagcctcaggagccaatgcgatcaagtggaagagagggtatcagtgatggaaaatgaaatgaatgaaatgaagcgagaaaggaagtttagagaaaaaagaataaaaagaaacgaacaaagactccaagaaatatgggactatgtgaaaagaccaaatctacgtctgattggtgtacctaaaagtgatggggagaatggaaccaagttggaaaacactctgcaggatattatccaagagaacttccccaatctagcaaggcaggccaacattcagattcaggaaatacagagaacgccacaaagatactcctcgagaagagcaactccaagacacataattgtcagattcaccaaagttaaaatgaaggaaaaaatgttaagagcagccagagagaaagactttaaaccaacaacgatcaaaagagacaaagaaggccattacataatggtaaagggatcaattcaacaagaagaactaactatcctaaatatatatgcacccaatacaggagcacccagattcataaagcaagtcctgagtgacctacaaagagacttagactcccacacattaataatgggagactttaacaccccactgtcaacattagacagatcaacgagacagaaagtcaacaaggatacccaggaattgaactcagctctgcaccaagcagacctaatagacatctacagaactctccaccccaaatcaacagaatatacatttttttcagcaccacaccacacctattccaaaattgaccacatacttggaagtaaagctctcctcagcaaatgtaaaagaacagaaattataacaaactatctctcagaccacagtgcaatcaaaccagaactcaggattaagaaactcactcaaaactgctcaactacatggaaactgaacaacctgctcctgaatgactactgggtacataacgaaatgaaggcagaaataaagatgttctttgaaaccaacgagaacaaagacacaacataccagaatctctgggacacattcaaagcagtgtgtagagggaaatttatagcactaaatgcccacaagagaaagcaggaaagatccaaaattgacaccctaacatcacaattaaaagaactagaaaagcaagagcaaacacattcaaaagctagcagaaggcaagaaataactaaaatcagagcagaactgaaggaaatagagacacaaaaaacccttcaaaaaattaatgattccaggagctggttttttgaaaagatcaacaaaattgatagaccgctagcaagaccaaaaaagaagaaaagagagaagaatcaaatagacgcaataaaaattgataaaggggatatcaccaccaatcccacagaaatacaaactaccatcagagaatactacaaacgcctctatgcaaataaactagcaaatctagaagaaatggataaattcttcgacacctacactctcccaagactaaaccaggaagaagttgaatctctgaatagaccaaaaacaggagctgaaattgtggcaataatcaatagcgtaccaaccaaaaagagtccaggaccagatggattcacagccaaattctaccagagctacaaggaggaactggtaccattccttctgaaactattccaatcaatagaaaaagagagaatcctccctaactcattttatgaggacagcatcatcctgataccaaagccgggcagagacacaaccaaaaaagagaattttagaccaatatccttgatgaacattgatgcaaaaatcctcaataaaatactggcaaaccaaatccagcagcacatcaaaaagcttatccaccatgatcaagtgggcttcatccctgggatgcaaggctggtccactatacacaaatcaataaatgtaatccagcacataaacagaaccaaagataaaaaacacatgattatctcaatagatgcagaaaaggcatttgacaaaattcaacaacccttcatgctaaaaactctcaataaattaggtattgatgggacgtatctcaaaataataagcgctatctatgacaaacccacagccaatatcatactgaatgggcaaaaactggaagcactccctttgaaaactggcacaagacagggatgccctctctcaccactcctattcaacatagtgttggaagttctagccagggcaattcggcaggagaaggaaataaagggtattcaattaggaaaagaggaagtcaaattgtccctgtttgcagacgacatgattgtatatctagaaaaccccattgtctcagtccaaaatctccataagctgataagcaacttcagcaaagtctcaggatacaaaatcaatgtgcaaaaatcacaagcattcttatacaccaataacagagaaacagagaaccaaatcatgagtgaactcccattcacaattgcttcaaagagaataaaatacctaggaatccaccttacaagggacgtgaaggacctcttcaaggagaactacaaaccactgctcaatgaaattaaagaggatacaaacaaatggaagaacattccatgctcatgggtaggaagaatcaatattgtgaaaatggccatactgcccaaggtaatttatagattcaatgccatccccatcaagctaccaatgactttcttcacagaattggaaaaaactactttaaagttcatatggaaccaaaaaagagcccacatcgccaagtcaatcctaagccaaaagaacaaagctggaggcatcatgctacctgacttcaaactataccacaaggctacagtaaccaaaacagcatggtactggtaccaaaacagagatatagatcaatga

SEQ ID NO: 23146 - DNA, 2079 bp, Homo sapiens; identical to SEQ ID NO: 21590
  SIMILAR (235)..(1350): 941254mologous to Cloning vector pBACe3.6 levansucrase,accession number U80929,Smith-Waterman Score=1860.

SEQ ID NO: 23147 - DNA, 1257 bp, Homo sapiens
  SIMILAR (1251)..(616): 991254mologous to Cloning vector pBACe3.6 levansucrase,accession number U80929,Smith-Waterman Score=1108.
ttagttgactgtcagctgtccttgctccaggatgctgtttttgacaacggatgttttattgcctttgatgttcattaagaagcttggcgcaaatgttgcctttttatcctcgaagaagcctctgtttgtcatgtagcttgtgataaccacattgttgcctttggcttgcggcactgcgaagtgagagtaagtgaatgtcacatcgtttggatcaagacccatttgcagcacaagccctgttttgttcagcggcttgtaagggccggttaaagagtttgatacataaccaagcatgtaaatatcgtttgagttaataccatcgatcgtcatttttgaaccgcgtgaatcagtgaacaagtaccatttgccgttcattttgaaaacattcgcgcgctcgatttcatcagttaccgtgtttgaagtgatcagcggcttcattacttttttcaatgtgtaatcattatttaactctatgataccgagggcgccgttcgctaactcagcatcgcgttttttagcgctctgctgaagcttctggctttctttacggaagaagttcgtgccgccgccgtagtactgctttgttaaataaaagattcttcgcaatagtatccgtttcactccgttgattttgagtgtgtcatcagattttgacacatttacctgcgctgttgtcaggctttgtttgccgtaatgtttaccggaatagtcagtgtagaataaacggatttttccgtcagatgtaaaggttgcagaaccggaccattcttgcgtctgatctttcaggatcggatcgttggcgtcgaacttatcgctgtctttaaagacacggcccgcgtttttccagctgtcgattgagttgtcgccgaccttttgataaaacatgtagattgatgtgtcatcagcgtctttcgggcttcccgcaagagcaaacacaacgtgatagccgttgtattcagctactgttccgtcagcgttttgcagcggccagctgtcccacacatcaagtccttttgcagactcaatatttttaatcgttgattgatcgaattgaggcacttggtatttttcgttttgctgctgtttagggatctgcagcatatcatggcgtgtaatatgagagacgccgtacgtttctttgtatgctttttggttattttctttcgcgaaggcttgagtcgctcctcctgccagaagtgcagtcgtaaaagtcagaactgtggcttgttttacaatttttttgatgttcatgttcat

SEQ ID NO: 23148 - DNA, 1188 bp, Homo sapiens; identical to SEQ ID NO: 4283
  SIMILAR (977)..(1015): 1001254mologous to Cloning vector pSacBII SacB,accession number U09128,Smith-Waterman Score=63.

SEQ ID NO: 23149 - DNA, 3621 bp, Homo sapiens; identical to SEQ ID NO: 18439
  SIMILAR (1)..(3093): 991254mologous to Homo sapiens unknown,accession number AF148856,Smith-Waterman Score=5336.

SEQ ID NO: 23150 - DNA, 3288 bp, Homo sapiens; identical to SEQ ID NO: 13199
  SIMILAR (1419)..(4): 991254mologous to Cloning vector pBACe3.6 levansucrase,accession number U80929,Smith-Waterman Score=2463.

SEQ ID NO: 23151 - DNA, 2559 bp, Homo sapiens; identical to SEQ ID NO: 14248
  SIMILAR (2)..(49): 751254mologous to Homo sapiens putative p150,accession number U93568,Smith-Waterman Score=67.

SEQ ID NO: 23152 - DNA, 3090 bp, Homo sapiens; identical to SEQ ID NO: 7047
  SIMILAR (547)..(2625): 961254mologous to Homo sapiens putative p150,accession number U93567,Smith-Waterman Score=3410.

SEQ ID NO: 23153 - DNA, 1866 bp, Homo sapiens; identical to SEQ ID NO: 21818
  SIMILAR (1763)..(1855): 521254mologous to Cloning vector pBACe3.6 levansucrase,accession number U80929,Smith-Waterman Score=73.
  misc_feature (1)...(1866): n = a,t,c or g

SEQ ID NO: 23154 - DNA, 1690 bp, Homo sapiens; identical to SEQ ID NO: 21596
  SIMILAR (272)..(1687): 991254mologous to Cloning vector pBACe3.6 levansucrase,accession number U80929,Smith-Waterman Score=2463.

SEQ ID NO: 23155 - DNA, 3274 bp, Homo sapiens; identical to SEQ ID NO: 18443
  SIMILAR (1)..(3096): 971254mologous to Homo sapiens unknown,accession number AF149422,Smith-Waterman Score=5241.

SEQ ID NO: 23156 - DNA, 3255 bp, Homo sapiens; identical to SEQ ID NO: 14893
  SIMILAR (1)..(3093): 991254mologous to Homo sapiens unknown,accession number AF148856,Smith-Waterman Score=5349.

SEQ ID NO: 23157 - DNA, 3927 bp, Homo sapiens; identical to SEQ ID NO: 17623
  SIMILAR (1)..(2958): 991254mologous to Homo sapiens unknown,accession number AF149422,Smith-Waterman Score=5110.

SEQ ID NO: 23158 - DNA, 3139 bp, Homo sapiens; identical to SEQ ID NO: 17177
  SIMILAR (1)..(2961): 981254mologous to Homo sapiens unknown,accession number AF149422,Smith-Waterman Score=5090.

SEQ ID NO: 23159 - DNA, 3213 bp, Homo sapiens; identical to SEQ ID NO: 2322
  SIMILAR (1)..(1821): 851254mologous to Homo sapiens putative p150,accession number U93563,Smith-Waterman Score=2589.

SEQ ID NO: 23160 - DNA, 3156 bp, Homo sapiens; identical to SEQ ID NO: 10078
  SIMILAR (1)..(3036): 941254mologous to Homo sapiens putative p150,accession number U93563,Smith-Waterman Score=4979.

SEQ ID NO: 23161 - DNA, 3325 bp, Homo sapiens; identical to SEQ ID NO: 10079
  SIMILAR (1)..(3156): 951254mologous to Homo sapiens putative p150,accession number U93565,Smith-Waterman Score=5296.

SEQ ID NO: 23162 - DNA, 3145 bp, Homo sapiens; identical to SEQ ID NO: 17181
  SIMILAR (1)..(2958): 971254mologous to Homo sapiens unknown,accession number AF148856,Smith-Waterman Score=5040.

SEQ ID NO: 23163 - DNA, 1629 bp, Homo sapiens; identical to SEQ ID NO: 21826
  SIMILAR (1368)..(4): 951254mologous to Cloning vector pBACe3.6 levansucrase,accession number U80929,Smith-Waterman Score=2276.

SEQ ID NO: 23164 - DNA, 3352 bp, Homo sapiens; identical to SEQ ID NO: 14901
  SIMILAR (1)..(2748): 971254mologous to Homo sapiens unknown,accession number AF149422,Smith-Waterman Score=4641.

SEQ ID NO: 23165 - DNA, 2682 bp, Homo sapiens; identical to SEQ ID NO: 7158
  SIMILAR (1264)..(2679): 1001254mologous to Cloning vector pBACe3.6 levansucrase,accession number U80929,Smith-Waterman Score=2482.

SEQ ID NO: 23166 - DNA, 1794 bp, Homo sapiens
  SIMILAR (930)..(4): 991254mologous to Cloning vector pBACe3.6 levansucrase,accession number U80929,Smith-Waterman Score=1610.
ttagttgactgtcagctgtccttgctccaggatgctgtttttgacaacggatgttttattgcctttgatgttcattaagaagcttggcgcaaatgttgcctttttatcctcgaagaagcctctgtttgtcatgtagcttgtgataaccacattgttgcctttggcttgcggcactgcgaagtgagagtaagtgaatgtcacatcgtttggatcaagacccatttgcagcacaagccctgttttgttcagcggcttgtaagggccggttaaagagtttgatacataaccaagcatgtaaatatcgtttgagttaataccatcgatcgtcatttttgaaccgcgtgaatcagtgaacaagtaccatttgccgttcattttgaaaacattcgcgcgctcgatttcatcagttaccgtgtttgaagtgatcagcggcttcattacttttttcaatgtgtaatcattatttaactctatgataccgagggcgccgttcgctaactcagcatcgcgttttttagcgctctgctgaagcttctggctttctttacggaagaagttcgtgccgccgccgtagtacgctttgttaaataaagattcttcgccttggtatccgttttctgttcccgtgttggcttcgaatacaaggtatttatggcctttgtcttcaacgtagtgagggtctctcagcgtatggttgtcgccggatgtataattgccttcatcgataaactgctgaacgttctgatatgtttttccgtctccgtcaaaaatcgttttgtgatcttccactccgttgattttgagtgtgtcatcagattttgacacatttacctgcgctgttgtcaggctttgtttgccgtaatgtttaccggaatagtcagtgtagaataaacggatttttccgtcagatgtaaaggtgcagtaaccggacctaacttcatctgattgtggagcatggactgtataagccattacccttaccacaaacattaaatgcaaacattctgtatcatctaaataatgcaaattaactgccatgttcctcaatttaacattaacataatttgattcaagacttacgatactgacacagggattcgtataaacgcatggcatacggattggtgatttcttttgtttcactaagccgaaactgcgtaaaccggttctgtaacccgataaagaagggaatgagatatgggttgatatgtacactgtaagccctctggatggactgtgcgcacgtttgataaaccaaggaaaagattcatagcctttttcatcgccggcatcctcttcagggcgataaaaaaccacttccttccccgcgaaactcttcaatgcctgccgtatatccttactggcttccgcagaggtcaatccgaatatttcagcatatttagcaacatggatctcgcagataccgtcatgttcctgtagggtgccatcagattttctgatctggtcaacgaacagatacagcatacgtttttgatcccgggagagactatatgccgcctcagtgaggtcgtttgactggacgattcgcgggctatttttacgtttcttgtgattgataaccgctgtttccgccatgacagatccatgtgaagtgtgacaagtttttagattgtcacatggctgtaaaaggacagaccacatcatggttctgtgttcattaggttgttctgtccatgctgacataatccgctccacttcaacgtaacaccgcacgaagatttctattgttcctgaaggcatattcaaatcgttttcgttaccgcttgcaggcat

SEQ ID NO: 23167 - DNA, 3303 bp, Homo sapiens; identical to SEQ ID NO: 10101
  SIMILAR (1)..(3156): 961254mologous to Homo sapiens putative p150,accession number U93565,Smith-Waterman Score=5371.

SEQ ID NO: 23168 - DNA, 3095 bp, Homo sapiens; identical to SEQ ID NO: 14743
  SIMILAR (1)..(2958): 961254mologous to Homo sapiens putative p150,accession number U93563,Smith-Waterman Score=4954.

SEQ ID NO: 23169 - DNA, 2678 bp, Homo sapiens; identical to SEQ ID NO: 18459
  SIMILAR (248)..(2326): 961254mologous to Homo sapiens putative p150,accession number U93563,Smith-Waterman Score=3410.

SEQ ID NO: 23170 - DNA, 3507 bp, Homo sapiens; identical to SEQ ID NO: 14588
  SIMILAR (1)..(3249): 981254mologous to Homo sapiens unknown,accession number AF148856,Smith-Waterman Score=5590.

SEQ ID NO: 23171 - DNA, 2373 bp, Homo sapiens; identical to SEQ ID NO: 18464
  SIMILAR (196)..(2298): 971254mologous to Homo sapiens putative p150,accession number U93567,Smith-Waterman Score=3519.

SEQ ID NO: 23172 - DNA, 3813 bp, Homo sapiens; identical to SEQ ID NO: 14516
  SIMILAR (1)..(3135): 971254mologous to Homo sapiens unknown,accession number AF148856,Smith-Waterman Score=5279.

SEQ ID NO: 23173 - DNA, 1218 bp, Homo sapiens
  SIMILAR (451)..(1215): 871254mologous to Cloning vector pBACe3.6 levansucrase,accession number U80929,Smith-Waterman Score=1127.
atgaacatgaacatcaaaaaaattgtaaaacaagccacagttctgacttttacgactgcacttctggcaggaggagcgactcaagccttcgcgaaagaaaataaccaaaaagcatacaaagaaacgtacggcgtctctcatattacacgccatgatatgctgcagatccctaaacagcagcaaaacgaaaaataccaagtgcctcaattcgatcaatcaacgattaaaaatattgagtctgcaaaaggacttgatgtgtgggacagctggccgctgcaaaacgctgacggaacagtagctgaatacaacggctatcacgttgtgtttgctcttgcgggaagcccgaaagacgctgatgacacatcaatctacatgttttatcaaaaggtcggcgacaactcaatcgacagctggaaaaacgcgggccgtgtctttaaagacagcgataagttcgacgccaacgatccgatcctgaaagatcagacgcaagaatggtccggttctgcaacctttacatctgacggaaaaatccgtttattctacactgactattccgacaaaggccataaataccttgtattcgaagccaacacgggaacagaaaacggataccaaggcgaagaatctttatttaacaaagcgtactacggcggcggcacgaacttcttccgtaaagaaagccagaagcttcagcagagcgctaaaaaacgcgatgctgagttagcgaacggcgccctcggtatcatagagttaaataatgattacacattgaaaaaagtaatgaagccgctgatcacttcaaacacggtaactgatgaaatcgagcgcgcgaatgttttcaaaatgaacggcaaatggtacttgttcactgattcacgcggttcaaaaatgacgatcgatggtattaactcaaacgatattaacatgcttggttatgtatcaaactctttaaccggcccttacaagccgctgaacaaaacagggcttgtgctgcaaatgggtcttgatccaaacgatgtgacattaactaactctcacttcgcagtgccgcaagccaaaggcaacaatgtggttatcacaagctacatgacaaacagaggcttcttcgaggataaaaaggcaacatttgcgccaagcttcttaatgaacatcaaaggcaataaaacatccgttgtcaaaaacagcatcctggagcaaggacagctaacagtcaactaa

SEQ ID NO: 23174 - DNA, 4542 bp, Homo sapiens; identical to SEQ ID NO: 12694
  SIMILAR (328)..(2418): 941254mologous to Homo sapiens putative p150,accession number U93563,Smith-Waterman Score=3389.

SEQ ID NO: 23175 - DNA, 3229 bp, Homo sapiens; identical to SEQ ID NO: 14519
  SIMILAR (1)..(3003): 971254mologous to Homo sapiens unknown,accession number AF149422,Smith-Waterman Score=5062.

SEQ ID NO: 23176 - DNA, 3552 bp, Homo sapiens; identical to SEQ ID NO: 12501
  SIMILAR (1)..(2979): 941254mologous to Homo sapiens putative p150,accession number U93563,Smith-Waterman Score=4870.

SEQ ID NO: 23177 - DNA, 3139 bp, Homo sapiens; identical to SEQ ID NO: 18478
  SIMILAR (226)..(3027): 951254mologous to Homo sapiens putative p150,accession number U93565,Smith-Waterman Score=4631.

SEQ ID NO: 23178 - DNA, 3057 bp, Homo sapiens; identical to SEQ ID NO: 7870
  SIMILAR (712)..(2940): 971254mologous to Homo sapiens putative p150,accession number U93568,Smith-Waterman Score=3707.
  misc_feature (1)...(3057): n = a,t,c or g

SEQ ID NO: 23179 - DNA, 3267 bp, Homo sapiens
  SIMILAR (712)..(2112): 981254mologous to Homo sapiens putative p150,accession number U93572,Smith-Waterman Score=2372.
atggggaaaaaacagaacagaaaaactggaaactctaaaacgcagagcgcctctcctcctccaaaggaacgcagttcctcaccagcaacggaacaaagctggatggagaatgattttgacgagctgagagaagaaggcttcagacgatcaaattactctgagctacgggaggacattcaaaccaaaggcaaagaagttgaaaactttgaaaaaaatttagaagaatgtataactagaataaccaatacagagaagtgcttaaaggagctgatggagctgaaaaccaaggctcgagaactacgtgaagaatgcagaagcctcaggagccgatgcgatcaactggaagaaagggtatcagcaatggaagatgaaatgaatgaaatgaagcgagaagggaagtttagagaaaaaagaataaaaagaaatgagcaaagcctccaagaaatatgggactatgtgaaaagaccaaatctacgtctgattggtgtacctgaaagtgatgtggagaatggaaccaagttggaaaacactctgcgggatattatccaggagaacttccccaatctagcaaggcaggccaacgttcagattcaggaaatacagagaacgccacaaagatactcctcgagaagagcaactccaagacacataattgtcagattcaccaaagttgaaatgaaggaaaaaatgttaagggcagccagagagaaagacagatcaacgagacagaaagtcaacaaggatacccaggaattgaactcagctctgcaccaagcggacctaatagacatctacagaactctccaccccaaatcaacagaatatacatttttttcagcaccacaccacacctattccaaaattgaccacatagttggaagtaaaactctcctcagcaaatgtaaaagaacagaaattataacaaactatctctcagaccacagtgcaatcaaactagaactcaggattaagaatctcactcaaagccgctcaactacatggaaactgaacaacctgctcctgaatgactactgggtacataacgaaatgaaggcagaaataaagatgttctttgaaaccaacgagaacaaagacaccacataccagaatctctgggacgcattcaaagcagtgtgtagagggaaatttatagcactaaatgcctacaagagaaagcaggaaagatccaaaattgacaccctaacatctcaattaaaagaactagaaaagcaagagcaaacacattcaaaagctagcagaaggcaagaaataactaaaatcagagcagaactgaaggaaatagagacacaaaaaacccttcaaaaaatcaatgaatccaggagctggttttttgaaaggatcaacaaaattgatagaccgctagcaagactaataaagaataaaagagagaagaatcaaatagacacaataaaaaatgataaaggggatatcaccaccaatcccacagaaatacaaactaccatcagagaatactacaaacacctctatgcaaataaactagaaaatctagaagaaatggatacattcctcgacacatacactctcccaagactaaaccaggaagaagttgaatctctgaatagaccaataacaggctctgaaattgtggcaataatcaatagtttaccaaccaaaaagagtccaggaccagatggattcacagccgaattctaccagaggtacaaggaggaactggtaccattccttctgaaactattccaatcaatagaaaaagagggaatcctccctaactcattttatgaggccagcatcattctgataccaaagccgggcagagacacaaccaaaaaagagaattttagaccaatatccttgatgaacattgatgcaaaaatcctcaataaaatactggcaaaccgaatccagcagcacatcaaaaagcttatccaccatgatcaagtgggcttcatccctgggatgcaaggctggttcaatatacacaaatcaataaatgtaatccagcatataaacagagccaaagacaaaaaccacatgattatctcaatagatgaagaaaaagcctttgacaaaattcaacaacccttcatgctaaaaactctcaataaattagagaataaaatacctaggaatccaacttacaagggatgtgaaggacctcttcaaggagaactacaaaccactgctcaaggaaataaaagaggacacaaacaaatggaagaacattccatgctcatgggtaggaagaatcaatatcatgaaaatggccatactgcccaaggtaattatagattcaatgccatccccatcaagctaccaatgactttcttcacagaattggaaaaaactactttaaagttcatatggaaccaaaaaagagcccgcatcgccaagtcaatcctaagccaaaagaacaaagctggaggcatcacactacctgacttcaaactatactacaaggctacagtaaccaaaacagcatggtactggtaccaaaacagagatatagatcaatggaacagaacagagccctcagaaataatgccgcatatctacaactatctgatctttgacaaccctgagaaaaacaagcaatggggaaaggattccctatttaataaatggtgctgggaaaactggctagccatatgtagaaagctgaaactggatcccttccttacaccttatacaaaaatcaattcaagatggattaaagatttaaacgttagacctaaaaccataaaaaccctagaagaaaacctaggcattaccattcaggacataggcatgggcaaggacttcatgtccaaaacaccaaaagcaatggcaacaaaagccaaaattgacaaatgggatctaattaaactaaagagcttctgcacagcaaaagaaactaccatcagagtgaacaggcaacctacaacatgggagaaaattttcacaacctactcatctgacaaagggctaatatccagaatctacaatgaactcaaacaaatttacaagaaaaaaacaaagaaccccatcaaaaagtgggcgaaggacatgaacagacacttctcaaaagaagacatttatgcagccaaaaaacacatgaaaaaatgctcatcatcactggccatcagagaaatgcaaatcaaaaccactatgagatatcatctcacaccagttagaatggcaatcattaaaaagtcaggaaacaacagaggatctgaagcccagatcaatgctgtcttggtgcttcggacccagcctcatattgagtga

SEQ ID NO: 23180 - DNA, 1921 bp, Homo sapiens
  SIMILAR (1572)..(1841): 671254mologous to Homo sapiens putative p150,accession number U93563,Smith-Waterman Score=295.
atggtaaagggatcaattcaacaagaagagctaactatcctaaatacatatgcagcccatacaggagcaccaagactcataaagcaagtcctgagtgacctacaaagagacttagactcccacacaataataatgggagactttaacaccccactgtcaacattagacagatcaacgagacagaaagttaacaaggatacccaggaattgaagtcagctctgcaccaagcggacctaacagacatctacagaactctccaccacaaatcaacagaatatacatttttttcagcaccacaccacatctattccaaaattgaccacatactgggaagtaaagctctcctcagcaaatgtaaaagaacagaaattataacaaactatctctcagaccacagtgcaatcaaactagaactctggattaagaatctcactcaaaaccactcaactacatgggaactgaacaacctgctcctgaatgactactgggtacataacgaaatgaaggcagaaataaagatgttctttgaaaccaatgagaacaaagacacaacataccataatctctgggacacattcaaagcagtgtgtagagggaaatttataccactaaatgcccacaagagaaagcaggaaagatccaaaattgacaccctaacatcacaattaaaagaactagaaaagcaagagcaaacaaacacattcaaaagctagcagaaggcaagaaataactaaaatcagagcagaactgaaggaaatagagacacaaaaaaccctctaaaaaattaatgaatccaggagctggttttttgaaaggatcaacaaaattgatagactgctagcaagactaataaagaaaaaaagagagaagaatcaaatagatgcaataaaaaatgataaaggagatatcaccaccgatcccacagaaatacaaactaccatcagagaatactgcaaacacctctatgcaaataaactagaaaatctagaagaaatggataaattcctggacacatacactctcccaagactaaaccaggaagaagttgaatctctgaatagaccaataacaggagctgaaattgtggcaataatcaatagcttaccaaccaaaaagagtccaggaccagatggattcacagccaaattctaccagaggtacaaggaggaactggtaccattccttctgaaactattccaatcaatagaaaaagagggaatcctccctaactcattttatgaggccagcatcattctgataccaaagccaggaagagacacaacaaaaaaagagaattttagaccaatatccttgatgaacattgatgcaaaaatcctcaataaaaaactggcaaaacgaatccagcaacacatcaaaaagcttatccaccatgatcaagtgggcttcatccctggaatgcaaggctggttcaatatacgcaaatcaataaatgtaatccagcatataaacagagccaaagacaaaaaccatatgattatctcaatagatgcagaaaaagcctttgacaaaattcaacaacccttcatgctaaaaactctcaataaattagagaataaaatacctaggaatccaccttacaagggatgtgaaggacctcttcaaggagaactacaaaccactgctcaaggaaataaaagaggatacaaacaaatggaagaacattccatgctcatgggtaggaagaatcaatatcgtgaaaatggccatactgcccaagatgtgcctctaaaggaggtggactccactctgtttactgacagcagcagcttccttgaacagggagtaggaaaggctggtgcagccgttactatggagacagatgtactgtgggcccaggcactgccggcaggtacctcagcacagaaggctgaattggtcaccttcactcaggctctctga

SEQ ID NO: 23181 - DNA, 2907 bp, Homo sapiens; identical to SEQ ID NO: 6251
  SIMILAR (1)..(1632): 941254mologous to Homo sapiens putative p150,accession number U93563,Smith-Waterman Score=2643.

SEQ ID NO: 23182 - DNA, 1281 bp, Homo sapiens; identical to SEQ ID NO: 4279
  SIMILAR (7)..(1158): 961254mologous to Cloning vector pBACe3.6 levansucrase,accession number U80929,Smith-Waterman Score=1948.

SEQ ID NO: 23183 - DNA, 3348 bp, Homo sapiens; identical to SEQ ID NO: 6075
  SIMILAR (1)..(2973): 951254mologous to Homo sapiens putative p150,accession number U93563,Smith-Waterman Score=4940.

SEQ ID NO: 23184 - DNA, 3369 bp, Homo sapiens
  SIMILAR (660)..(752): 741254mologous to Homo sapiens putative p150,accession number U93570,Smith-Waterman Score=122.
atggaggaagatctaccaagcaaatggaaaacaaaaaaaggcaggggttgcaatcctagtctctgataaaacagactttaaaccaacaaagatcaaaagagacaaagaaggccattacataatggtaaagggatcaattcaacaagaagagctaactatcctaaatatatatgcacccaatacaggagcacccacattcatacagcaagtcctgagtgatctacaaagagacttagactcccacacattaataataggagactttaacaccccactgtcaacatcagacagatcaacgagacagaaagtcaacaaggatacccaggaattgaactcagctctgcaccaagcagacctaatagacatctacagaaccctccaccccaaatcaacagaatatacatttttttcagcaccacaccacacctattccaaaattgaccacatacttggaagtaaagcactcctcagcaaatgtaaaagaacagaaattataacaaactatctctcagaccacagtgcaatcaaactagaactcatgattaagaatctcactcaaaaccactcaaccatatggaaactgaacaacctgctcctgaatgactactgggtacataaggaaatgaaggcagaaataaagatgttctttgaaaccaacgagaacaaagacacaacataaccagaatctctgggacacattcaaagcagtgtgtagagggaaatttatagcactaaatgcccacaagaggaaagcaggaaagatccaaaattgacaccctaacatcacaattaaaagaactagaaaagcaagagcaaacactttcaaaagctagcagaaggcaagaaataactaaaatcagagcagaactgaaggaaatagagacacaaaaaacccttcaaaaaattaacgaatccaggagcaggttttttgaaaggatcaacaaaattgatagcctgctagcaagactaataaagaaaaaaagagagaagaatcaaatagatgcaataaaaaatgataaaggggatatcaccaccaatcccacagaaatacaaactaccatcagagaatactacaaacacctctacgcaaataaactagaaaatctagaagaaatggataaattcctcgacacatacactctcccaagactaaaccaggaagaagttgaatctctgaatagaccaataacgggagctgaaattgtggcaataatcaatagcttaccaaccaaaaagagtccaggaccagatggattcacagccgaattctaccagaggtacaaggaggaacaggtaccattccttctgaaactattccaatcaatagaaaaagagggaatcctccctaactcattttatgtgtccagcatcatcctgataccaaagccgggcagagacacaaccaaaagagagaattttagaccaatatccttgatgaacattgatgcaaaaatcctcaataaaatactggcaaaccgaatccagcagcacatcaaaaagcttatccaccatgatcaagtgggcttcatccctgggatgcaaggctggttcaatatatgcaaatcaataaatgtaatccagcatataaacagaaccaaagacaaaaaccacatgattatctcaatagatgcagaaaaggcctttgacaaaattcaacaacctttcatgctaaaaactctcaataaattagtgttggaagttctggccagggcaattaggcaggagaaggaaataaagggtattcaattaggaaaagaggaagtcaaattgtccctgtttgcagacgacatgattgtatatctagaaaaccccattgtctcagcccaaaatctccttaagctgataagcaacttcagcaaagtctcaggatacaaaatcaatgtacaaaaatcacaagcattcttatacaccaacaacagacaaacagagagccaaatcatgagtgaactcccattcacaattgcttcaaagagaataaaatacctaggaatccaacttacaagggatgtgaaggacctcttcaaggagaactacaaaccactgctcaaggaaataaaagaggatacaaacaaatggaagaacattccatgctcatgggtaggaagaatcaatatcgtgaaaatggccatactgcccaaggtaatttatagattcaatgccatccccatcaagctaccaatgactttcttcacagaattgggaaaaactgctttaaagttcatatggaaccaaaaaagagcccgcatcaccaagtcaatcctgagccaaaagaacaaagctggaggcatcacactacctgacttccaactatactgcaaggctacagtaaccaagacagcatggttccctagtggggatgtgggtttggaggcagacttttctccctctcacacattgaaaactcagtttttcagctgccttgcagagtttgcagcggcaagctgcttctttcaaaggatgaatgggtttggcatggccatgactactacgtacagcacgggggctgctgagtctcctctaccaagctgttccattgaccagggagatgacaccaagctccaccgagcacgcagccctggccgcaccttccctgctgcagctggcatccccgcagcagctgctccagatgggccaccactatcacttctgcataaactatggttcccagtggaattaggaggaagagctcttccccgagcagaggaatcacatggtgaggtcgcagctttaggggtgatggttgtagctcagggtgggaaaaaccagggagaagaggccaggtccactccatggctccgaccaacctcacatctgcccccgtgttcctcctcctcggcctggtggacggaacagacagacgcccacccgctgctgttcctgctctgccttggcatctatctgctcaacgccctgagcaacctgagcatggtggcgctggtgagatctgacggggccctccgctcccccatgtattacttcttgggtcacctgagcctcgtggacgtctgctttaccaccgtcacggtccccaggctgctggccggcctgctccacccgggccaggccatatccttccaggcgtgctttgccgagatgtacttcttcgtggctctgggcatcaccgagagctacctcccggcggccatgtcctacgaccgcgcgacggcggcgtgccggcccctgcgctacggcgcgctggtgacgccatgggcgctgcgcctcgctgcccgctacgaccgcctggccagcgtggtctacgctgtcatcacgccgaccttgaaccctttcatcaacagccttcgcaacaaagaggtcaagggcgccctgaaaagggggctcagatggagggctgcaccccaagaggcgtga

SEQ ID NO: 23185 - DNA, 2611 bp, Homo sapiens
  SIMILAR (2583)..(2609): 1001254mologous to Homo sapiens putative p150,accession number U93568,Smith-Waterman Score=44.
atgggagactttaacaccccactgtcaacattagacagatcaacgagacagaaagccaacaaggatacccaggaattgaactcagctctgcaccaagtggacctaatagacatctacagaactctccaccccaaatcaacagaatatacattcttttcagcaccacaccacacctattccacaactgaccacatacttggaagtaaagctctcctcagcaaatgtagaagaacagaaattataacaaactatctctcagaccacagtgcaatcaaactagaactcagaattaagaatctcactcaaaaccgctcaactacatggaaactgaacaacctcctcctgaatgactacggggtgcataatgaaatgaaggcagaaataaagatgttctttgaaaccaatgagaacaaagacacaacataccagaatctctgggacacattcaaagcagtgtgtagagggaaatttatagcactaaatgcccacaagagaaagcaggaaagatccaaaattgacaccctaacatcacaattaaaagaactagaaaagcaagagcaaacacattcaaaagctagcagaagacaagaaataactaaaatcagagcagaactgaaggaaatagagacacaaaaaacccttcaaaaaaatcaatgaatccaggagctggttttttgaaaggatcaacaaaattgatagaccactagcaagactaataaagaaaaaaagagagaagaatcaaatagatgcaataaaaaatgataaaggggatatcaccactgatcccacagaaatacaaactaccatcagagaatactacaaacacctctacgcaaataaactagaaaatctagaagaaatggataaattcctgcacacatacactctcccaagactaaaccaggaagaagttgaatctctgaatagaccaataacaggatctgaaattgtggcaataatcaatagcttaccaaccaaaaagagtccaggaccagatggattcacagccgaattcgaccagaggtacaaggaggaactggtaccattccttctgaaactattccaatcaatagaaaaagagggaatcctccctaactcattttatgaggccagcatcatcctgatacgaaagcctggcagagacacaaccaaaaaagagaattttagaccaatatccttgatgaacactgatgcaaaaatcctcaataaaatactggcaaaacgaatccagcagcacatcaaaaagcttatccaccatgatcaagtgggcttcatccctgggatgcaaggctggttcaatatacacaaatcaataaatgtaatccagcatataaacagagccaaagacaaaaaccacatgattatctccatagatgcagaaaaggcctttgacaaaattcaacaacccttcatgctaaaaactctcagtaaattaggtattgacgggacatatttcaaaataataagagctatctatgacaaacccacagccaatatcatactgaatgggcaaaaactggaagcattccctttgaaaactggcacaagacagggatgccctctctcaccactcctattcaacatagtgttggaagttctggccagggcaattaggcaggagaaggaaataaagctgataagcaacttcagcaaagtctcaggatacaaaatcaatgtacaaaaatcacaagcattcttatacaccaacaacagacaaacagagagccaaatcatgagtcaactcccattcacaattgcttcaaagagaataaaatacctaggaatccaacttacaagggatgtgaaggacctcttcaaggagaactacaaaccactgctcaaggaaataaaagaggatacaaacaaatggaagaacattccatgctcatgggtaggaagaatcaatatcatgaaaatggccatactgcccaaggtaatttacagattcaatgccatccccatcaagctaccaatgactttcttcacagaattggaaaaaactactttcaagttcatatggaaccaaaaaagagcccgcatcaccaagtcaatcctaagccaaaagaacaaagctggaggcatcacgctacctgacttcaaactatactacaaggctacagtaaccaaaacagcatggtactggtaccaaaacagagatatagatcaatggaacagaacagagccctcagaaataatgctgcatatctacaactatctgatctttgacaaacctgagaaaaacaagcaatggggaaaggattccctatttaataaatggtgctgggaaaactggctagccatatgtagaaagctgaaactggatcccttccttacaccttatacaaaaatcaattcaagatggattaaagatttaaacgttagacctaaaaccataaaaaccctagaagaaaacctaggcattaccattcaggacataggcataggcaaggacttcatgtccaaaacaccaaaagcaatggcaacaaaagccaaaattgacaaatgggatctaattaaactaaagagcttctgcacagcaaaagaaactaccatcagagtgaacagaaaacctacagagaggggagaaaattttcgcaacctactcatctga

SEQ ID NO: 23186 - DNA, 3099 bp, Homo sapiens; identical to SEQ ID NO: 13948
  SIMILAR (1)..(2922): 961254mologous to Homo sapiens unknown,accession number AF148856,Smith-Waterman Score=4909.

SEQ ID NO: 23187 - DNA, 3084 bp, Homo sapiens
  SIMILAR (2139)..(730): 1001254mologous to Cloning vector pBACe3.6 levansucrase,accession number U80929,Smith-Waterman Score=2472.
ctatccacgcccattgatgtactgccaaaaccgcatcaccatggtaatagcgatgactaatacgtagatgtactttctcttcttttttggaggagtagaatgttgagagtcagcagtagcctcatcatcactagatggcatttcttctgagcaaaacaggttttcctcattaaaggcattccaccactgctcccattcatcagttccataggttggaatcactcgaatacttctatctacttcgtcagaataagggtgtctaacagctacaatcgtgtcaaaatccttttgtccattcgaaactgcactaccaatcgcaatggcttctgcacaaacagttactcgtcctatatacgcttcaatatgtactgccgaaatgatttctcctgttttcgtacgaattgccgctcccacatgatgtttattatcctcataaagcattgtaatcttctctgtcgctacttctactaattctagatcttgttgagaaatgttaaatgttttcatatattcttcttcctccgatttctggttgctgactaattgagatgcatgctttgcatacttctgcctgctggggagcctggggactttccacaccctaactgacacacattccacagctagcgctatatgcgttgatgcaatttctatgcgcacccgttctcggagcactgtccgaccgctttggccgccgcccagtcctgctcgcttcgctacttggagccatgtcagctgtccttgctccaggatgctgtttttgacaacggatgttttattgcctttgatgttcattaagaagcttggcgcaaatgttgcctttttatcctcgaagaagcctctgtttgtcatgtagcttgtgataaccacattgttgcctttggcttgcggcactgcgaagtgagagtaagtgaatgtcacatcgtttggatcaagacccatttgcagcacaagccctgttttgttcagcggcttgtaagggccggttaaagagtttgatacataaccaagcatgtaaatatcgtttgagttaataccatcgatcgtcatttttgaaccgcgtgaatcagtgaacaagtaccatttgccgttcattttgaaaacattcgcgcgctcgatttcatcagttaccgtgtttgaagtgatcagcggcttcattacttttttcaatgtgtaatcattatttaactctatgataccgagggcgccgttcgctaactcagcatcgcgttttttagcgctctgctgaagcttctggctttctttacggaagaagttcgtgccgccgccgtagtacgctttgttaaataaagattcttcgccttggtatccgttttctgttcccgtgttggcttcgaatacaaggtatttatggcctttgtcttcaacgtagtgagggtctctcagcgtatggttgtcgccggatgtataattgccttcatcgataaactgctgaacgttctgatatgtttttccgtctccgtcaaaaatcgttttgtgatcttccactccgttgattttgagtgtgtcatcagattttgacacatttacctgcgctgttgtcaggctttgtttgccgtaatgtttaccggaatagtcagtgtagaataaacggatttttccgtcagatgtaaaggttgcagaaccggaccattcttgcgtctgatctttcaggatcggatcgttggcgtcgaacttatcgctgtctttaaagacacggcccgcgtttttccagctgtcgattgagttgtcgccgaccttttgataaaacatgtagattgatgtgtcatcagcgtctttcgggcttcccgcaagagcaaacacaacgtgatagccgttgtattcagctactgttccgtcagcgttttgcagcggccagctgtcccacacatcaagtccttttgcagactcaatatttttaatcgttgattgatcgaattgaggcacttggtatttttcgttttgctgctgtttagggatctgcagcatatcatggcgtgtaatatgagagacgccgtacgtttctttgtatgctttttggttattttctttcgcgaaggcttgagtcgctcctcctgccagaagtgcagtcgtaaaagtcagaactgtggcttgttttacaatttttttgatgttcatgttcatgtctccttctgtatgtactgttttttgcgatctgccgtttcgatcctcccgaattgactgagtagtagcaactacagtagctgtattgggtgcaggaagaactgacgttgctgtgagggaacccgaagtcactggagtctgcaatttaggttgactactgacaactgctggaggagtgacaagattggttgaagatactgtattcacaggagtttgaaaggatggtggtgcactctcgcttacatttcttttggactccagcatctgtctcactgtgcctgcatttctgtaagacatgttattattgctgttgacatcatttacagtttttcctggtgatactggtgggttgggtggatggatcactgatgtccccacagtcgcctcagttcccgccacggaacggcgggcgaaaagcagggcgggaatacgccggtaggaatacgcgggcacgtaacgcgtcacttccggtgctggcaggctcagcaatgagggcggggcggcggcgcgcgggcctctggaaccctgccggtccaccgaaggtcccgagcccgctatcttcgtaggtgcgggcctccggaggtgcaggtccctgtcctccttgtcctgcttcgtcgcagagcagaacgcgtgtgctttaagggcagagacatctgaagatgctttgccttgccctcttgaggacacgtggcttttacctctaatagtgtctgcgtgttgtggagagagaagaccatgcagttggtatttttcgttttgctgctgtttagggatctgcagcatatcatggcgtgtaatatgagagacgccgtacgtttctttgtatgctttttggttattttctttcgcgaaggcttgagtcgctcctcctgccagaagtgcagtcgtaaaagtcagaactgtggcttgttttacaatttttttgatgttcatgttcat

SEQ ID NO: 23188 - DNA, 2044 bp, Homo sapiens
  SIMILAR (1419)..(4): 1001254mologous to Cloning vector pBACe3.6 levansucrase,accession number U80929,Smith-Waterman Score=2482.
ttagttgactgtcagctgtccttgctccaggatgctgtttttgacaacggatgttttattgcctttgatgttcattaagaagcttggcgcaaatgttgcctttttatcctcgaagaagcctctgtttgtcatgtagcttgtgataaccacattgttgcctttggcttgcggcactgcgaagtgagagtaagtgaatgtcacatcgtttggatcaagacccatttgcagcacaagccctgttttgttcagcggcttgtaagggccggttaaagagtttgatacataaccaagcatgtaaatatcgtttgagttaataccatcgatcgtcatttttgaaccgcgtgaatcagtgaacaagtaccatttgccgttcattttgaaaacattcgcgcgctcgatttcatcagttaccgtgtttgaagtgatcagcggcttcattacttttttcaatgtgtaatcattatttaactctatgataccgagggcgccgttcgctaactcagcatcgcgttttttagcgctctgctgaagcttctggctttctttacggaagaagttcgtgccgccgccgtagtacgctttgttaaataaagattcttcgccttggtatccgttttctgttcccgtgttggcttcgaatacaaggtatttatggcctttgtcttcaacgtagtgagggtctctcagcgtatggttgtcgccggatgtataattgccttcatcgataaactgctgaacgttctgatatgtttttccgtctccgtcaaaaatcgttttgtgatcttccactccgttgattttgagtgtgtcatcagattttgacacatttacctgcgctgttgtcaggctttgtttgccgtaatgtttaccggaatagtcagtgtagaataaacggatttttccgtcagatgtaaaggttgcagaaccggaccattcttgcgtctgatctttcaggatcggatcgttggcgtcgaacttatcgctgtctttaaagacacggcccgcgtttttccagctgtcgattgagttgtcgccgaccttttgataaaacatgtagattgatgtgtcatcagcgtctttcgggcttcccgcaagagcaaacacaacgtgatagccgttgtattcagctactgttccgtcagcgttttgcagcggccagctgtcccacacatcaagtccttttgcagactcaatatttttaatcgttgattgatcgaattgaggcacttggtatttttcgttttgctgctgtttagggatctgcagcatatcatggcgtgtaatatgagagacgccgtacgtttctttgtatgctttttggttattttctttcgcgaaggcttgagtcgctcctcctgccagaagtgcagtcgtaaaagtcagaactgtggcttgttttacaatttttttgatgttcatgttcatgtctccttctgtatgtactgttttttgcgatctgccgtttcgatcctcccgaattgactagtgggtaggcctggcggccgcctggccgtcgacatttaggtgacagtgtgtgtggaagtggatgctcttgaggggtagtttctacagtcatggtgaccgccgtagagccctggtatgacttcggatgagagtgggttgtgccccaggtcacaccaggcaaatcagcaaaggcagaaagatctgcacaaattctggggttaaggtaaacacgtgtgacctcagaataatgcctacatagtgttctttccacccagtgctttggggagtcacagaaatggcagagggctgtggctttggctttctgtgctgctgaggggagaggaaggtgtgtctctgctggtgtagaagtgtaggggcaggtggtgaagttgtcagcaatgccacactggcgtaagagtgctatgatcgaaaggaactgctgctgctgtagccaaggcaactgtgttctgaggtctcctcctttctttccagatgccccttctgtctccttcaggcagaggttctgcaaagatccatctttgatgccttcttgtatctctgtataccctgtggcttccat

SEQ ID NO: 23189 - DNA, 5051 bp, Homo sapiens
  SIMILAR (1392)..(3938): 981254mologous to Homo sapiens putative p150,accession number U93563,Smith-Waterman Score=4325.
atggggaaaaaacagaacagaaaaactggaaactctaaaacgcagagtgcctctcctcctccaaaggaacgcagttcctcaccagcaacggaaaaaagctggatggagaatgactttgacgagctgagagaagaaggtttcagacgatcaaattactctgagctacgggaggacattcaaaccaaaggcaaagaagttgaaaactttgaaaaaaatttagaagaatgtataactagaataaccaatacagagaagtgcttaaaggagctgatggagctgaaaaccaaggctcgagaactacgtgaagaatgcagaagcctcaggagccgatgtgatcaactggaagaaagggtatcagcaatggaagatgaaatgaatgaaatgaagcgagaagggaagtttagagaaaaaagaataaaaagaaatgagcaaagcctccaagaaatatgggactatgtgaaaagaccaaatctacgtctgactggtgtacctgaaagtgacggggagaatggaaccaagttggaaaacactctgcaggatattatccaggagaacttccccaatctagcaaggcaggtcaatgttcagattcaggaaatacagagaacgccacaaagatactcctcgagaagagcaactccaagacacataattgtcagattcaccaaagttgaagtgaaggaaaaaatgttaagggcagccagagagaaaggtcgggttaccctcaaagggaagcccatcagactaacagcggatctctcggcagaaaccctacaagccagaagagagtgggggccaatattcaacattcttaaagaaaagaattttcaacccagaatttcatatccagccaaactaagcttcataagtgaaggagaaataaaacactttacagacaagcaaatgctgagagattttgtcaccaccaggcctgccctaaaagagctcctgaaggaagtgctaaacatggaaaggaacaaccagtaccagccgctgcaaaatcatgccaaaatacagatcaacgagacagaaagtcaacaaggatacccaggaattgaactcagctctgcaccaagcggacctaatagacatctacagaactctccacaccaaatcaacagaatatactttttttcagcaccacaccacacctattccaaaattgaccacatagttggaagtaaagctctcctcagcaaatgtaaaagaacagaaattataacaaactatctctcagaccacagtgcaatcaaactagaactcaggattaagaatctcaatcaaagccgctcaactacatggaaactgaacaacctgctcctgaatgactactgggtacataacgaaatgaaggcagaaataaagatgttctttgaaaccaaaagagaacaaaggacacaacataccagaatctctgggacgcattcaaagcagtgtgtagagggaaatttatagcactaaatgcgcacaagagaaagcaggaaagatctaaaattgacaccctaacatcacaattaaaagaactagaaaagcaagagcaaacacattcaaaagctagcagaaggcaagaaataactaaaatcagagcagaactgaaggaaatagagacacaaaaaacccttcaaaaaatcaatgaatccaggagctggttttttgaaaggatcaacaaaattgatagaccgctagcaagactaataaagaaaaaaagagaggagaatcaaatagacacaataaaaaatgataaaggggatatcaccaccgatcccacagaaatacaaactaccatcagagaatactacaaacacctctatgcaaataaactagaaaatctagaagaaatggataaattccttgacacatacactctcccaagactaaaccaggaagaagttgaatctctgaatagaccaataacaggagctgaaattgtggcaataatcaatagtttaccaaccaaaaagagtccaggaccagatggattcacagctgaattctaccagaggtacaaggaggaactggtaccattccttctgaaactattccaatcaatagaaaaagagggaatcctccctaactcattttatgaggccagcatcattctgataccaaagccgggcagagacacaaccaaaaaagagaattttagaccaatatccttgatgaacattgatgcaaaaatcctcaataaaatactggcaaaccgaatccagcagcacatcaaaaagcttatccaccatgatcaagtgggcttcatccctgggatgcaaggctggttcaatatacgcaaatcaataaatgtaatccagcatataaacagagccaaagacaaaaaccacatgattatctcaatagatgcagaaaaagcctttgacaaaattcaacaacccttcatgctaaaaactctcaataaattaggtattgatgggacgtatttcaaaataataagagctatctatgacaaacccacagccaatatcatactgaatgggaaaaaactggaagcattccctttgaaaactggcacaagacagggatgccctctctcactgctcctattcaacatagtgttggaagttctggccagggcaatcaggcaggagaaggaaataaagggtattcagttaggaaaagaggaagtcaaattgtccctgtttgcagacgacatgattgtttatctagaaaaccccatcgtctcagcccaaaatctccttaagctgataagcaacttcagcaaagtctcaggatacaaaatcaatgtacaaaaatcacaagcattcttatacaccaacaacagacaaacagagagccaaatcatgagtgaactcccattcacaattgcttcaaagagaataaaatacctaggaatccaacttacaagggatgtgaaggacctcttcaaggagaactacaaaccactgctcaaggaaataaaagaggatacaaacaaatggaagaacattccatgctcatgggtaggaagaatcaatatcgtgaaaatggccatactgcccaaggtaatttacagattcaatgccatccccatcaagctaccaatgactttcttcacagaattggaaaaaactactttaaagttcatatggaaccaaaaaagagcccgcatcgccaagtcaatcctaagccaaaagaacaaagctggaggcatcacactacctgacttcaaactatactacaaggctacagtaaccaaaacagcatggtactggtaccaaaacagagatatagatcaatggaacagaatagagccctcagaaataacgccgcatacctacaactatctgatctttgacaaacctgagaaaaacaagcaatggggaaaggattccctatttaataaatggtgctgggaaaactggctagccatatgtagaaaactgaaactggatcccttccttacaccttatacaaaaatcaattcaagatggattaaagatttaaacgttagacctaaaaccataaaaaccctagaagaaaacctaggcattaccattcaggacataggcgtgggcaaggacttcatgtccaaaacaccaaaagcaatggcaacaaaagccaaaattggcaaatggtacctaattaaactaaagagcttctgcacagcaaaagaaactaccatcagagtgaacaggcaacctacaacatgggagaaaattttcgcaacgtactcatctgacaaagggctaatatccagaatctacaatgaactcaaacaaatttacaagaaaaaaacaaacaaccccatcaaaaagtgggcgaaggacatgaacagacacttctcaaaagaagacatttatgcagccaaaaaatacgtgaaaaaatgctcatcatcactggccatcagagaaatgcaaatcaaaaccactatgagataccatctcacaccagttagaatggcaatcattaaaaagtcaggaaacaacagcaaaaagaacaaagctggaggaatcatgccagctgacttcaaactatactacaaggctatgggaacaaaaacagcatgggacatggatgaaactgaaaaccatcatgctcagcaaactaacacaagaacagaaaaacaaacaccacatgttctcactcataagtgggagttgaacaatgagaacacatggacacagggaggggaacatcctacactgggccttgtcatgcgtttcggggctagggaagggatagcattaggagaaatacctaatgtaaatggctggttgatagttatagcattagaaaatggaagaaggcagaaaattggtatcaaaaagtggggctgttgctataagaaatacctgcaaacatggaagcagttttggaaccaggtaatgggcagaggctggaaaaatttagaagagcaggctagtaaaagcctgtattgcagtgaatggggaaagaaggacaattttggagaggactcagaagaggagagctgtagggaaagtctgaatcttctcagtgattatttgcttggttgtaaccagaatatgagtagaaatatggacagtaaaggcctttctgatgaggtttcagatgcaaataaagaacctcatatcggaaactggacaaagaactccttggctgcttcagtgattattccagtgggctcaggttcagctcaaccctctgcttcagaatgtacaagcagtaagctttggcaatgtccatatgaaactaattttgcaggaatggagaatgcaagagttaagggggcttcttccaccttgattttaaggcccacagatgacctgtggacccaggaagaaaattaccgtagaatggagccaccacatagagggcctactggggaaatgctaagcaaaaaagcgaggttggagctgccacggagagtccacactagggcaatgcctagtggaatgatgggagtgagaccacctcagagaccaaacaactgcagggccaccagcttgcaactccaacctgtaagaacggctgcacaggctgagaccagtttcatcacaggggagaggtttcctgaggccttggaggttaaacactacaacagtgtttccaggatgtga

SEQ ID NO: 23190 - DNA, 2790 bp, Homo sapiens
  SIMILAR (1)..(1437): 951254mologous to Homo sapiens putative p150,accession number U93563,Smith-Waterman Score=2373.
atgggagactttaacatcccactgtcaacattagacagatcaacgagacagaaagtcaacaaggatacccaggaattgaactcagctctgcaccaagtggacctaatagacatctacagaactctccaccccaaatcaacagaatatacatttttttcagcactacaccacacctattccaaaattgaccacatacttggaagtaaagctctcctcagcaaatgtaaaagaacagaaattataacaaactatctctcagaccacagtgcaatcaaactagaactcaggattaagaatctcactcaaaactgctcaactacatggaaactgaacaacctgctcctgaatgactactgggtacataacgaaatgaaggcagaaatgaagatgttctttgaaaccaacgagaataaagacacaacataccagaatctctgggacgcattcaaagcagtgtgtagagggaaatttatagcactaaatgcccacaagagaaagcaggaaagatccaaaattgacaccctaacatcacaattaaaagaactagaaaagcaagagcaaacacattcaaaagctagcagaaggcaagaaataactaaaatcagagcagaactgaaggaaatagagacacaaaaaacccttcaaaaaattaatgaatccaggagctggttttttgaaaggatcaacaaaattgatagaccgctagcaagactaataaagaaaaaaagagagaagaatcaaatagacgcaataaaaaatgataaaggggatatcaccaccgatcccacagaaatacaaactaccatcagagaatactacaaacacctctacgcaaataaactagaaaatctagaagaaatggataaattccttgacacatacactctcccaagactaaaccaggaagaagttgaatctctgaatacaccaataacaggagctgaaattgtggcaataatcaatagtttaccaaccaaaaagagtccaggaccagatggattcacagccgaattctatcagaggtacaaggaggaactggtaccattccttctgaaactattccaatcaacagaaaaagagggaatcctccctaactcattttatgaggccagcatcattctgataccaaagccaggcagagacacaacaaaaaaagagaattttagaccaatatccttgatgaacattgatgcaaaaatcctcaataaaatactggcaaaacgaatccagcagcacatcaaaaagcttatccaccatgatcaagtgggcttcatccctgggatgcaaggctggttcaatatacgcaaatcaataaatgtaatccagcatataaacaagagccaaaacaaaaaccacatgattatctcaatagatgcagaaaaagcctttcacaaaattcaacaacccttcatgctaaaaactctcaataaattaggaggagcgactcaagccttcgcgaaagaaaataaccaaaaagcatacaaagaaacgtacggcgtctctcatattacacgccatgatatgctgcagatccctaaacagcagcaaaacgaaaaataccaagtgcctcaattcgatcaatcaacgattaaaaatattgagtctgcaaaaggacttgatgtgtgggacagctggccgctgcaaaacgctgacggaacagtagctgaatacaacggctatcacgttgtgtttgctcttgcgggaagcccgaaagacgctgatgacacatcaatctacatgttttatcaaaaggtcggcgacaactcaatcgacagctggaaaaacgcgggccgtgtctttaaagacagcgataagttcgacgccaacgatccgatcctgaaagatcagacgcaagaatggtccggttctgcaacctttacatctgacggaaaaatccgtttattctacactgactattccggtaaacattacggcaaacaaagcctgacaacagcgcaggtaaatgtgtcaaaatctgatgacacactcaaaatcaacggagtggaagatcacaaaacgatttttgacggagacggaaaaacatatcagaacgttcagcagtttatcgatgaaggcaattatacatccggcgacaaccatacgctgagagaccctcactacgttgaagacaaaggccataaataccttgtattcgaagccaacacgggaacagaaaacggataccaaggcgaagaatctttatttaacaaagcgtactacggcggcggcacgaacttcttccgtaaagaaagccagaagcttcagcagagcgctaaaaaacgcgatgctgagttagcgaacggcgccctcggtatcatagagttaaataatgattacacattgaaaaaagtaatgaagccgctgatcacttcaaacacggtaactgatgaaatcgagcgcgcgaatgttttcaaaatgaacggcaaatggtacttgttcactgattcacgcggttcaaaaatgacgatcgatggtattaactcaaacgatatttacatgcttggttatgtatcaaactctttaaccggcccttacaagccgctgaacaaaacagggcttgtgctgcaaatgggtcttgatccaaacgatgtgacattcacttactctcacttcgcagtgccgcaagccaaaggcaacaatgtggttatcacaagctacatgacaaacagaggcttcttcgaggataaaaaggcaacatttgcgccaagcttcttaatgaacatcaaaggcaataaaacatccgttgtcaaaaacagcatcctggagcaaggacagctgacagtcaactaa

SEQ ID NO: 23191 - DNA, 4607 bp, Homo sapiens
  SIMILAR (743)..(1522): 871254mologous to Cloning vector pBACe3.6 levansucrase,accession number U80929,Smith-Waterman Score=1201.
atgggcacagtgttcaccctgaggtttgatgacaatgtagacttagaagaccctgcttttttgggctctagaagaatccccaccaacgagaacaaagacacaacataccagaatctctgggacgcattgaaagcagtgtgtagagggaaatttatagcactaaatgcccacaagagaaagcaggaaagatccaaaattgacaccctaacatcacaattaaaagaactagaaaagcaagagcaaacacattcaaaagctagcagaaggcaagaaataactaaaatcagagcagaactgaaggaaatagagacacaaaaaacccttcaaaaaattaatgaatccaggagctggttttttgaaaggatcaacaaaattgatagacagctagcaagactaataaagaaaaaaagagagaagaataaaatagacgcaataaaaaatgatgaaggggatatcaccaccgatcccacagagatacaaactaccatcagagaatactacaaacacctctatgcaaataaactagaaaatctagaagaaatggataaattcctggacacatacactctcccaagactaaaccaggaagaagttgaatctctgaatagaccaataacaggagctgaaattgtggcaataatcaatagcttaccaaccaaaaagagtccaggaccagatggatccacagccaaattctaccagaagtacaaagaggaactggtcccacaaaaggctgtctgcaagtggaggagcaaagaaagccagtctgagcaaggaaagccagccttcccaaaactgaaaaacttggagtccgatgatcaagggcaggaagcatccagcatgggagaaagatcagcaaaacgaaaaataccaagtgcctcaattcgatcaatcaacgattaaaaatattgagtctgcaaaaggacttgatgtgtgggacagttggccgctgcaaaacgctgacggaacagtagctgaatacaacggctatcacgttgtgtttgctcttgcgggaagcccgaaagacgctgatgacacatcaatctacatgttttatcaaaaggtcggcgacaactcaatcgacagctggaaaaacgcgggccgtgtctttaaagacagcgataagttcgacgccaacgatccgatcctgaaagatcagacgcaagaatggtccggttctgcaacctttacatctgacggaaaaatccgtttattctacactgactattccggtaaacattacggcaaacaaagcctgacaacagcgcaggtaaatgtgtcaaaatctgatgacacactcaaaatcaacggagtggaagatcacaaaacgatttttgacggagacgcaaaaacatatcagaacgttcagcagtttatcgatgaaggcaattatacatccggcgacaaccatacgctgagagaccctcactacgttgaagacaaaggccataaataccttgtattcgaagccaacacgggaacagaaaacggataccaaggcgaagaatctttatttacaaagcggattgccagacaccctatacagcagcattcctactggcatcgagttggtgccctcgaggtcagagaccccagaggaaggagcaggcacccatctttgttgttctccagcctccttgggtgacatctccagctggccgctgcaaaacgctgacggaacagtagctgaatacaacggctatcacgttgtgtttgctcttgcgggaagcccgaaagacgctgatgacacatcaatctacatgttttatcaaaaggtcggcgacaactcaatcgacagctggaaaaacgcgggccgtgtctttaaagacagcgataagttcgacgccaacgatccgatcctgaaagatcagacgcaagaatggtccggttctgcaacctttacatctgacggaaaaatccgtttattctacactgactattccggtaaacattacggcaaacaaagcctgacaacagcgcaggtaaatgtgtcaaaatctgatgacacactcaaaatcaacggagtggaagatcacaaaacgatttttgacggagacggaaaaacatatcagaacgttcagcagtttatcgatgaaggcaattatacatccggcgacaaccatacgctgagagaccctcactacgttgaagacaaaggccataaataccttgtattcgaagccaacacgggaacagaaaacggataccaaggcgaagaatctttatttaacaaagcgtactacggcggcggcacgaacttcttccgtaaagaaagccagaagcttcagcagagcgctaaaaaacgcgatgctgagttagcgaacggcgccctcggtatcatagagttaaataatgattacacattgaaaaaagtaatgaagccgctgatcacttcaaacgcggtcggcgacaactcaatcgacagctggaaaaacgcgggccgtgtctttaaagacagcgataagttcgacgccaacgatccgatcctgaaagatcagacgcaagaatggtccggttctgcaacctttacatctgacggaaaaatccgtttattctacactgactattccggtaaacattacggcaaacaaagcctgacaacagcgcaggtaaatgtgtcaaaatctgatgacacactcaaaatcaacggagtggaagatcacaaaacgatttttgacggagacggaaaaacatatcagaacgttcagcagtttatcgatgaaggcaattatacatccggcgacaaccatacgctgagagaccctcactacgttgaagacaaaggccataaataccttgtattcgaagccaacacgggaacagaaaaaaaataccaaggcgaagaatctttatttaacaaagcgtactacggcggcggcacgaacttcttccgtaaagaaagccagaagcttcagcagagcgctaaaaaacgcgatgctgagttagcgaacggcgccctcggtgtgatctccattcctttgtacatccctcacacgctgttcgaatgggattttggaaaggaaatctgtgtattttggctcactactgactatctgttatgtacagcatctgtatataacattgtcctcatcagctatgatcgatacctgtcagtctcaaatgctatcctaaacagcagcaaagcgaaaaataccaagtgcctcaattcgatcaatcaacgattaaaaatattgagtctgcaaaaggacttgatgtgtggaacagctggccgctgcaaaccgctgacggaaccagtagctgaatacaacggctatcacgttgtgtttgctcttgcgggaagcccgaaagacgctgatgacacatcaatctacatgttttatcaaaaggtcggcgacaactcaatcgacagctggaaaaacgcgggccgtgtctttaaagacagcgataagttcgacgccaacgatccgatcctgaaagatcagacgcaagaatggtccggttctgcaacctttacatctgacggaaaaatccgtttattctacactgactattccggtaaacattacggcaaacaaagcctgacaacagcgcagatattccagatgattacagtttttattaccagcctctgcaacactacctccagccacatctgtctccacatcagctgggtcaccacaatgcacggcgccatgcctcatcccggccacatccccacagcccctgcttctttacctgccaaggtgaaaggttccgggaaggtctgctggctggccttccctttatcagaactcaccccccccagtgccttacaggtaaatgtgtcaaaatctgatgacacactcaaaatcaacggagtggaagatcacaaaacgatttttgacggagacggaaaaacatatcagaacgttcagcattttatcgatgaaggcaattatacatgcggcgacaaccatacgctgagagaccctcactacgttgaagacaaaggccataaataccttgtattcgaagccaacacgggaacagaaaacggataccaaggcgaagaatctttatttaacaaagcgtactacggcggcggcacgaacttcttccgtaaagaaagccagaagcttcagcagagcgctaaaaaacgcgatgctgagttagcgaacggcgccctcggtatcatagagttaaataatgattacacattgaaaaaagtaatgaagccgctgatcacttcaaacacggtaactgatgaaatcgagcgcgcgaatgttttcaaaatgaacggcaaatggtacttgttcactgattcacgcggttcaaaaatgacgatcgatggtattaactcaaacgatatttacatgcttggttatgtatcaaactctttaaccggcccttacaagccgctgaacaaaacagggcttgtgctgcaaatgggtcttgatccaaacgatgtgacattcacttactctcacttcgcagtgccgcaagccaaaggcaacaatgtggttatcacaagctacatgacaaacagaggcttcttcgaggataaaaaggcaacatttgcgccaagcttcttaatgaacatcaaaggcaataaaacatccgttgtcaaaaacagcatcctggagcaaggacagctgacagtcaactaa

SEQ ID NO: 23192 - DNA, 3640 bp, Homo sapiens; identical to SEQ ID NO: 18481
  SIMILAR (712)..(3522): 981254mologous to Homo sapiens putative p150,accession number U93563,Smith-Waterman Score=4815.

SEQ ID NO: 23193 - DNA, 3688 bp, Homo sapiens
  SIMILAR (2294)..(3685): 941254mologous to Homo sapiens putative p150,accession number U93564,Smith-Waterman Score=2295.
atgcacattgttgtagaaacagctctgtcagcttcatggcagaacaaggccaagcccccagctagggttctgcttcaggtggtccccaatgtgtggttccttgtggctgttgtgtgggaactgtatccatctttggatctcatggatcgttccatagaatgcagttcctcaccagcaacggaacaaagctggacagagaatgactatgacaagctgagagaagaaggcttcagacgatcaaattactctgagctacaggaggacattcaaaccaaaggcaaagatgttgaaaactttgaaaaaaatttagaagaatgtataactagaataactaatacacagaagtgcttaaaggagctgatggagctgaaaaccaaggctcgagaactacgtgaagaatgcagaagcctcaggagccgatgcgatcaactggaagaaagggtatcagtgatggaagatgaaatgaatgaaatgaagcaagaagggaagtttagagaaaaaagaataaaaagaaatgagcaaagcctccaagaaatatgggactatgtgaaaagaccaaatctacgtctgattggtgtacctgaaagtgatggggagaatggaaccaagttgaaaaacactctgcaggatattatccaggagaacttccccaatctagcaaggcaggccaaagttcagattcaggaaatacagagaatgccacaaagatattccttgacaagagcaactccaagacacataattgtcagattcaccaaagttgaaatgaaggaaaaaatgttaagggcagccagagagaaaggagcacccagattcataaagcaagtcctgagtgacctacaaagagacttagactcccacacattaataatgggagactttaacaccccactgtcaacattagacagatcaacgagacagaaagtcaacaaggatacccaggaattgaactcagctctgcaccaagtggacctaatagacatctacagaactctccaccccaaatcaacagaatacacatttttttcagcaccacaccacacgtattccaaaattgaccacatacttggaagtaaagctctcctcagcaaatgtaaaagaacagaaattataacaaactatctctcagaccacagtgcaatcaaactagaactcaggattaagaatctcactcaaaaccgctcaactacatggaaactgaacaacctgctcctgaatgactactgggtacataacgaaatgaagctagaaataaagatgttctttgaaaccaacgagaacaaagacacaacataccagaatctctgggacgcattcaaagcagtgtatagagggaaatttatagcactaaatgcccacaagagaaagcaggaaagatccaaaattgacaccctaacatcacaattaaaagaactagaaaagcaagagcaaacacattcaaaagctagcagaaggcaagaaataactaaaatcagagcagaactgaaggaaatagagacacaaaaaacccttcaaaaaattaatgaatccaggagctggttttttgaaaggatcaacaaaatagatagactgctagcaagactaataaagagaaaaagagagaagaatcaaatagatgcaataaaaaatgataaaggggacatcaccaccaatcccacagaaatacaaactaccatcagagaatactacaaacacctctacgcaaataaactagaaaatctagaagaaatggataaattcctcgacacatacactctcccaagactaaaccaggaagaagttgaatctctgaatagaccaataacaggatctgaaattgtggcaataatcaatagcttaccaacccaaaaaaagtccaggaccagatggattcacagccgaattccaccagaggtacaaggaggagctggtaccattccttctgaaactattccaatcaatagaaaaagagggaatcctccctaactcattctatgaggccagcatcatcctgataccaaagctgggcagagacacaaccaaaaaagagaattttagaccaatatccttgatgaacattgatgcaaaaatcctcaataaaatactggcaaaccgaatccagcaacacatcaaaaagcttatccaccatgatcaagtgggcttcatccctgggatgcaaggcaggttcaatatacgcaaatcaataaatgtaatccagcatataaacagaaccaaagacaaaaaccacatgattatctcaatagatgcagaaaaggcctttgacaaaattcaacaacccttcatgctaaaaactctcaataaattagtgttggaagttctggccagggcaatcaggcaggagaaggaaataaagggtattcaattaggaaaagaggaagtcaaattgtccctgtttgcagacgacatgattgtatatctagaaaacaccattgtctcagcccaaaatctccttaagctgataagcaacttcagcaaagtctcaggatacaaaatcaatgtacaaaaatcacaagcattcttatacacgaataacagacaaacagagagccaaatcatgagtgaactcccattcacaattgcttcaaagagaataaaatacctaggaaaccaacttacaagggatgtgaaggacctcttcaaggagaactacaaaccactgctcaaggaaataaaagaggatacaaacaaatggaagaacattccatgctcatgggtaggaagaatcaatatcgtgaaaatggccatactgcccaaggtaatttatagattcaatagcattcccatcaagctaccaatgcctttcttcacagaattggaaaaaactactttaaagttcatatggaaccaaaaaagagcccgcattgccaagtcaatcctaagccaaaagaacaaagctggaggcatcatgctgcctgacttcaaactatactaccagactacagtaaccaaaacagcatggtactggtaccaaaacagagatatagatcaatggaacagaacagagccctcagaaataacacctcatatctacaactatctgatctttgacaaacctgagaaaaacaagcaatggggaaaggattccctatttaataaatggtgctgggaagactggctacccatatgtggaaagctgaaactggatcccttccttacaccttatacaaaaattaattcaagatggattaaagacttaaacgttagacctaaaaccataaaaaccctagaagaaaacctaggcattaccattcaggacataagcatgggtaaggacttcatgtctaaaacaccaaaagcaaaggcaacaaaagccaaaattgacaaatgggatctaattaaactaaagagtttctgcacagcaaaagaaactaccatcagagtgaacaggcaacctacaaaatgggagaaaattttcgcaacctactcatctgacaaagggctaatatccagaatctacaatgaactcaaacaaatttacaagataaaaacaaacaaccccatcgaaaagtgggtgaaggacatgaacagacacttctcaaaagaagacatttatgcagccaaaaaacacatgaaaaaatgctcaccatcactggccatcagagaaatgcaaatcaaaaccacaatgagataccatctcataccagttagaatggcgatcattaaaaagtcagcaaacaacaggtgctag

SEQ ID NO: 23194 - DNA, 3434 bp, Homo sapiens
  SIMILAR (864)..(2963): 951254mologous to Homo sapiens putative p150,accession number U93574,Smith-Waterman Score=3482.
atgggagactttaacaccccactgtcaacattagacagatcaacgagacagaaagtcaacaaggatacccaggaattgaactcagctctgcaccaagcagacctaatagacatctacagaactctccaccccaaatcaacggaatatacatttttttcagcaccacaccacacctattccaaaattgaccacatactgggaagtaaagctctcctcagcaaatgtaaaagaacagaaattataacaaactatctctcagaccacagtgcaatcaaactagaactcaggattaagaatctcactcaaaaccgctcaactacatggaaactgaacaacctgctcctgaatgactactgggtacataacgaaatgaaggcagaaataaagatgttctttgaaaccaacgagaacaaagacacaacataccagaatctctgggacgcattcaaagcagtgtgtagagggaaatttatagcactaaatgcccacaagagaaagcaggaaagatccaaaattgacaccctaacatcacaattgaaagaactagaaaagcaagagcaaacacattcaaaagctagcagaaggcaagaaataactaaaatcagagcagaactgaaggaaatagagacacaaaaaacccttcaaaaaattaatgaatccaggagctggttttttgaaaggatcaacaaaattgatagaccgctagcaagactaataaagaaaaaaagagagaagaatcaaatagatgcaataaaaaatgataaaggggatatcaccaccgatcccacagaaatacaaactaccatcagggaatactacaaacacctctacgcaaataaactagaaaatctaggagaaataaggattaattcctcgacacatacactctcccaagactaaaccaggaagaagttaaatctctgaatagaccaataacaggagctgaaattgtggcaataatcaatagcttagcaatcaaaaagagtccaggaccagatggattcacagccgaattctaccagcggtacaaggaggaactggtaccattccttctgaaactattccaatcaatagaaaaagagggaatcctccctaactcattttatgaggccagcatcattctgataccaaagccaggcagagacacaacaaaaaaagagaattttagaccaatatccttgatgaacattgatgcaaaaatcctcaataaaatactggcaaaccgaatccagcagcacatcaaaaagcttatccaccatgatcaagtgggcttcatccctgggatgcaaggctggttcaatatacacaaatcaataaatgtaatccaacatataaacagagccagagacaaaaaccacatgattatctcaatagatgcagaaaaagcatttgacaaaattcaacaacccttcatgctaaaaactctcaataaattaggtattgatgggacgtatctcaaaataataagagctatctatgacaaacccacagccaatatcatactgaatgggcaaaaactggaagcattccctttgaaaactggcacaagacagggatgccctctctcaccactcctattcaacatagtgttggaagttctggccagggcaattaggcaggagaaggaaataaagggtattcaattaggaaaagaggaagtcaaattgtccctgtttgcagacgacatgattgtatatctagaaaaccccattgtctcagcccaaaatctccttaagctgataagcaacttcagcaaagtctcaggatacaaaatcaatgtacaaaaatcacaagcattcttatacaccaacaacagacaaacagagagccaaatcatgagtgaactcccattcacaattgcttcaaagagaataaaatacctaggaatccaacttacaagggatgtgaaggacctcttcaaggagaactacaaaccactgctcaaggaaataaaagaggatacaaacaaatggaagaacatgccatgctcatgggtaggaagaatcaatatcgtgaaaatggccatactgcccaaggtaatttacagattcaatgccatccccatcaagctaccaatggctttcttcacagaattggaaaaaactactttaaagttcatatggaaccaaaaaagagcccgcatcgccaagtcaatcctaagtcaaaagaacaaagctggaggcatcacactacctaacttcgaactatactacaaggctacagtaaccaaaacagcatggtactggtaccaaaacagatatatagaccaatggaacagaacagagccctcagaaataacaccgcatatctacaactatctgatctttgacaaacctgggaaaaacaagcaatggggaaaggattccctatttaataaatggtgctgggaaaactggctagccatatgtagaaagctgcaactggatcccttccttacaccttatacaaaaatcaattcaagatggattaaagacttaaacgttagacctaaaaccataaaaaccctagaagaagacctaggcattaccattcaggacataggcatgggcaaggacttcatgtctaaaacaccaaaagcaatggcaacaaaagacaaaattgacaaatgggatctaattaaactcaagagcttctgcacagcaaaagaaaccaccatcagagtgaacaggcaacctacaaaatgggagaaaattttcgcaacctactcatttgacaaagggctaatatccagaatctacaatgaactccaacaaatttacaagaaaaaaacaaacaaccccatcaaaaagtgggcgaaggacatgaacagacacttctcaaaagaagacatttatgcagccaaaaaacacatgaaaaaatactcatcatcactggccattagagaaatgcaaatcaaaaccacaatgagataccatctcacacccgttagaatggcaaccattaaaaactcaggaaacaacaggtcattgtgtttttataaggaaaacctaagcctttgtctggcgatccttctctctgttcctgtgcaagaaggaggggccagaagttttctggccccagcaggaggcgtggcaggccgagcaacaagtcactatggcggacacatggcgactgcagagaggctgtcagtggagctatctgggcaagccctgaaggaattccaaaagggccctttatctccaaaacagtttaagggtcatcacagccagcagctccgatggactcatagattaaacccctcctatggccaatcaaagacccccaagaacacactgttgaagatgagagggcccaccacttgggcccttggagggaccgatgtggcagcttccactgataataatggaaacgcacattttgagacgttgcaagtcatggacatgcccaggccatggtgctgcctgttggacggtgctttgcttgtttctgtctga

SEQ ID NO: 23195 - DNA, 3071 bp, Homo sapiens
  SIMILAR (1758)..(3068): 971254mologous to Homo sapiens unknown,accession number AF148856,Smith-Waterman Score=2339.
atggaaggtgaaatgaatgaaatgaagcgagaagggaagtttagagaaaaaagaataaaaagaaatgagcaaagcctccaagaaatatgggactatgtgaaaagaccaaatctacgtctgattggtgtacctgaaagtgatggggagaatggaaccaagttggaaaacactctgcaggatattatccaggagaacttccccaatctagcaaggcaggccaacgttcagattcaggaaatacagagaacgccacaaagatactcctcgagaagagcaactccaagacacataattgtcagattcaccaaagttgaaatgaaggaaaaaatgttaagggcagccagagagaaagacagatcaacgagacagaaagtcaacaaggatacccaggaattgaactcagctctgcaccaagcggacctaatagacatctacagaactctccacctcaaatcaacagaatatacatttttttcagcaccacaccacacttattccaaaattgaccacatacttggaagtaaagctctcctcagcaaatgtaaaagaacagaaattataacaaactatctctcagaccacagtgcaatcaaactggaactcaggattaagaatctcactcaaaaccgctcaactacatggaaactgaacaacctgctcctgaatgactactgggtacataacaaaatgaaggcagaaataaaaatgttctttgaaaccaacgagaacataagacacaacataccagaatctctgggatgcattcaaagcagtgtgtagagggaaatttatagcactatatgcccactggagaaagcagggaaagatccaaaatggacaccctaacatcacaattagaagaactagaaaagctagagcaaacacattcaaaagctagcagaaggcatgaaatagctaaaatcagagcagaactgaaggaaatagagacacaaaaaacctttcaaaaagttaatgaatccagcagctggttttttgaaaggatcaacaaaattgatagaccgctagcaagactaataaagaaaaaaagagagaagaatcaaatagacacaataaaaaatgataaaggggatatcaccaccgatcccacagaaatacaaactaccatcaggagaatactacaaacacctctacgcaaataaactagaaaatctagaagaaatggataaattcctcgacacatacactctcccaagactaaaccaggaagaagttgaatctctgaatagaccaaataacagggatctgcaattgtggcaataatcaatagtttaccaaccaaaaagagtccaggaccagatggattcacagccgaattccaccagaggtacaaggaggaactggtaccattccttctgaaactattccaatcaatagaaaaagaaggaatcctccctaactcattttatgaggccagcatcattctgataccaaagccgggcagagacacaaccaaaaaagagaattttagaccaatatccttgatgaacattgatgcaaaattcctcaataaaatactggcaaaacgaatccagcagcacatcaaaaagcttatccaccatgatcaagtgggcttcatccctgggatgcaaggctggttcaatatacgcaaatcaataaatgtaatccagcatataaacagagccaaagacaaaaaccacatgattatctcaatagatgcagaaaaagcctttgacaaaattcaacaacccttcatgctaaaaactctcaataaattagaattggaaaaaactactttaaacttcatatggaaccaaaaaagagcccgcattgccaagtcaatcctaagccaaaagaacaaagctggaggcatcacactacctgacttcaaactttactacaaggctacagtaaccaaaacagcatggtattggtaccaaaacagagatatagatcaatggaacagaacagagccctcagaaataacaccgcatacctacaactgtctgatctttgacaaacctgagaaaaacaagaaatggggaaaggattccctatttaataaatggtgctgggaaaactggctagccatatgtagaaagctgaaactggatcccttccttacaccttatacaaaaatcaattcaagatggattaaagatttaaacgttagacctaaaaccataaaaaccctagaagaaaacctaggcattaccattcaggacataggcatgggcaaggacttcatgtccaaaacaccaaaagcaatggcaacaaaagacaaaattgacaaatgggatctaattaaactaaagagcttctgcacagcaaaagaaactaccatcagagtgaacaggcaacctacaacatgggagaaaattttcgcaacctactcatctgacaaagggctaatatccagaatctacaatgaactcaaccaaatttacaagaaaaaaacaaacaaccccatcaaaaagtgggcgaaggacatgaacagacacttctcaaaagaagacatttatgcagccaaaaaacacatgaaaaaatgctcatcatcactggccatcagagaaatgcaaatcaaaaccacaatgagataccatctcacaccagttagaatggcaatcattaaaaagtcaggaaacaacaggtgctggagaggatgtggagaaatacgaacacttttacattgttggtgggactgtaaactagttcaaccattgtggaagtcagtgtggcgattcctcagggatctagaactagaaataccatttgacccagccatcccattactgggtatatacccaaatgactataaatcatgctgctataaagacacatgcacacgtatgtttattgcggcattattcacaatagcaaagacttggaaccaacccaaatgtccaacaatgatagactggattaagaaaatgtggcacatatacaccatggaatactatgcagccataaaaaatgatgagttcatgtcctttgtagggacatggatgaaattggaaatcatcattctcagtaaactatcacaagaacaaaaaaccaaacaccgcatattctcactcataggtgggaattga

SEQ ID NO: 23196 - DNA, 2374 bp, Homo sapiens
  SIMILAR (956)..(2371): 1001254mologous to Cloning vector pBACe3.6 levansucrase,accession number U80929,Smith-Waterman Score=2482.
tcacaacaaactgtctctcagaccacagtgcaatcaaattagaactcaggattaagaaactcactgaaaaccacacaactacatggaaactgaacaacctgctcttgaatgactactgggtagataacgaaatgaaggcagagataaagatgttctttgaaatcaatgagaaaaaaagacacaacatcccagaatctctgggacacatttaaagcagtgtgtagagggaaacttatagccctaaatgcccacaagagaaagcaggaaagatcaaaaattgacaccctaacatcacaattaaaaaaaactagagaagcaagagcaaagaaactcaaaagctagcagaaagcaagaaataactaagatcagagcagaactgaaggagatagagacacaaaaaaaaacccttcaaaaaatcaatgaatccaggagctggttttttgaaaagatcaacaaaattgatggaccgctagcaagactaataaagaagaaaagagagaagaatcaagtggacgcaataaaaaatgataaaggggatatcatcaccgatcccacagaaatgcaaactaccatcagagaatactataaatacctctacgcaaataaactagaaaatctagaagaaatggataaattcctcaacacatacaccctccaaagactaaaccaggaaggaattgaatctcttaatagaccaataacaggctctgaaattgaggcaataattaatagcttaccaaccaaaaaaagtccaggaccagacggattcacagccaaattctaccagaggtacaaggaggagctggtctaccccgagccccggagcgagagcgagtgcctgagcaacatccgcgagttcctgcgcggctgcggggcttccctgcggctggagtcaattcgggaggatcgaaacggcagatcgcaaaaaacagtacatacagaaggagacatgaacatgaacatcaaaaaaattgtaaaacaagccacagttctgacttttacgactgcacttctggcaggaggagcgactcaagccttcgcgaaagaaaataaccaaaaagcatacaaagaaacgtacggcgtctctcatattacacgccatgatatgctgcagatccctaaacagcagcaaaacgaaaaataccaagtgcctcaattcgatcaatcaacgattaaaaatattgagtctgcaaaaggacttgatgtgtgggacagctggccgctgcaaaacgctgacggaacagtagctgaatacaacggctatcacgttgtgtttgctcttgcgggaagcccgaaagacgctgatgacacatcaatctacatgttttatcaaaaggtcggcgacaactcaatcgacagctggaaaaacgcgggccgtgtctttaaagacagcgataagttcgacgccaacgatccgatcctgaaagatcagacgcaagaatggtccggttctgcaacctttacatctgacggaaaaatccgtttattctacactgactattccggtaaacattacggcaaacaaagcctgacaacagcgcaggtaaatgtgtcaaaatctgatgacacactcaaaatcaacggagtggaagatcacaaaacgatttttgacggagacggaaaaacatatcagaacgttcagcagtttatcgatgaaggcaattatacatccggcgacaaccatacgctgagagaccctcactacgttgaagacaaaggccataaataccttgtattcgaagccaacacgggaacagaaaacggataccaaggcgaagaatctttatttaacaaagcgtactacggcggcggcacgaacttcttccgtaaagaaagccagaagcttcagcagagcgctaaaaaacgcgatgctgagttagcgaacggcgccctcggtatcatagagttaaataatgattacacattgaaaaaagtaatgaagccgctgatcacttcaaacacggtaactgatgaaatcgagcgcgcgaatgttttcaaaatgaacggcaaatggtacttgttcactgattcacgcggttcaaaaatgacgatcgatggtattaactcaaacgatatttacatgcttggttatgtatcaaactctttaaccggcccttacaagccgctgaacaaaacagggcttgtgctgcaaatgggtcttgatccaaacgatgtgacattcacttactctcacttcgcagtgccgcaagccaaaggcaacaatgtggttatcacaagctacatgacaaacagaggcttcttcgaggataaaaaggcaacatttgcgccaagcttcttaatgaacatcaaaggcaataaaacatccgttgtcaaaaacagcatcctggagcaaggacagctgacagtcaactaa

SEQ ID NO: 23197 - DNA, 3422 bp, Homo sapiens
  SIMILAR (1054)..(2937): 951254mologous to Homo sapiens ORF2, encodes a reverse transcriptase homolog,accession number U09116,Smith-Waterman Score= 3130.
agcacccagattcataaagcaagtcctgagtgacctacaaagagacttagactcccacacaataataatgggagactttaacaccccactgtcaacattagacagatcaacaagacagaaagtccacaaggatacccaggaattgaactcagctctgcaccaagcggacctaatagacatctacagaactctccaccccaaatcaacagaatatacatgtttttcagcaccacaccacacctattccaaaattgaccacatagttggaagtaaagcactcctcagcaaatgtaaaagatcagaaattataacaaactgtctctcagaccacagtgcaatcaaactagaactcaggattaagaaactcactcaaaaccgctcaactacatggaaactgaacaacctgctcctgaatgactactgggtacataacgaaatgaaggcagaaataaggatgttctttgaaaccaacgagaacaaagacacaacataccagaatctctgggacacattcaaagcagtgtgtagagggaaatttatagcactaaatgcccacaagagaaagcaggaaagatccaaaattgacaccctaacatcacaattaaaagaactagaaaagcaagagcaaacacattcaaaagctagcagaaggcaagaaataactaaaatcagagcagaactgaaggaaatagagacacaaaaaaccctttcaaaaaattaatgaattccaggagctggtttttttgaaaggatcaacaaaattgatagaccactatcaagactaataaagaagaaaagagagaagaatcaaatagacggcaataaaaaacgataaattgggatatcacccaccggatccccacagaaatagaaactatcatccagagaatactacaaacacctctgtgcaaataaactagaaaatcctagaagaaatggataaattccttgacacatacaccctccccaagactaaacccaggaagaagttgaatcccttcagtagactaataacaggctctgaaattgaggcaataactaatagcctaacaaaccaaaaaaagtccaggaccagatggattcacagccgaattctaccagaggtacaaaaaggagctggtaccattccttctgaaactagtccaatcaatagaaaaagagggaatcctccctaactcattttatgaggccagcatcatcccgataccaaagcctggcagagacaaaaccaaaaaagagaattttagaccaatatccttgatgaacattgatgcaaaaatccccaataaaatactggcaaaccgaatccagcagcacatcaaaaagcttatccaccatgatcaagtgggcttcatccctgggatgcaaggctggttcaatatacgcaaatcaataaatgtagtccagcatataaacagaaccaaagacaaaaaccacatgattatctcaatagatgcagaaaaggcctttgacaaaattcaacaacccttcatgctaaaaactctcaataacttaggtattgatgggatgtatctcaaaataataagagctatctatgacaaacccacagccaatatcatactgaatgggcaaaaactggaagcattccctttgaaaactggcacaagacagggatgccctctctcaccactcctattcaacatagtattggaagttctggccagggcaattaggcaggagaaggaaataaagggcattcaattaggaaaagaggaagtcacattgtccctgtttgcagacgacatgattgtttatctagaaaaccccattgtctcagcccaaaatctccttaagctaataagcaccttcagcaaagtctcaggatacaaaatcaatgtacaaaaatcacaagcattcttatacaccaacaacagacaaacagagagccaaatcatgagtgaactcccattcacaattgcttcaaagagaataaaatacctaggaatcctacttacaagggatgtgaaggacctcttcaaggagaactacaaaccactgctcaaggaaataaaagaggatacaaacaaatggaagaacattccatgctcatgggtaggaagaatcaatatcgtgaaaatggccatactgcccaaggtaatttacagattcaatgccatctccatcaagctaccaatgactttattcacagaattggaaaaaactactttaaagttcatatggaagcaaaaaagagcccgcatcgccaagtcaatcctaagccaaaagaagtgtgctggaggcatcacactacctgacttcaaactatactgcaaagctacagtaaccaaaacagcatggtactggtaccaaaacagagatatagatcaatggaacagaacagatccctcagaaataacgccgcatacctacaactatctgatctttgacaaacctgagaaaaacaagcaatggggaaaggattccctatttaataaatggtgctgggaaaactggctagccatatgtagaaagctgaaactggatcccttccttacaccttatacaaaaatcaattcaagatggattaaagatttaaacattagacctaaaaccataaaaaccctagaagaaaacctaggcattaccattcaggacataggcatgggcaaggacttcatgtccaaaacaccaaaagcaatggcaacaaaagccaaaattgacaaatgggatctaattaaactaaagagcttctgcacagcaaaagaaactaccatcagagtgaacaggcaacctacaacatgggagaaaattttcgcaacctactcatctgacaaagggctaatatccagaatctacaatgaactcaaacaaatttacaagaaaaaaacaaacaaccccatcaaaaagtgggcgaaggatatgaacagacacttctcaaaagaagacatttatgcagccaaaaaacacatgaaaaagatggtgatgtacagatgggtttttggtgtggatgtcctttctgtttgttagttttccttctaacagacaggaccctcagctgcaggtctgttggagtttgctagaggtccactccagaccctgtttgcctgggtaccagcagtggtgtctgcagaacagcagattttcatgaaccgtgaatgctgctgtctgatcgtaaagcccaacgaatgcagagaaaatgagaacgctttcacccagtagtcaatattcagtttgcaacagagaattcacaccgaagagaaaccctatatatgcactgaatgtgggcaggccttcatccaaaagacacacttgattgcacatcagagaatatatagtggagagaagccttttgaatgctgttactgtgggaaagcctttcattccaaatcccaagtgaatgagcatgggaaaacccacacaggagaaaaaccctatacaggcacaaaatgtgtgaaggtctt

SEQ ID NO: 23198 - DNA, 5280 bp, Homo sapiens
  SIMILAR (303)..(4): 821254mologous to unidentified cloning vector 29kD protein essential for the replication of mini F plasmid,accession number AB015619,Smith-Waterman Score=400.
ctatcctgtcgtcatggaagtgatatcgcggaaggaaaatacgatatgagtcgtctggcggcctttctttttctcaatgtatgagaggcgcattggagttctgctgttgatctcattaacacagacctgcaggaagcggcggcggaagtcaggcatacgctggtaactttgaggcagctggtaacgctctatgatccagtcgattttcaaaagagacgaaggcttaacccttccgggcatccgatactgacacagggatttgtaataacgccatggcatacggattggtgatttcttttgtttcactaagccgaaaactgcgtaaaccggttctgtaacccgataaagaagggaatgagatatgggttgatatgtacactgtaaagccctctggatggactgtgcgcacgtttgataaaccaaggaaaagattcatagcctttttcatcgccggcatcctcttcagggcgataaaaaaccacttccttccccgcgaaactcttcaatgcctgccgtatatccttactggcttccgcagaggtcaatccgaatatttcagcatatttagcaacatggatctcgcagataccgtcatgttcctgtagggtgccatcagattttctgatctggtcaacgaacagatacagcatacgtttttgatcccgggagagactatatgccgcctcagtgaggtcgtttgactggacgattcgcgggctatttttacgtttcttgtgattgataaccgcttgttccgccatgacagatccatgtgaaagtgtgacaagttttttagattgtcacacttttcttgtgcttctttccaggctttcactgggtcagattcataacctctctggactaacatttgaatcaaatctttctttgacctattctctatagtaattttcccttgtatcttctctaaaatgaaacgggcttgattgttaagctttgtagattctgctcccaacattcccacaagccactccttacgtaaaccgtaataacttaatcgtaaatcaaagaattctttcagaatgtcttgcacagtttcatatttcttcagacatcccatatgatcaaaaagtaccatggaattacaagtaagagtagtttgaagtttaaaaactttatgcagtccagcagcttctgcttgtgctagtttctcttcagtcattttcaccacaaatttcacagttgtgtcagtatgatattctttataatcagaaattaatgctggtgttttatctgttccatttagcataggttctaaaacctgttctttatatacctgtgtccaagttctaactggaagctctgtaatttctactgtgtttctgtccactacaaatatttcaccactgactgcatactggttttgaccaagttcttgaatcgtgcctttaaagtttttgtagtttggaagccgttctcggagcactgtccgaccgctttggccgccgcccagtcctgctcgcttcgctacttggagccactatcgatgtcagctgtccttgctccaggatgctgtttttgacaacggatgttttattgcctttgatgttcattaagaagcttggcgcaaatgttgcctttttatcctcgaagaagcctctgtttgtcatgtagcttgtgataaccacattgttgcctttggcttgcggcactgcgaagtgagagtaagtgaatgtcacatcgtttggatcaagacccatttgcagcacaagcccctgttgttgttcagcggcttgtaagggccggttaaagagtttgatacataaccaagcatgtaaatatccgttgagtttaaatcccatcgatcggtcatttttgaacccgcgtgaatcagtgaacaagtaccatttgccgttcattttgaaaacattcgcgcgctcgatttcatcagttaccgtgtttgaagtgatcagcggctttcattacttttttcaatgtgtaatcattatttaactctatgatacccgagggcgccgttcgctaactcagcatcgcgttttttagcgctctgctgaagcttctggctttctttacggaagaagttcgtgccgccgccgtagtacgctttgttaaataaagagttcttcgcctgtcgtatccgttcttctgttcccgtgttggcttcgaatacaaggtatttatggcctttgtcttcaacgtagtgagggtctctcagcgtatggtggtcgccggatgtataattgccttcatcgataaactgctgaacgttctgatatgtttttccgtctccgtcaaaaatcgttttgtgatcttccactccgttgattttgagtgtgtcatcagattttgacacataaacatgcgcaaggaggcaggctttgtttgccgtaatgcttaccggaatagtcagtgtagaataaaccggattttttccgtcagatgtaaaggttgcagaaaccggacctttctttgcgtctgatctttcaggatcgggatccgttggcgtcgaacttatcgctgtctttaaagacacggccccgcgtttttccaactgttgatggatttgtccccccctgcccgctttccagtcgggaaacctgtcgtgccagctgcattaatgaatcggccaacgcgcggggagaggcggtttgcgtattgggcgccagggtggtttttcttttcaccagtgagacgggcaacagctgattgcccttcaccgcctggccctgagagagttgcagcaagcggtccacgctggtttgccccagcaggcgaaaatcctgtttgatggtggttccgaaatcggcaaaatcctgcccgctttccagtcgggaaacctgtcgtgccagctgcattaatgaatcggccaacgcgcggggagaggcggtttgcgtattgggcgccagggtggtttttcttttcaccagtgagacgggcaacagctgattgcccttcaccgcctggccctgagagagttgcagcaagcggtccacgctggtttgccccagcaggcgaaaatcctgtttgatggtggttccgaaatccgcaaaatcctgcccgctttccagtcgggaaacctgtcgtgccagctgcattaatgaatcggccaacgcgcggggagaggcggcttgcgtattgggcgccagggtggtttttcttttcaccagtgagacgggcaacagctgattgcccttcaccgcctggccctgacagagtttaagcaagcggtccacgctggtttgccccagcaggcgaaaatcttgtttgatggtggttccgaaatcggtaaaatccattaattgcgttgcgctcactgcccgctttccagtcgggaaacctgtcgtgccagctgcattaatgaatcggccaacgcgcggggagaggcggtttgcgtattgggcgccagggtggtttttcttttcaccagtgagacgggcaacagctgattgcccttcaccgcctggccctggattggggaggcggttgccgccgctgctgctgacggtgtgacgttctctgttccggtcacaccacatacgttccgccattcctatgcgatgcacatgctgtatgccgctataccgctgaaagttctgtaaagccagtgagacgggcaacagctgattgcccttcaccgcctggccctgagagagttgcagcaagcggtccacgctggtttgccccagcaggcgaaaatcctgtttgatggtggttccgaaatcggcaaaatcctgcccgctttccagtcgggaaacctgtcgtgccagctgcattaatgaatcggccaacgcgcggggagaggcggtttgcgtattgggcgccagggtggtttttcttttcaccagtgagacgggcaacagctgattgcccttcaccgcctggccctgagagagttgcagcaagcggtccacgctggtttgccccagcaggcgaaaatcctgtttgatggtggttccgaaatcggcaaaatcctgcccgctttccagtcgggaaacctgtcgtgccagctgcattaatgaatcggccaacgcgcggggagaggcggtttgcgtattgggcgccagggtggtttttcttttcaccagtgagacgggcaacagctgattgcccttcaccgcctggccctgagagagttgcagcaagcggtccacgctggtttgccccagcaggcgaaaatcctgtttgatggtggttccgaaatcggcaaaatccttgtcaggctgcccatctgccaaggaaactgtcaaggcttcactggttgtgccaggcccttgaccaacctctgggtcagctgcattcccaatgctgttctgagtctgcaagcgttgctgcccgctttccagtcgggaaacctgtcgtgccagctgcattaatgaatcggccaacgcgcggggagaggcggtttgcgtattgggcgccagggtggtttttcttttcaccagtgagacgggcaacagctgattgcccttcaccgcctggccctgagagagttgcagcaagcggtccacgctggtttgccccagcaggcgaaaatcctgtttgatggtggttccgaaatcggcaaaatcctgcccgctttccagtcgggaaacctgtcgtgccagctgcattaatgaatcggccaacgcgcggggagaggcggtttgcgtattgggcgccagggtggtttttcttttcaccagtgagacgggcaacagctgattgcccttcaccgcctggccctgagagagttgcagcaagcggtccacgctggtttgccccagcaggcgaaaatcctgtttgatggtggttccgaaatcggcaaaatcctgcccgctttccagtcgggaaacctgtcgtgccagctgcattaatgaatcggccaacgcgcggggagaggcggtttgcgtattgggcgccagggtggtttttcttttcaccagtgagacgggcaacagctgattgcccttcaccgcctggccctgagagagttgcagcaagcggtccacgctggtttgccccagcaggcgaaaatcctgggaggaagagaactctgtcagcgggtcaggcagcttgagccactgcccgctttccagtcgggaaacctgtcgtgccagctgcattaatgaatcggccaacgcgcggggagaggcggtttgcgtattgggcgccagggtggtttttcttttcaccagtgagacgggcaacagctgattgcccttcaccgcctggccctgagagagttgcagcaagcggtccacgctggtttgccccagcaggcgaaaatcctgtttgatggtggttccgaaatcggcaaaatcc

SEQ ID NO: 23199 - DNA, 5938 bp, Homo sapiens
  SIMILAR (252)..(1625): 981254mologous to Cloning vector pBACe3.6 levansucrase,accession number U80929,Smith-Waterman Score=2395.
  misc_feature (1)...(5938): n = a,t,c or g
gtctggagcccccaactcccttgacagtgtacgctggagcaggttccagggtggggctgccctgccgcctgcctgctggtgtggggacccggtctttcctcactgccaagtggactcctcctgggggaggccctgacctcctggtgactggagacaatggcgactttacccttcgactagaggatgtgagccaggcccaggctgggacctacacctgccatatccatctgcaggaacagcagctcaatgccactgtcacattggcaatcatcacaggaggagcgactcaagccttcgcgaaagaaaataaccaaaaagcatacaaagaaacgtacggcgtctctcatattacacgccatgatatgctgcagatccctaaacagcagcaaaacgaaaaataccaagtgcctcaattcgatcaatcaacgattaaaaatattgagtctgcaaaaggacttgatgtgtgggacagctggccgctgcaaaacgctgacggaacagtagctgaatacaacggctatcacgttgtgtttgctcttgcgggaagcccgaaagacgctgatgacacatcaatctacatgttttatcaaaaggtcggcgacaactcaatcgacagctggaaaaacgcgggccgtgtctttaaagacagcgataagttcgacgccaacgatccgatcctgaaagatcagacgcaagaatggtccggttctgcaacctttacatctgacggaaaaatccgtttattctacactgactattccggtaaacattacggcaaacaaagcctgacaacagcgcaggtaaatgtgtcaaaatctgatgacacactcaaaatcaacggagtggaagatcacaaaacgatttttgacggagacggaaaaacatatcagaacgttcagcagtttatcgatgaaggcaattatacatccggcgacaaccatacgctgagagaccctcactacgttgaagacaaaggccataaataccttgtattcgaagccaacacgggaacagaaaacggataccaaggcgaagaatctttatttaacaaagcgtactacggcggcggcacgaacttcttccgtaaagaaagccagaagcttcagcagagcgctaaaaaacgcgatgctgagttagcgaacggcgccctcggtatcatagagttaaataatgattacacattgaaaaaagtaatgaagccgctgatcacttcaaacacggtaactgatgaaatcgagcgcgcgaatgttttcaaaatgaacggcaaatggtacttgttcactgattcacgcggttcaaaaatgacgatcgatggtattaactcaaacgatatttacatgcttggttatgtatcaaactctttaaccggcccttacaagccgctgaacaaaacagggcttgtgctgcaaatgggtcttgatccaaacgatgtgacattcacttactctcacttcgcagtgccgcaagccaaaggcaacaatgtggttatcacaagctacatgacaaacagaggcttcttcgaggataaaaaggcaacatttgcgccaagcttcttaatgaacatcaaaggcaataaaacatccgttgtcaaaaacagcatcctggagcaaggacagctgacagtcgggggccaaccccttcgcccagtgaaaaaccgcggccgggtctttaaaaacagcgatagttcgacgcccaacgatccgatcctgaaagatcagacgcaagaatggtccggttctgcaacctttacctctgagggaaaaatccgtttattctacactgactattccggtaaacattccggcaaacaaagcttgacaacagcgcaggtaaatgtgtcaaaatctgatgacacactcaaaatcaacggagtggaagatcacaaaacgatttttgacggagacggaaaaacatatcagaacgttcagcagtttatcgatgaaggcaattatacatccggcgacaaccatacgctgagagaccctcactacgttgaagacaaaggccataaataccttgtattcgaagccaacacgggaacagaaaacggataccaaggcgaagaatctttatttaacaaagcgtactacggcggcggcacgaacttcttccgtaaagaaagccagaagcttcagcagagcgctaaaaaacgcgatgctgagttagcgaacggcgccctcggtatcatagagttaaataatgattacacattgaaaaaagtaatgaagccgctgatcacttcaaacacggtaactgatgaaatcgagcgcgcgaatgttttcaaaatgaacggcaaatggtacttgttcactgattcacgcgggtcaaaaatgacgatcgatgacatgttagttgttgcaaacgttgtgggaaccggaggtgaatccacggtttatccgttgggtttggtctgcggggaagcccgaaagccggttgattccccaccattctccagttttatcaaagggtggcggccactccaatcgcaagctggaaaacgggggccggttcttaaagacagcgataagttcgacgccacgatcccgatcctgaagatccagacgcaaagaatgtcgggttctgcaacctttacatctgacggaaaaatccgtttattctacactgactattccggtaaacattacggcaaacaaagcctgacaacagcgcaggtaaatgtgtcaaaatctgatgacacactcanaatcaacggagtggaagatcacaaaacgatttttgacggagacggaaaaacatatcagaacgttcagcagtttatcgatgaaggcaattatacatccggcgacaaccatacgctgagagaccctcactacgttgaagacaaaggccataaataccttgtattcgaagccaacacgggaacagaaaacggataccaaggcgaagaatctttatttaacaaagcgtactacggcggcggcacgaacttcttccgtaaagaaagccagaagcttcagcagagcgctaaaaaacgcgatgctgagttagcgaacggcgccctcggtatcatagagttaaataatgattacacattgaaaaaagtaatgaagccgctgatcacttcaaacacggtaactgatgaaatcgagcgcgcgaatgttttcaaaatgaacggcaaatggtacttgttcactgattcacgcggttcaaaaatgacgatcgatgtctcaagccatcgaaaggccacgccgcgcacaccgcccagcgaccggccgccgcccgcgtgcggcagcaaagcaacacaaaaacaggcaccaccgaccaggcgtcccgggaaagacagaaaacccacaacacggcgccgacaactggggaagacacgcaagagggcccgagaacagagcggacgcccccgggcacaagagggaaacgccgaacaggaagacccggcacaacacaaaacgagcaaagggaagagagaaagagccaccaagcacaggaaaaggcgggacaggccaccagcaaacaaggcgagccacaccccccccacaacgaaatacgacctcacactcactagaacgcgacaatgtcctgtgcatgtagccagggtgttactccaactgaagtgggtcactttccatgactccaactccagagtattggtgcagatgttttgtgcaggggaagagcataatgaacgaggactcttagagtccaagaccgttcagctggatattacggcctttttaaagaccgtaaagaaaaataagcacaagttttatccggcctttattcacattcttgcccgcctgatgaatgctcatccggagttccgtatggcaatgaaagacggtgagctggtgatatgggatagtgttcacccttgttacaccgttttccatgagcaaactgaaacgttttcatcgctctggagtgaataccacgacgatttccggcagtttctacacatatattcgcaagatgtggcgtgttacggtgaaaacctggcctatttccctaaagggtttattgagaatatgtttttcgtctcagccaatccctgggtgagtttcaccagttttgatttaaacgtggccaatatggacaacttcttcgcccccgttttcaccatgggcaaatattatacgcaaggcgacaaggtgctgatgccgctggcgattcaggttcatcatgccgtttgtgatggcttccatgtcggcagaatgcttaatgaattacaacagtactgcgatgagtggcagggcggggctggaagatcaccaaaacgatttttgacggagacggaaaaaacatatcagaacgttcagcagtttatcgatgaaggcaattatacatccggcgacaaccatacgctgagagaccctcactacgttgaagacaaaggccataaataccttgtattcgaagccaacacgggaacagaaaacggataccaaggcgaagaatctttatttaacaaagcgtactacggcggcggcacgaacttcttccgtaaagaaagccagaagcttcagcagagcgctaaaaaacgcgatgctgagttagcgaacggcgccctcggtatcatagagttaaataatgattacacattgaaaaaagtaatgaagccgctgatcacttcaaacacggtaactgatgaaatcgagcgcgcgaatgttttcaaaatgaacggcaaatggtacttgttcactgattcacgcggttcaaaaatgacgatcgatggtattaactcaaacgttattcacatgaatggttatgtatcaggatcaactaagttaccgctgatggccactggggtcagtccttctggggaccttatgagagactgtgtaggacatacttcagaactgtcccaccaaggcccaaggaaactaggatgtttatccagcaactcttgtctgtccttggttgagagctgttctcagggcaacttacagcccacccctcatgttcctatggctggagagggatcttcaggcaaagagacacagtgccctcccttttcggccgcggcgcgtgactggtgtgacaatctaaaaacttgtcacacttcacatggatctgtcatggtggaaacagcgggttatcaatcacaataaacgtactagtagcccgcgaatcgtccagtcaaacgacctcactgaggcggcatatagtctctcccgggatcaaaaacgtatgctgtattctgttcgttgaccagttcaaaaaatttgatggcaccctacaagaaccatgccggtatctgcgagatcccatgttgcttaaatatgttgaaatatttcggattggccctctgcggaaagccagtaaggatatacggccaggcattgaagagtttcgcggggaaggaaagtggttttttatcgccctgaagaggatgccggcgatgaaaaaggctatgaatcttttccttggtttatcaaacgtgcgcacaggtccattccagagggcgctttacagttgtaccatatgcaacccataaatcctcattcctcttctttatcggggtacagaacccggttaacgcagtttcggcttagtgaaacaaaagaaatcaccaatccgtatgccatgcgtttatacgaaatccctgttgtcagtatccgtaagcccgggatgggctcaagcatcgtctctctgaaaatcgactggatcataaagcggtaccagctgccctcaaagttaccaagcggtaggcctgactttccgccgccgcttcaggcaggtctgatgttaatgagatcaacagcagaactccaatgcgcctctcatacattgagaaaaagaaagcgccgccagacgactcatatcgtattttccttccgcgatatcacttccatgacgacaggatagtctgaggttatttgtccagattggagggggttcgccaatggttctgcctacggagggaattgcccagtttggtggttcttacccgcgggatttttcatcg

SEQ ID NO: 23200 - DNA, 11378 bp, Homo sapiens
  SIMILAR (11378)..(8286): 971254mologous to Homo sapiens putative p150,accession number U93570,Smith-Waterman Score=5204.
tcagaggggtggtgagagtgggcatccttgtcttgttccagttctcagagggaatgctttcagcttttctccattcagtattatgttggctatgggtttgtcatagatggttgttattaccttgaggtatgctccttgtatgccaattttgctgagagctttaatcataaagggatgctggattttgtcaaatgctctttctgcatctattgagatcatcatgtgatttttgtttcttgttttgtttttttgaggcagggtctcactgttgtttcctgactttttaatgattgccattctaactggtgtgagatgatatctcatagtggttttgatttgcatttctctgatggccagtgatgatgagcatttttttcatgtgttttttggctgcataaatgtcttcttttgagaagtgtctgttcatgtcctttgcccactttttgatggggttgtttgtttttttcttgtaaatttgtttgagttcattgtagattctggatattagccctttgtcagatgagtaggttgcgaaaattttctcccatgttgtaggttgcctgttcactctgatggtagtttcttttgctgtgcagaagctctttagtttaattagatcccatttgtcaattttgtcttttgttgccattgcttttggtgttttggacatgaagtccttgcccacgcctatgtcctgaatggtaatgcctaggttttcttctagggtttttatggttttaggtttaacgtttaaatctttaatccatcttgaattgatttttgtataaggtgtaaggaagggatccagtttcagctttctacatatggctagccagttttcccagcaccatttattaaatagggaatcctttccccattgcttgtttttctcaagcaaaggtttgtcaaagatcagatagttgtagatatgcggcattatttctgagggctctgttctgttccattgatctatgtctctgttttggtaccagtaccatgctgttttggttactgtagccttgtagtatagtttgaagtcaaggagtgtgatgcctccagctttgttcttttggcttaggattgacttggcaatgcgggctcttttttggttccatatgaactttaaagtagttttttccaattctgtgaagaaagtcattggtagcttgatggggatggcattgaatctgtaaattaccttgggcagtatggccattttcacgatattgattcttcctacccatgagcatggaatgttcttccatttgtttgtgtcctcttttatttccttgagcagtggtttgtagttctccttgaagaggtccttcacatcccttgtaagttggattcctaggtattttattctctttgaagcaattgtgaatgggagttcacccatgatttggctctctgtttgtctgttgttggtgtataagaatgcttgtgatttttgtacattgattttgtatcctgagactttgctgaagttgcttatcagcttaaggagattttgggctgagacgatggggttttctagataaacaatcatgtcgtctgcaaacagggacaatttgacttcctcttttcctaattgaataccctttatttccttctcctgcctgattgccctggccagaacttccaacactatgttgaataggagcggtgagagagggcatccctgtcttgtgccagttttcaaagggaatgcttccagtttttgcccattcagtatgatattggctgtgggtttgtcatagatagctcttattattttgaaatacatcccatcaatacctaatttattgagagtttttagcatgaagggttgttgaattttgtcaaaggctttttctgcatctattgagataatcatgtggtttttgtctttggctctgtttatatgctggattacatttattgatttgcgtatattgaaccagccttgcatcccagggatgaagcccacttgatcatggtggataagctttttgatgtgctgctggattcggtttgccagtattttattgaggatttttgcatcaatgttcatcaaggatattggtctaaaattctcttttttggttgtgtctctgcccggctttggtatcagaatgatgctggcctcataaaatgagttagggaggattccctctttttctattgattggaatagtttcagaaggaatggtaccagttcctccttgtacctctggtagaattcggctgtgaatccatctggtcctggactctttttggttggtaaactattgattattgccacaatttcagagcctgttattggtctattcagagattcaacttcttcctggtttagtcttgggagagtgtatgtgtcgaggaatgtatccatttcttctagattttctagtttatttgcgtagaggtgtttgtagtattctctgatggtagtttgtatttctgtgggatcggtggtgatatcccctttatcattttttattgtgtctatttgatttcttctctctttttttctttattagtcttgatagcggtctatcaatttttttgatcctttcaaaaaaccagctcctggattcactgatttttttgaagggttttttgtgtctcgatctccttcagttctgctctgatcttagttatttcttgccttctgctagcttttgaatttgcccgctcttgcttctctagttcttttaattgtgatgttagggtgtcaattttagctctttcctgctttctcttgtgggcatttagtgctataaatttccctctatacactggctttaaatgtgtcccagagattctggtatgttggtgtctttgttctcgttggtttcaaagaacatctttatttctgccttcatttcgttatgtacccagtagtcattcaggagcaggttgttcagtttccatggagttgagcggctttgagtgagattcttaatcctgagtttcagtttgattggcactgtgggtctgagagatagtttggttataatttctgttcttttacatttgctgaggagaactttacttccaactatgtggtcagttttgaaataggtgtggtgtggtgctgaaaaaaatgtatattctgttgatttggggtggagagttctgtagatgtctattaggtccgcttggtgcagagctgagttcaattcctgggtatccttgttgactttctgtcttgttgatctgtctaatgttgacagtggggtgttaaagtctcccattattaatgtatgggagtctaagtctctttgtaggtcactcaggacttgctttatgaatctgggtgctcctgtattgggtgcatatttatttaggatagttagctcttcttgttgatttgatccctttaccattatgtaatggccttctttgtctcttttgatctttgttggtttaaagtctgttttatcagagactaggattgcaacccctgcctttttttgttttccatttgcttggtagatcttcctccatccttttattttgagactatgtgtgtctatcactgatgccctttcttccagttgatcgcattggctcctgaggcttctgcattcttcacgtagttctggagccttggttttcagctccatcagctcctttaagcacttctgtgtattggctattctagttatatattcttctgaacttttttcaaagttttcaacttctttgcctttggtttgaatgtcctcccgtagctcagagtaatttgatcgtctgaagccttcttctctcagctcgtcaaagtcattctccatccagctttgttccattgctggtgaggaactgcgttccatgagaggagctctgtcctcttcaatgtagacacctttgttcacatcttcccaaatgtgaggtgaaccgtccacctgatactctattgcacaaacaccaggattagaaattgtttttcctcccacgtctccagctgcaaccccgccaggcactgagtgaggcttgtgcagcttgtcacaggcagagtttctgttcagctgccacttatgagtgagaacatgcggtgtttggttttctgttcctatgttagtttgctgagagtgacggcttccagcttcatccatgtccctgcgtctgggtcctgtctccacttccagattgctaattccctgaacctgtttcatccagtggagcacagcagtgtccacaccacagaccctgtccatgccacctgggtgggtagtgctgccttttgggacagttactccacacgctgacgcaggacgatcccttgaggcccacaaggttaaaatttcagtgcgcgtgcccctgggcactgtgacttcagcgtgcggactttccgcgtcctccctgtccgttccatcgcgggccgactcgcgttgcgcctgtatttccacctcacacaccccttgtttctgccacaggaatctcttctttccgtgcaccctcataagcctgttgtttcctgacttttttcatgattgccattctaactggtgtgagatggtatctcatagtggttttgatttgcatttctctgatggccagtgatggtgagcattttttcatgtgttttttcggctgcataaatgtcttcttttgagaagtgtctgttcatgtcctttgcccactttttgatggggttgtttttttttttttcttgtaaatttgtttgagttcattgtagattctggatattagccctttgtcagatgagtaggttgcgaaaattttctcccattttgtaggttgcctgttcactctgatggtagtttcttttgctgtgcagaagctctttagtttaattagatcccatttgtcaattttggcttttgttgccattgcttttggtgttttggacatgaagtccttgcccacgcctatgtcctgaatggtaatgcctaggttttcttctagggtttttatggttttaggtctaacgtttaaatctttttttttaatccatcttgaattgatttttgtataaggtgtaaggaaaggatccagtttcagctttctacatatggctagccagttttcccagcaccatttattaaatagggaatcctttccccattgcttgttttttctcaggtttgtcaaagatcagatagttgtagatatgcggcattatttctgagggctctgttctgttccattgatctatatctctgttttggtaccagtaccatgctgttttggtaccagtgccatgctgttttggttactgtagccttgtagtacagtttgaagtcaggtagcctgatgcctccaactttattcttttggcttaggattgacttggcaatacgggctctttttttggttccatatgaactttaaagtagtttttttccaattctgtgaagaaagtcattggtagctttatggggatggtattgaatctgtaaattaccttgggcagtatggccattttcatgatattgattcttcctacccatgagcatggaatgttcttccatttgtttgtatcctcttttatttccttgagcagtggtttgtagttctccttgaagaggtccttcacgtcccttgtaagttggattcctaggtattttattctctttgaagcaattgtgaatgggagttcactcatgagttcactcatgatttggctctctgtttgtctgttgttggtgtataagaatgcttgtgatttttgtacattgattttgtatcctgagactttgctgaagttgcttatcggcttaaggagattttgggctgagacaatggggttttctagatatacaatcatgtcgtctgcaaacagggacaatttgacttcctcttttcctaattgaataccctttatttccttctcctgcctaattgcccctggcccagaacactatggggcagaatactatgttgaataggagtggtgaggtgagagagggcatccctgtccttgtgccagttttcaaagggaatgcttccagtttttgaccattcagtatgatattggctgtgggtttgtcatagatagctcttattattttgaaatacgtcccatcaatacctaatttattgagagtttttagcatgaagggttgttgaattttgtcaaaaggcccttttcctgcatcctattgaagataaccatgtggtttttgtctttggctctgtttatatgctggattacaatttattgatttgtgtatattgaaaggagccttgcatccccagggatgaagcctacttgatcatggtggataagcctttttgatggtgctgctggattccggtttgccagtattttattgaggatttttgcatcaatgttcatgcaaggatattggtctaaaattctctttttttttgttgtgtctctgccgggctttggtatcaggatgatgctggcctcataaaatgagttagggaggattccctctttttcctattgattgggaatactttcagaagggaatggtaccagttcctccttgtacctctggtaggaattcggctgtgaaatccatctggttcctgggactctttttggttggtaaagctattggattattgccacaattttcagagccctgttattggtctattcagagattcaacttcttcctggtttagtcttgggagagtgtatgtgtcgaggaatttatccattccttctagattttcaagtttatttggcgtagaggtgtttgtagtaatctctggatgggtagtttgtatttcctgtgggatcggtggtggtgatatcccctttatcattttttattgcgtctatttgattcttctctctttttttctttattaagtccttgctaagcggtctatcaattttgttgatcctttcaaaaaacccagctcctgggattcactgatttttttgaagggttgaaaggggtttttttgtgtccccaatttccttcagttctgctctgattttaagttatttcttgccttcttctagcttttgaatgtgtttgctctttgcttctctagttcttttaattgtgatgttaggggtgtcaattttgggaccttccttgctttctcttgtgggcatttagggcttataaatttccctctacacactggctttgaatgtgtcccagagattctggtatgttgtgtctttgttctcgttgggtttcaaagaacatctttctttatttctgccttcatttcgttatgtatcctgaatgactattcaggagcaggttgttcagtttccatggtagttgagcagttttgagtgagtttcctaatcctgagttctagtttgattgcactgtggtctgagagacagtttgttataatttctgttcttttacatttgctgaggagtgctttacttccaagtatgtggtcaattttggaataggtgtggtgtgggtgctgaaaaaaatgtatattctgttgatttggggtggagagttctgtagatgtctattaggtccgcttggtgcagagctgagttcaattcctgggtatccgtgttgactttctgtctcgttgatctgtctaatgttgacagtggggtgttaaagtctcccattattaatgtgtgggagtctaagtctctttgtaggtcactcaggacttgctttatgaatcttggtgctcctgtattgggtgcataaatatttaggatagttagctcctcttgttgaattgatccctttacctttatgcagtggccttctttgtctcttttgatctttgttggtttaaagtctgttttatcagagactaggattgcaacccctgccttttttttgttttccatttgcttggtagatcttcctccatccttttattttgagcctatgtgtgtctctgcacatgagatgggtttcctgaatacagcacactgatgggtcttgactctttatccaacttgccagtctgtgtcttttaattggagaatttagtccatttacatttaaagttaatattgttatgtgtgaatttgatcctgtcattatgatgttagctggtgattttgctcgttagttgatgcagtttcttcctagtctcgatggtctttacattttggcatgattttgcagtggctggtactggttgttcctttccatatttagtgcttccttcaggagctcttgtaacgtaggcctctggtctttgattttggtgaccttcagatggggcttttgagtggatgtcctttttgttgatgttgatgctattcctttgtgtttgttcattttccttctaacagtcaggcccctctgctgcaggtctgctggagtatgctggaggtccactccagaccctgtttgcctgttgtttcctgactttttaatgattgccattctaactggtgtgagatgatatctcatagtggttttgatttgcatttctctgatggccagtgatgatgagcattttttcatgtgttttttggctgcataaatgtcttcttttgagaagcgtctgttcatgtccttcgcccactttttgatggggttgtttgtttttttcttgtaaatttgtttgagttcattgtagattctggatattagccctttgtcagatgagtaggttgcaaaaattttctcccatgttgtaggttgcctgttcactctgatggtagtttcttttgctgtgcagaagctctttagtttaattagatcccatttgtcaattttggcttttgttgccattgcttttggtgttttggacatgaagtccttgcccacgcctatgtcctgaatggtaatgcctaggttttcttctagggtttttatggttttaggtctaacgtttaaatctttaatccatcttgaattgatttttgtataaggtgtaaggaagggatccagtttcagctttctacatatggctagccagttttcccagcaccatttattaaatagggaatcctttccccattgcttgtttttctcaggtttgtcaaagatcagatagttgtagatatgcggcattatttctgagggctctgttctgttccattgatgtatatctctgttttggtaccagtaccatgctgttttggttactgtagccttgtagtatagtttgaagtcaggtagtgtgatgcctccagctttgttcttttggcttaggattgacttggcgatgcgggctcttttttggttccatatgaactttaaagtagttttttccaattctgtgaagaaagtcattggtagcttgatggggatggcattgaatctgtaaattaccttgggcagtatggccattttcacgatattgattcttcctacccatgagcatggaatgttcttccatttgtttgtgtcctcttttatttccttgagcagtggtttgtagttctccttgaagaggtccttcacatcccttgtaagttggattcctaggtattttattctctttgaagcaattgtgaatgggagttcactcgtgatttgcctctctgtttgtctgttgttggtgtataagaatgcttgtgatttttgtacattgattttgtatcctgagactttgctgaagttgcttatcagcttaaggagattttgggctgagacgatggggttttctagataaacaatcatgtcgtctgcaaacagggacaatttgacttcctcttttcctaattgaataccctttatttccttctcctgcctgattgccctggccagaacttccaacactatgttgaataggagtggtgagagagggcatccctgtcttgtgccatttttcaaagggaatgcttccagtttttgcccattcagtatgatattggctgtgggtttgtcatagatagctcttattattttgaaatacgtcccatcaatacctaatttattgagagtttttagcatgaagggttgttgaattttgtcaaaggctttttctgcatctattgagataatcatgtggtttttgtctttggctctgttgatatgctggattacatttattgatttgcgtatattgaaccagccttgcatcccagggatgaagcccacttgatcatggtggataagctttttgatgtgctgctggatttggtttgccagtattttattgaggatttttgcatcaatgttcatcaaggatattggtctaaaattctcttttttggttgtgtctctgcccggctttggtatcagaatgatgctggcctcataaaatgagttagggaggattccctctttttctattgattggaatagtttcagaaggaatggtaccagttcctccttgtacctctggtagaattcggctgtgaatccatctggtcctggactctttttggttggtaaactattgattattgccacaatttcagagcctgttattggtctattcagagattcaacttcttcctggtttagtcttgggagagtgtatgtgtcgaggaatgtatccatttcttctagattttctagtttatttgcatagaggtgtttgtagtattctctgatggtagtttgtatttctgtgggatcggtggtgatatcccctttaccattttttattgtgtctatttgattcttctctctttttttctttattagtcttgctagcggtctatcaattttgttgatcctttcaaaaaaccagctcctggattcattgattttttgaagggttttttgtgtctctatttccttcagttctgctctgattttagttatttcttgccttctgctagcttttgaatgtgtttgctcttgcttttctagttcttttaattgtgatgttagggtgtcaattttggatctttcctgctttctcttgtgggcatttactgctataaatttccctctacacactgctttgaatgcgtcccagagattctggtatgtggtgtctttgttctcgttggtttcaaagaacatctttatttctgccttcatttcgttatgtacccagtagtcattcaggagcagattgttcagtttccatgtagttgagcggctttgagtgagattcttaatcctgagttctagtttgattgcactgtggtctgagagatagtttgttataatttctgttcttttacatttgctgaggagagctttacttccaactatgtggtcaattttggaataggtgtggtgtggtgctgaaaaaaatgtatattctgttgatttggggtggagagttctgtagatgtctattaggtccgcttggtgcagagctgagttcaattcctgggtatccttgttgactttctgtctcgttgatctgtctaatgttgacagtgggatgttaaagtctcccattattaatgtgtgggagtctaagtctctttgtaggtcactcaggacttgctttatgaatctgggtgctcctgtattgggtgcataaatatttaggatagttagctcctcttgttgaattgatccctttaccat

SEQ ID NO: 23201 - DNA, 2375 bp, Homo sapiens
  SIMILAR (618)..(1064): 781254mologous to Homo sapiens LDL induced endothelial cell protein,accession number AL359054,Smith-Waterman Score=632.
atggtctcgatctccgacctcgtgatctgcccgcctcggcatcccaaagtgctgggattacaggggcccccaggcctggactccatctcagacccttcagctggagctggattcctggactggggagagatcgggatgcctggtcccgggagagctggccaccaagccctctgcaagtgtgactgccagtgtctggagaaaacaaccacgaaggccccagggaaaatgcctaagagtactagaagtgggcctgtccgggttcgtctggccgatgggcccaaccgctgtgctggccggctggaatgtggcatgccggacgctggggaacagtgtgtgatgacaactgggacctcgggacgccactgtggcctgctgggaactgggctgtggaaaggctacacagacttgacgattatcccccctggacctgggaccccacctcaagagaggacctgccaaggggactaccacagcgggggtacctggacacactctcccctggagaccacccggcgcccgggtagctcctccccagcaataaggcgcctgccggcacagatgctgctgctgcctgcgcggccaccccaccctcggtcctcctctccggaggccatggacccaccgccccccaaggctccccctttccccaaggcggaaggcccctcctccactccttcctcggcggcggggccccgacccccgcggctgggccgccacctcctcatcgacgccaatgggtgtacccctacacatacacggtgcagctggaggaggagccccggggcccgccccagcgcgaggcgcccccaggagagcccggccctcgcaagggctacagctgcccggagtgcgcccgtgtctttgccagccctctgcggctgcagagccaccgcgtgtcgcactcggacctcaagcccttcacgtgcggcgcctgcggcaaggccttcaagcgctccagccacctgtcgcggcatcgcgccacgcaccgcgcccgcgccgggccgccgcacacctgcccgctctgcccacgccgcttccaggacgccgcggagctggcgcagcactcctggggcacacccagaggtccccttctcgccgccgcctgcaactgcgaggtagcccggggccgcttggagtcgcccggacctgagaggctgctgcacgggtacgggggccgggaggaggaagggggctgggggcgggcggcgggagggctggaccgcgtggagggcttcatctcctccaaggcccaccactacctgcttattgacactcagggtgtcccctacacagtgctggtgacgaggagtcacagagggagccaggggccagtggggctccaggccagaaaagtgctacagctgccccgtgtgctcaagggtcttcgagtacatgtccaccttcagcgacacagcatcacccactcggaggtaccacaggactttgcagggagcctggactccttccagacacctggtgagagcctgaggctggtgttcagggccctggacacgacacagagcagccgcatctcaaaggcagagccctgcctgaaggaggaaccgttatcacttggagacttaccatatatgcacacgaccctctgcttctgccgcaaacggcgggcctcacctggacccgggactcttcaacgaggggcgctagcctggcccgactgggcgagtccccgcgccctgcccgttccgtcgctcagttccacgacacgctcccctgccgcccccctgttcgcggttccgctcagtggacgaactacccaggctatggcctttgatggcatcatcttccagggccagtcacaaagatccgcaggcctcacgactaccagccgcttcctggcatgtcagagacccctccgtctatgtgcctggtgggcctcccgcagcccgcggtgcacgttgcgccgcccagttggcctccgccctggagtacatccacgcccgcgcctggtgtaccgggacctgaagccggagaacgtcatggcgtcgggccagccccgggaccgccctcagccctggttcgcctggccgccgcggccgacgcgcttctgcgggggctgctggaccctcaccccgaaggaggagcgctgtgatcgccatcagggagcacctggggcgccctggaggcagcgggagggcgaggcggaggcagtgggagcggtggaagagaggctgggcagtgaggaggccccgggggatgcagaaagggaagccgcccacccgaggcccccaaggccaacggcttttggtgtctcctcgggcctcccagaactgctggtgaagcgggtggtggcccagttgcaggagctctggacttcctccacagccgggggctggtccacgcagatgcaaacctga

SEQ ID NO: 23202 - DNA, 2006 bp, Homo sapiens
  SIMILAR (962)..(1507): 491254mologous to Homo sapiens HSPC189,accession number AF151023,Smith-Waterman Score=351.
  misc_feature (1)...(2006): n = a,t,c or g
tgcggcaaggccttcaagcgctccagccacctgtcgcggcatcgcgccacgcaccgcgcccgcgccgggccgccgcacacctgcccgctctgcccacgccgcttccagnacgccgcggagctggcgcagcacgtgcgcctccactaagctcgagacccggcctgtgctgccctgcccgtctcagggccaccaagtctgacccacacagcgtcactcactcccacacacaccccctggctctgctgaggttactgccttaccctgggcctcagtttccccaccttccaaagggaggagcatcattccttccttaccccctttctagctgtgtgatgtagaccaaagtcgttgcccctccttggggcttgggaaccagtcggaactgggttccaagtccagctgtgcatgtgtgagcctgtgcaagtgacatgacctctctaaaccttggttttctgctctctggagcggtgaaccggtggttgtctgcggggaagagatgataaagagcacgggcacggtctggttcatttctgtatctacccccctttcggccaacgcccccgaccctttgctcaataaacattccgcactccattttcaggctcttccttgcgtgtgcgtgcacgttgggtgctgggggggcggagaccggatcttcctcgcttgggtactttcctttcggtgtgtgtttctggccggagcacgatagcgacgggccgcgcgccccgccccaacctttcttccctagaccctcttctctcccttcggcttctctctttcggccggcgccgccagttcctggggcacacccagaggtccccttctcgccgccgcctgcaactgcgagggtagcccggggccgcttggagtcgcccggacctgagaggctgctgcactgagcctcagccagccctccggatgctggtgctggcatccccctgccctcagcctctggcattttcctccgttgagaccatggagggccctccccgtcggacttgccgctccccagaacctggaccttcctcctccatcggatctccccaggcttcatctcctccaaggcccaaccactacctgcttattgacactcagggtgttccctaacacagttgcttggttggacgaggagtcacagagggagccaggggccagtggggctccaggccaaaaaaagtgctacagctgccccgtgtgctcaagggtcttcgagtacatgtcctaccttcagcgacacagcattcagccactcggaggtaaagcccttcgaagtgtgacatctgtgggaaaggcattcaagcgcagccagcacctttggcacggcaccattccattcacctgggcgggtgggtgggcggccccacggcttgccgcttctgccctcgccgctttccgggatgcgggtgagctggcccagcacagccgggtgcactctggggagcgccccgtttcagtgtccacactgccctcgccgctttatggagcagaacacactgcagaaacacacgcggtggaagcatcccatgaagccgggctgccgggtgccccaggtacccacaggactttgcagggagccctggactcctgtccagacacctggtgagagcctgaggctggtgttcaagggccctggacacagacacagagcagccgcatcctcaaaaagcagagccctgccctgaaaggaggaatcccgtgaagtaatccttcaggtccctccgtgttctggagctgagatgggaatgagccccctacacagaatggagtcctctagcctaaagatatcagctgttcccatgggcagagccttgactggatggaggtggggagtgtggtgtgtaaagtctctggcctcataaaaggttggctgtgggtcgtcaggaatctgcgccatcttcctgggggcttctgcggctgttgttgggggaagggaccccagtcctgccttccaccccccaaccaggcctgagactgatcaaacaataaacacgttttcccacttttga

SEQ ID NO: 23203 - DNA, 1218 bp, Homo sapiens
  SIMILAR (917)..(1117): 851254mologous to Homo sapiens protocadherin beta 15,accession number AF152494,Smith-Waterman Score=311.
atgggtcatcatctcatgatagataaactcgtcgcgctcggtggtttgtactacgccatccagcgccattacgcgaccaaatgcagcgttctcaaaaatgatcagatcctggtgatcggtcttttcatgatacagaacgttatctaccgcaaacatttcgccaacccgctgagcgctctgttcctgcaacaaggcatcgaactgtttgccgccattgcagaaattcacataactactgtcgccgagcgcaatcacgccataacgcagattcggctggaagcccagactatctttgattccctgaaagagtggcacaatgctatcaggaagtcgctggactacgaggccctgcaggctttcgagttccgcgtgggcgccacagaccgcggcttcccggcgttgagcagcgaggcgctggtgcgcgtgctggtgctggacgccaacgacaactcgcccttcgtgctgtacccgctgcagaacggctccgcgccctgcaccgagctggtgccccgggcggccgagccgggctacctggtgaccaaggtggtggcggtggacggcgactcgggccagaacgcctggctgtcgtaccagctgctcaaggccacggagcccgggctgttcggcgtgtgggcgcacaatggcgaggtgcgcaccgccaggctgctgagcgagcgcgacgtggccaagcacaggctagtggtgctggtcaaggacaatggcgagcctccgcgctcggccaccgccacgctgcaagtgctcctggtggacggcttctctcagccctacctgccgctcccaagagcggccccggcccaagcccaggccgactcgctcactgtctacctggtggtggcgttggcctcggtgtcgtcgctcttcctcttctcggtgctcctgttcgtggcagtgcggcctgtgcaggaggagcagggcggccccggtcggtcgctgctcggtgcccgagtgtccctttccagggcatctggtagacgtgagcggcaccgggaccctatcccagagctaccagtacgaggtgtgtctgacgggaggctcaggggcaaatgagttcaagttcctgaagccggtgattcccaatctcctgtcccgcgacagcgaaatggagaaagccccacctttctgaatggcgtggaatgcaattagggatctgattatgatgcagaacttttagaatgagtctatttctttgaaatctta

SEQ ID NO: 23204 - DNA, 1260 bp, Homo sapiens
  SIMILAR (4)..(597): 831254mologous to Homo sapiens protocadherin beta 9,accession number AF152502,Smith-Waterman Score=844.
atggtttgctacattcaagagaatctgccattcctactaaaaccttctgtggagaatttttacatcctaattacagaaggcgcgctggacagagagatcagagccgagtacaacatcactatcaccgtcactgacttggggacacccaggctgaaaaccgagcacaacataacggtcctggtctccgacgtcaatgacaacgcccccgccttcacccaaacctcctacaccctgttcgtccgcgagaacaacagccccgccctgcacatcggcagcgtcagcgccacagacagagactcgggcaccaacgcccaggtcacctactcgctgctgccgccccaagacccgcacctgcccctcgcctccctggtctccatcaacgcggacaacggccacctgttcgccctcaggtcgctggactacgaggccctgcaggctttcgagttccgcgtgggcgccacagaccgcggctcccccgcgctgagcagagaggcgctggtgcgcgtgctggtgctggacgccaacgacaacttggcccttcgtgctgtacccgctgcagaacggctccgcgccctgcaccgagctggtgccccgggcggccgagccgggctacctggtgaccaaggtggtggcggtggacggcgactcgggccagaacgcctggctgtcgtaccagctgctcaaggccacggagcccgggctgttcggtgtgtgggcgcacaatggggaggtgcgcaccgccaggctgctgagcgagcgcgacgcggccaagcacaggctggtggtgcttgtcaaggacaatggcgagcctcctcgctcggccaccgccacgctgcacgtgctcctggtggacggcttctcccagccctacctgcctctcccggaggcggccccggcccaggcccaggccgaggccgacttgctcaccgtctacctggtggtggcgttggcctcggtgtcttcgctcttcctcctctcggtgctcctgttcgtggcggtgcggctgtgcaagaagaagcagggcggcctctgtgggccgctgctcgatgcctgagggcccctttccagggcgtctggtggacagtaagcggcaccgggaccctgttccagagctaccagtacgaggtgtgtctgactggaggttcagagaccggcgagttcaagttcttgaagccgattaccccccacctcccgccccataggggtgggaaagaaatagaggaaaattctactctccccaatagctttggatttaattat

SEQ ID NO: 23205 - DNA, 6524 bp, Homo sapiens
  SIMILAR (5198)..(5908): 611254mologous to Homo sapiens Human protocadherin pc3,accession number R86865,Smith-Waterman Score=642.
tttcgtggaaagcctgttagcagagcacggaccagtgtctccggagaatgctattctcctacatttccgaacaggttatcaacgcacagatcgatcactgcctctgtcccatcgctccctgaagtagctctgactccggttccttgaaaggggcgtgtacagaagtaaagatggagcctgcaggggagcgctttcccgaacaaaggcaagtcctgattctccttcttttactggaagtgactctggcaggctgggaaccccgtcgctattctgtgatggaggaaacagagagaggttcttttgtagccaacctggccaatgacctagggctgggagtgggggagctagccgagcggggagcccgggtagtttctgaggataacgaacaaggcttgcagcttgatctgcagaccgggcagttgatattaaatgagaagctggaccgggagaagctgtgtggccctactgagccctgtataatgcatttccaagtgttactgaaaaaacctttggaagtatttcgagctgaactactagtgacagacataaacgatcattctcctgagtttcctgaaagagaaatgaccctgaaaatcccagaaactagctcccttgggactgtgtttcctctgaaaaaagctcgggacttggacgtgggcagcaataatgttcaaaactacaatatttctcccaattctcatttccatgtttccactcgcacccgaggggatggcaggaaatacccagagctggtgctggacacagaactggatcgcgaggagcaggccgagctcagattaaccttgacagcggtggacggtggctctccaccccgatctggcaccgtccagatcctcatcttggtcttggacgccaatgacaatgccccggagtttgtgcaggcgctctacgaggtgcaggtcccagagaacagcccagtaggctccctagttgtcaaggtctctgctagggatttagacactgggacaaatggagagatatcatactccctttattacagctctcaggagatagacaaaccttttgagctaagcagcctttcaggagaaattcgacttaattaaaaagctagatttgaagacaatgtcttcgtatgatctagatatagaggcatctgatggcgggggactttctggaaaatgctctgtctctgttaaggtgctggatgttaacgataacttcccggaactaagtatttcatcacttaccagccctattcccgagaattctccagagacagaagtggccctgtttaggattagagaccgagactctggggaaaatggaaaaatgatttgctcaattcaggatgatgttccttttaaagctaaaaaccttctgttgagaatttctacaggctggtaacagaaggggcgctggacagagagaccagagccgagtacaacatcaccatcaccatcacagacttggggactccaaggctgaaaaccgagcagagcataaccgtgctggtgtcggacgtcaatgacaacgcccccgcctttcacccaaacctcctacaccctgttcgtccgcgagaacaacagccccgccctgcacatcggcagtgtcagcgccacagacagagactcgggcaccaacgcccaggtcacctactcgctgctgccgccccgggacccgcacctgcccctcacctccctgggtctccattaacacggacaacggccacctgtttcgctctccagttcgctggattacggaggccctgcaggcttttcgagtttccgcgttgggcgccacagaccgcggcttcccggcgcttgagcagcgaggcgctggtgcgcgtgctggtgctggacgccaacgacaactcgcccttcgtgctgtacccgctgcagaacggctccgcgccctgcaccgagctggtgccccgggcggccgagccgggctacctggtgaccaaggtggtggcggtggacggcgactcgggccagaacgcctggctgtcgtaccagctgctcaaggccacggagcccgggctgttcggcgtgtgggcgcacaatggcgaggtgcgcaccgccaggctgctgagcgagcgcgacgtggccaagcacaggctagtggtgctggtcaaggacaatggcgagcctccgcgctcggccaccgccacgctgcaagtgctcctggtggacggcttctctcaaccctacctgccgctcccagaggcggccccggcccaagcccaggccgactcgcttaccgtctacctggtggtggcattggcctcggtgtcttcgctcttcctcttctcggtgttcctgttcgtggcagtgcggctgtgcaggaggagcagggcggcctcagtgggtcgctgctcggtgcccgagggcccctttccagggcatctggtggacgtgagcggcaccgggaccctttcccagagctaccagtacgaggtgtgtctgacgggaggctctgaaaagttggtactggaccaatccctggatcgagaaaaggtgtctgagtttagtttaacgctaacagccgtggatggcgggtctccgcccaggtctgggactacactgattaacgttgtggtcctggacatcaatgacaatgcccctgaatttgagaagccagtctatgaagttcatgtacctgagagcagccctctggactccttgatcatcaaagcgtctgctacagatttagatgcaggaataaatggagaactgtcttattcattttcccacgtctccagagatgtacggaaaacatttgaaatccatccaatttctggcgaagtctatttaaaagcccctctagatttcgagattattcaatcttatatcataaatattcaggccattgaaggtgggagcctttctggaaaatcaagcattttagttcgggttgtagatgtgaatgacaacccgccagaaatagccatgacatctcttaccagccccataccggaaaactcttcacctgagatggtggttgctgttttcagcatacgagaccaagacgctggagacaatgggagaacggtttgctcaattcaggacaacctcccctttgtcttgaagcctaccttcaagaatttttacgctctggtaacagagcacccactggacagagaggtcagaaatgaatataacatcaccatcaccgtgaccgacttggggacacccaggctgaaaaccgagcacaacataaccgtgctggtctccgacgtcaatgacaacgcccccatcttcacccaaacctcctacaccctgttcgtccgcgagaacaacagccccgccctgcacatcggcagcgtcagcgctacagacagagactcaggcaccaacgcccaggtcacctactcgctgctgccgccccaggacccgcacctgcccctcacctccctggtctccatcaacgcggacaacggccacctattcgccctcaggtctttggactacgaggccctgcaggagttcgggtttcgcgtgggcgccgcagaccacggctccccggcgctgagcagcgaggtgctggtgcgcgtgctggtgctggacgccaacgacaactcgcccttcgtgctgtacccgctgcagaacggctcggcgccctgcaccgagctggtacctcgggcggccgagccgggctacctggtgaccaaggtggtggcggtggacggcgactcgggccagaacgcctggctgtcgtaccagctgctcaaggccacggagcccgggctgttcggcgtgtgggcgcacaatggcgaggggcgcaccgccaggctgctgagcgagcgcgacgcggccaagcacaggctggtggtgctggtcaaggacaatggcgagcctccgcgctcggccaccgccacgctgcacgtgctcctggtggagggcttctctcagccctacctgcctctcacggaggctgccccctcccaggcccaggccgactccctcaccgtctacctggtggtggcgttggcctcggtgtcgtcgctcttcctcttctcggtgttcctgttcgtggcggtgcggctgtgcaggaggagcagggcggcctcgatgggtcgctgctcggtgcccgagtgtccctttccagggcatctggtagacgtgagcggcaccgggaccctatcccagagctaccagtacgaggtgtgtctgacgggaggctcaggggcaaatgagttcaaatttctgaaaccaattatccccaacttcctaccccagagcacagaaccgtcctcccaggaagctgaatccagcaagactgaggaaacagagaaaggatcctttgtggtcaatctggcaaaggatctgggactagcagagggggagctggctgcaaggggaaccagggtggtttccgatgataacaaacaatacctgctcctggattcacataccgggaatttgctcacaaatgagaaactggaccgagagaagctgtgtggccctaaagagccctgtatgctgtatttccaaattttaatggatgatccctttcagatttaccgggctgagctgagagtcagggatataaatgatcacgcgccagtatttcaggacaaagaaacagtcttaaaaatatcagaaaatacagctgaagggacagcatttagactagaaagagcacaggatccagatggaggacttaacggtatccaaaactacacgatcagccccaactcttttttccatattaacattagtggcggtgatgaaggcatgatatatccagagctagtgttggacaaagcactggatcgggaggagcagggagagctcagcttaaccctcagagcgctggatggtgggtctccatccaggtctgggacctctactgtacgcatcgttgtcttggacgtcaatgacaatgccccacagtttgcccaggctctgtatgagacccaggctccagaaaacagccccattgggttccttattgttaaggtatgggcagaagatgtagactctggagtcaacgcggaagtatcctattcattttttgatgcctcagaaaatattcgaacaacctttcaaatcaatcctttttctggggaaatctttctcagagaattgcttgattatgagttagtaaattcttacaaaataaatatacaggcaatggacggtggaggcctttctgcaagatgtagggttttagtggaagtattggacaccaatgacaatccccctgaacgtgatcggtatcatcattttccaactctgttgctgagaattctcctgagacgccgctggctgtttttaagattaatgacagagacctctggagaaaatggaaagatggtttgctacattcaagagaatctgccattcctactaaaaccttctgtggagaatttttacatcctaattacagaaggcgcgctgggacagagagatcagagccgagtacaacatcactattcaccgtcactgacttgggggacacccgggctggaaaaccgaggcacaacattaacggtcctgggtcttccgacgttcaatggacaacggcccccgcctttcacccaaacctccttacaccctgttcgtccgcgagaacaacaggccccgccctgcacatcggcagcgtcagcgccacagacagagactcgggcaccaacgcccaggtcacctactcgctgctgccgccccaagacccgcacctgcccctcgcctccctggtctccatcaacgcggacaacggccacctgttcgccctcaggtcgctggactacgaggccctgcaggctttcgagttccgcgtgggcgccacagaccgcggctcccccgcgctgagcagcgaggcgctggtgcgcgtgctggtgctggacgccaacgacaactcgcccttcgtgctgtacccgctgcagaacggctccgcgccctgcaccgagctgatgccccgggcgggccgccgagccgggctacctggtgaccaaggtggtggcggtggacggcgactcgggccagaacgcctggctgtcgtaccagctgctcaaggccacggagcccgggctgttcggctggtggtgctggtcaaggacaatggcgagcctttcgttgctcggccacacaacacgcgtgtcacttgcttcctgggtggagcggcttttcctcagccctaacctgcccgcttttcggagggctgcctccagcctcaggggccaggctgactctctcaccgtctacctggtggtggcgttggcctcggtgtcttcgctcttcctcttctcggtgctcctgttcgtggcggtgctgctgtgtaggaggagcagggcggcctcggtgggtcgctgctcagtgcctgagggcccctttccagggcatctggtggacgtgaggggcaccgggagcctgtctcagaactatcagtacgaggtgtgcctggcaggaggctcagggacgaatgagttccagttcctgaaaccagtattacctaatattcagggccattcttttgggccagaaatggaacaaaactctaactttaggaatggctttggtttcagccttcagttaaagtaa

SEQ ID NO: 23206 - DNA, 466 bp, Homo sapiens
  SIMILAR (377)..(258): 411254mologous to Caenorhabditis elegans ABF-2,accession number AB029810,Smith-Waterman Score=65.
  misc_feature (1)...(466): n = a,t,c or g
tttttttttccccctcaggatgctttttctgaaggatgccagcctaggggaaaggaagaatgagaacctagggtctttctggagcacaggctgcattagcaaataccctccagggcacgcctgtccccaggccacagcgataaccaatccgaatggagaggacactggcatttgtgagtttcagagttcttggggactaacgtgtatttactggattctagaacacgtgatgctcccgacactcacctaccaagttagtcacctctccctccacaagggactcccactcctgagggntttcccgttactgtgacacaggagccggtacgggaggaacacgtccggcttgaacacttatctatgacaattggctgtgccctttgtgttggttcagttaatgacagggtcctggctctcatgtcccactgggggccgctgctctcaggcaggtaccacactgttggaa

SEQ ID NO: 23207 - DNA, 453 bp, Homo sapiens
  SIMILAR (85)..(228): 351254mologous to Homo sapiens immunoglobulin epsilon- chain,accession number M55420,Smith-Waterman Score=62.
tttcgtgtgggagtacgaggctgacgcggcggccctgtccccgtaactgtgacacgggtgcacgcgagcgtcattgggggcgatgggggccgtgctgggtgcgcgtttgcgccagtgacgcagccgctgcatctccgccagtccgcgcaggccagcatccttcagaaaaagcatccccgaggaggaagacgaatcgttaaacatctgaaagggtcaggtgagtatcctttttttttatattaaatgatatgtgtttataagacttaagaccaaacattaaaggtagatgaccaagatttgagtcctgtttctgcctcttagctttttgagccttctgaagataggcttgtgaggagggtgaaatgcattaacacgcataaaacccatagacgcgcacccctgagtgggagtgcacagtgagtgctgcttgtttgtgctaagtctggatgtctg

SEQ ID NO: 23208 - DNA, 498 bp, Homo sapiens
  SIMILAR (4)..(498): 991254mologous to Homo sapiens HSPC307,accession number AF161425,Smith-Waterman Score=858.
gttccgggaggcgcgtggggcttgaggccgagaacggcccttgctgccaccaacatggagactttgtaccgtgtcccgttcttagtgctcgaatgtcccaacctgaagctgaagaagccgccctggttgcacatgccgtcggccatgactgtgtatgctctggtggtggtgtcttacttcctcatcaccggaggaataatttatgatgttattgttgaacctccaagtgtcggttctatgactgatgaacatgggcatcagaggccagtagctttcttggcctacagagtaaatggacaatatattatggaaggacttgcatccagcttcctatttacaatgggaggtttaggtttcataatcctggaccgatcgaatgcaccaaatatcccaaaactcaatagattccttcttctgttcattggattcgtctgtgtcctattgagttttttgatggctagagtattcatgagaatgaaactgccgggctatctgatg

SEQ ID NO: 23209 - DNA, 3579 bp, Homo sapiens
  SIMILAR (1378)..(2010): 531254mologous to Mus musculus cationic amino acid transporter,accession number U70859,Smith-Waterman Score=506.
atggctttcctgtttgagttcagtgaccttgtgagcctcttgtccatcgggactatgcttgcttactccttggtggctttttctgttcttgtcctcaggtaccagccagacgagaatttcagcaagaacgagaagccgaaggaggaagtagttgagatgaattctgtacccaaagcagaatccccagcatgtgttcctgaagcgtccagcactccggcgagtctgtggagccctgtcagcaccatccccaccccgagatggggccgcatcgtctatggatgtgcctttctgcttgttgtcctgctgtccatgctatgcctggtattggcccattggcccaaacgcctgttctctggagagctgatctacatcgcagcggctgtgttgctgctggtgctcattgtgggattcactttcaccgtctggagacagccccagagcaacactcctctttacttcaagcccccacatatcagtacttcccaaaacctgtctcttccagaacacccaatggaatacctactcagaacaggcattgagccagacgttcgtggtgtgctcacggttaacgctttgcctgcaggtccccctgttgcctgttctcctctggtcagcatctctgcacatgtttacctgatgatgcagatgaccactgagacctgggcccaatgtggagtctggatgttgattgcgcttgaatgtcccaacctgaagctgaagaagccgccctggctgcacatgccgttggccatgactatgtatgctctggtggtggtgtcttacttcctcatcaccagaggaatcgtttatgatgttacggttgaaccgccaggtgttggctctatgactgatgaacaagggcatcagaggccagtagctttcttggcctacagagtctggttcaagaatcacagagcaaaactcaagaaagcgaaatgcaagcatattcatcaaaaacaagaaactccacaaccgccaataccagagggtggggtctccaccagtgtcggcctgagaaatgcagacacactacccagattgcccaacgctgctcacccgatcggcctggtgtacacgggtcatcgagtcccctcattccagctcatcctgtaccccaacctcaagtgcgctgctttcatggagaggaaacagggtaactgcccggtcttcaagggcatagaccagaacaccatgctgggattcaccagggctgcggtgggacttggagaacaggcaagcactgctggtacccgaccacttccctcagggcctgaggttgggcccagccagctggccaccaccacaacacacacctgcacagccccagaggtggtgcccctcttacatgaagcagcagtgccaccatatgagaggccaggactgctggctctgggagctcgggagtcagcctggggttccaaagtcttcacaggtgtgaaccttttggttctgagctgcgtcatcttctccggcttcatcaagggagatctgcacaactggcagctcacagacgccgactacaaatgggccgagctggggtggtccaacgacacccacagctcgggctccctgggctctggagggtttgtgccttttggctttggcgtgattctccatggagcggccacgtgtttctttgcatttgtgggttttgatggcattgccaccacaggagaagaagccctccaccctcaccgcctccaccctcaccgctccatccccttgggcactgtgacctcgatcttcatctgcttcttggcctattttggtgtctcagcggcgctcaccctcatagtgcccctactacctgatatgtcccgagaaccccttgccggaggcttttgtccacattggatgggcccccatcagatatgctgtggccgtcggcaccctctgtgccctttcctccagtcaatggctgaggacaggctccttttctgcggactcgcccggatccacgcccacaccagcacccctgtggtggccactgtcgttgctgggacccttgcagtgcaaaggcacatccgtgggccacggagacccgtcctgatcgccgcccccacatatcccccagagcgcacctcacagaacagagtcccggggacgcactgccgaggttcacaggtgcgggttccgtcgccccaaagcctcgggagcaccccagccctagttatggggagagcccggctgcgtcaccccacaccctctccagcaagtgcgtcaccgctagaagctccgtgcccgtctccccttggagccatgggcgccaatctcacctgcgcggactggcggagacacagcggttgcgtcaccggtgcagaagcgcaccgagcacggcccccatcacccccaatgacgcttgcgtgcacccgtgtcacagttacgggagatagagccgccgcgtcagcctcgcactcccacgcaagtgcgtcacacagtcggtcccgccacccatggaggccagcgcgcatgcgcaccccggactcgggaggggcctcccgcacccagcggccggagcgcgcaggcagcagcagagcccgacacgcatgtgcgtgcacacagatcctgacacgcatgtacacccagaccgcgacatgcacgtgtacgcgcacacagacccccaacgcatgcgtgtggccagaccttgatccgcatgtgcgaccagacccgacacacatgatgctttttctgaaggatgccagcctaggggaaaggaagaatgagaacctagggtctttctggagcacaggctgcattagcaaataccctccagggcacgcctgtccccaggccacagccgaaaccaatccgaatggagaggacactggcatttacacatctgcgcccctcatacccactaacgcccagcacggccatgctacgggccccaccaccccacacggtgcagaggtgcatccgtgggccacggagacccgtcccgaccgctgcccccgcacaacccccagagcgcacctcacggagcagagtcccagggacgcaccgccgaggttcacaggcacgggctgcgttgacccaaagcctctggagcacccccggtcaccagttatggggagagcccggctgtgtcaccccacactctccagcaagtgcgtcaccgtcagaagccccgtgcccgtctcccctcggagccacgcgcaccaatctcacctgcgcggactggcggagatgcagcggctgcgtcactggtgcaaacgcgcacccagcacggcccccatcgcccccaatgacgctcgcgtgcacccgtgtcacagttacggggacagggccgccgcgtcagcctcgtactcccacgcaagtgcgtcacacactcggtcccgccaccccctggaggccagcgcgcatgcgcacgcgcacccagcggccgcagcgcgcagacagcagcagagcccgacacgcatgtgcacacagacccctacacgtatgtgcacgtacccagaccccgacacgtataccctgacgggcgtgtgcgcacgcacagatgccgacacgcatgtgcagacacaacagagcccgacacacacgtgcgcctgcacagatgctgacacgcggacacactga

SEQ ID NO: 23210 - DNA, 1763 bp, Homo sapiens
  SIMILAR (103)..(507): 651254mologous to Homo sapiens Human secreted protein, SEQ ID NO: 6135,accession number G02054,Smith-Waterman Score=477.
cgtccgtgcggcctggtccgggccatgtccgcgtgagtgttcttttcgctgtcgccgctcccgctccggccctggcccctctgcccggcagcgcggcgcaccatgggctccattctcagccgccgcatcgcgggggtggaggacatcgacatccaggcgaactcggcctatcgctaccctccgaagtccggaaactactttgcttcgcactttttcatgggaggagagaaattcgacaccccccaccctgaaggtcacctctttggagagaacatggatctgaacttcctgggcagccgcccgagccagtttccctacgtcactcctgccccccacgagcccgtgaagacgctgcggagcctggtgaacatccgcaaagactccctgcggctggtgaggtacaaagacgatgccgacagccccaccgaggacggcgacaagccccgggtgctctacagcctggagttcaccttcgacgccgatgcccgcgtggccatcaccatctactgccaggcatcggaggagttcctgaacggcagggcagtatacagccccaagagcccctcgctacagtccgagaccgtccactacaagagaggggtgagccagcaggtctccctgccctccttcaagattgacttctcggaatggaaggatgacgagctgaactttgacctggaccggggcgtgtttccagtagtcatccaggctgtggtggacgaaggagatcagtggtggaagtgactggccacgcccacgtgctcttggctggctttgaaaagcacatggacggcagcttctctgtgaagcctttaaagcagaagcaaattgtggaccgggtcagctacctcctgcaggagatctatggcattgagaacaagaacaaccaggagaccaagccctcggacgacgagaacagcgacaacagcaacgagtgtgtggtgtgcctgtccgacctgcgggacacgctgatcctgccctgccgccacctgtgcctctgtacctcctgcgccgacacgctgcgctaccaggccaacaactgccccatctgccggctgcctttccgggccctcctgcagatccgggcggtgcggaagaagccaggagccctgtcccccgtgtccttcagccccgtcctggcccagagcctggagcatgatgagcactcttgtccctttaaaaaatcaaagccgcaccccgcctccctggccagcaagaaacctaaaagggaaacaaactctgacagcgtcccacctggctacgagcccatctcgctgctcgaggcgctcaacggcctccgggctgtctccccggccatcccctcggcccctctttatgaagaaatcacctattcaggcatctcggacggcctgtcccaggccagctgtcccctcgcggctatcgaccacatcctggacagcagccgccagaagggcaggccgcagagcaaggcccccgacagcaccctacggtccccgtcttcccccatccacgaagaggatgaggagaagctctccgaggacgtggacgcccctcccccactgggtggcgcagagctggccctgcgggaaagcagctcccctgagagtttcataacagaagaggttgatgagtcgtcgtcaccacagcaagggacccgagcagcttccattgagaatgtcctgcaggacagcagccccgagcactgtggccgaggcccacctgctgacatctacctgccagccctggggcccgactcctgctctgttggtatagacgagtaa

SEQ ID NO: 23211 - DNA, 3134 bp, Homo sapiens
  SIMILAR (838)..(1152): 651254mologous to Homo sapiens Human secreted protein, SEQ ID NO: 6135,accession number G02054,Smith-Waterman Score=358.
atgcagcgcctgaaggtctcagaattcccgctgaaggccccgggaagggcccacctggcctcagctacccgggtcctcccctcggagactcttcccgtggtcacccggctcctcctcccggggactcttcccgtggtcacccggctcctcctcccgcgggctcttcccgtggtcacccggctcctcctctcggggactcttcccgtggtcacccggctcctcctcccggggactcttcccgtggtcacccgggtcctcctcccgggggctcttcccgtggtcacccggctcctcctctcggggactcttcccgtggtcacctggctcctcctcccgggggctcttcccgtggtcacccgggggctcctcccggggctcttcccgtggtcacccgggtcctcctcccgggggctcttcccgtggtcacccgggtcctcctcccggggctcttcccgtggtcacccgggtcctcctcccgggactcttcccgtggtcacccggctcctcctcccggggactcttcccgtggtcacccgggtcctcctcccgggggctcttcccgtggtcacccggctcctcctctcggggactcttcccgtggtcacccggctcctcctcccggggctcttcccgtggtcacccgggtcctcctcccggggctcttcccgtggtcacccgggtcctcctcccggggctcttcccgtggtcacccggctcctcctctcggggactcttcccgtggtcacccggctcctcctctcggggactcttcccgtggtcacccgggtcctcctctccggggctgtgtgccaggagaaatggggctggatctgggcgtcaggaaactactttgcttcgcactttttcatgggaggagagaaattcgacaccccccaccctgaaggttacctctttggagagaacatggatctgaacttcctgggcagccgcccggtccagtttccctacgtcactcctgccccccacgagcccgtgaagacgctgcggagcctggtgaacatccgcaaagactcctgcggctggtacaaagacgatgccgacagccccaccgaggacggcgacaagccccgggtgctctacagcctggagttcaccttcgacgccgatgcccgcgtggccatcaccatctactgccaggcatcggaggagttcctgaacggcagggcagtggactccccacttttctgcgggaaccagctggggtcctttgactggtttcagttccaacgctgcctggagctggaagttcgggtgggtggtgtgaggaggggaccatgtgtcctgtgcacagcccctcgcgtgacaggtgctcttgaaaggagcctgagtgctcgagttgaggggctggtggagacgacttatgtggggaggttcttagggacctgccaccagactctccaggctcaaatcaaaagactggaaatgaacaaggtgaataagagcacgatggaggaggagctgagagagaaagctgacaggagtgccctggcaggcaaggcaagccgcgttgacctggagactgtggccttggagctgaacgagatgattcagggcatactcttcaaggtcacgatccatgaggacagctggaagaaggctatggaggagctcagcaaggacgtgaacaccaagttagtccacagtgatctggatcccttgaagaaagaaatggaagaggtctggaaaatcgtccggaagctgctgattgagggcttaagactggatcctgacagtgctgctggctttaggaggaagctgttcaagcgcgtgaagtgcatctcctgtgaccggcctgtggagatgatgactggcccacagctgatcaccatccgcaaagcccacctgctgtcccggctgcggccagccagcgccaacagctgcgagtacttgcagcggcaacagatgagggaacagcagtggctgcagctccaggacctcggtatccaggaggattgtcagcaggactggggtgatggcccccaaaacgccaccagcctcaagtgcaagtcctgcaacctgttgacgctctatccctacggggatccccacgtgatcgactatgacagcgccgaggtggacatcctgggcgtggatgggatcctgtacaaaggccgcgtgaacagccagcgtggggctcagcccttggccgtcgcaaaggagctggcagctgtgaaggctccatctcccccgtcacaaagcctgtatgaccgtgtgcactccagtgccctatttggcgccatctgcccccccctgtgcccccgctccagtgcctgctcagctgcctcgggccctcacctgacgatgccagctcgaccaccttccctgccacctctgctgctgctgccaccgctgattccatccctaagggacccccagcaggccccagggtccaccaggctctcaagagctccacacattgagtcccgagtcggcaggaagccccccgaggagcccgccaacccgaccatgaactcattaacactaagggataaacaacagacgccagcacgtgtgttggaaaagggcactgtgagtacccgaaagtggactgcccagggctctgttgaaatacatccgttgtccaaatatgagcagtgctcaaaaacccagagaactttccaaacgcaggaattagaagtagccttgtgtcaaaagaactccattccggccaacctaggaggtctcccgtattcggggaagaagaccggagtcaaaggactcatctgtcctgtgccagggactgctgtgaaagcccctcagagacctccagggccacagcagccccacccagccccgcagtcagcctcggagacagcctggttccctgtggctgaccgcagggtgttctcagagaaccctggctggaccgctgcaaagaccctggggacactcagcagcccctgccaagcaggggcaggggtgggccgacaggatggggacccaggccaggaactaacttcacaggaaaagccctgggtgggcaggaagattccagagcacgctgtggctgacaagggctacaggcagcagtgtggagccggggaggctcggggtggccctgtcttctgggcggcggcccccagaaccagctggcagcaagcctcgtatacaag

SEQ ID NO: 23212 - DNA, 479 bp, Homo sapiens
  SIMILAR (301)..(462): 1001254mologous to Homo sapiens Homo sapiens secreted protein gene clone hk10_3,accession number W95632,Smith-Waterman Score= 276.
cggtattaagaaacatcgagtcactttgcctggacaggaggaaccctgggacatccggaacctgctcatctggatcaagaagaatttgctaaaagagctggcctgccccgctccacaggccaccagatgggctcctgagaccctccccaggctgcttacagctcattctgctgggggtagagatgaggggagggagtaagttaaaccttggactagcaagtagaagcctggggggatgcgtgtgcctcagtttcctcctccacaactgaatatagtggctgaaaactggggagatacttgatggcgcgaatgtccgttttctctcccttcccacctcctgcaggaagcaggacggggcaggcagcacctggtaggcacagtgctttgcccctcctccccttcccttctggaagtcttggggcctcagtgcttgcaacagccggccttgggcaaataaaagactaggaagtttactaaaa

SEQ ID NO: 23213 - DNA, 382 bp, Homo sapiens
  SIMILAR (230)..(331): 381254mologous to Streptomyces noursei SsmA,accession number AF118856,Smith-Waterman Score=69.
ggcgcccttgtcagtggaggtggcgatcggagtgtggtgcggagctcctgtttgacggtattaagaaacatcgagtcactttgcctggacaggaggaaccctgggacatccggaacctgctcatctggatcaagaagaatttgctaaaagagcggccccatcagtgcacctgattggaacacactagatttcaggtcctggaaactgggcgctaggatccgtttccctggctgcagagagtgggaggtgtgatgtggaatatcccttctcccagcacaccccaattaatactgaaggagtaggcaggagggagttgctgggaaaaccgggtttcttggcacatgggggtgcaagcactgtggttgaatttgccatgtccaag

SEQ ID NO: 23214 - DNA, 448 bp, Homo sapiens
  SIMILAR (301)..(188): 551254mologous to Homo sapiens PRO1722,accession number AF119851,Smith-Waterman Score=89.
gctcgacggtggagttcggaggtggtgcggctccaggtttgacggtattaagaaacatcgagtcactttgcctggacaggaggaaccctgtgagtattggctttctgaacccctctcttggggccattgaacaggagttggtccatggggaacactcagccccgttcaggcctgtgttctgcatccgtgtgctaagctgcctctctagcaggcagaggaataaaaacaagagtctacacggctgggcgcggtggctcatgcctgtaatcccagcactttgggaggccaaggtgggtggatcacaaggtcaggagttcgagaccagcctggccaacatggtgaaatcctgtctctattaaaaatacaaaaattagctgggcatggtggcgcgtgcatgtaatcccagctactcaggaggctgaggcaggagaattgcttgaaccggaac

SEQ ID NO: 23215 - DNA, 2016 bp, Homo sapiens
  SIMILAR (1302)..(1466): 721254mologous to Homo sapiens Homo sapiens secreted protein gene clone hk10_3,accession number W95632,Smith-Waterman Score=181.
atggctgcgcccttgtcagtggaggtggagttcggttcattcaccagccatttattgagtgcctaccatgtgccgggcagcaagccagacactgaggatacaaagataaatagaagtctgtccgtgccctacagcgttcagcatttctgccccttagaagggggaggtggtgcggagctcctgtttgacggtattaagaaacatcgatgtcactttgcctggacaggaggaaccctgggacatccggaacctgctcatctggatcaagaagaatttgctaaaagagcggccagagttgttcatccagggagacagcgtgcggccaggaattctggtgctgattaacgatgccgactgggagctactgggtgagctggactaccagcttcaggaccaggacagcgttcctctttcatctccactctgcacggcggctgagggcccttctctgggcctggggcaccctttagaggggagaacgaagcaattcagacatccccttggggccctgcttccaggtctccctgtcccccttgcctgccttcttccctgctctgtcccctaaagcttccctccagggcaggggaaaagaggccagggtgttaaaaatgagcttttttcaagcacgtgagcagcggaaggcagacaggcgccagagcccagcacttcccttttccagcagctgtggtgggggagggtttccccttcaagttttgtcaagagttgaaggaggctctgtggccagggtgacctggctgccttccactccttgtacctcagtctaaacatggagtggccgctgacaaggcgctccagccccagagccagcgtcttcatggggaagatgaatggacctgagtagctgaaggaaggcccctccctacccaaagactggaggcttctcagcctcaatttccctgtctgtacagctgagggctctgcctgtcccccactgctatcagtatgggaaccccagctgggttcccctatttgagtgccgacttccccccaaccgccagcagctgctcctccagccacacccctcctgctccccccacccctagcccttgaaccccctggctggccctgccccccgctcccacaggcccacccagatggggctccctgagaccctcccccaggcctgcttacagctcattctgcctgggggtagagatgaggggagggagtaagttaaccccttggactagcaagtagaagccctggggggatgcgtgtgccctcagtttcctcctccacaactgaatatttatagtggctgaaaactggggagatacttgatggcgcgaatgtccgttttctctcccttcccaccctcctgcaggaagcaggacggggcaggcagcaccctggtaggcacagtcgctttgcccctcctccccttcccttctggaagtcttggggcctcagtgcttgcaacagccggccttgggcaaataaaagactaggttgtttactagccttgcttggagcttcatccttgttataacgggtggcacctcatatccccccagccgtggtctgtgatacaacctctccatcctcagcctagggcctcagagctacccttcacccaaaagaggggtgggggtgaacactcagacaatctgagagggggtagtctaatagagccatctggagaagggagtggcagagccagtctgtgctgaccagtctgtgtcccgggacgcatccccacccgtctgtccaaggctttgtcccaccagctgcagccagcagcctcagaacccaaaatgagggtagcatagataagactgctgagccccctttctgtggtctttcctttccatgacctagagaaaagagctttgctggagggagacccccaaaaagaattagggtgctaacatcccaccaaaagcattcatcccacccaaaatgttgctttttcattctatgtcaataatttaaggtgggattttttttcaccctgtggagatgaaagtggaaaaggttgtccagcagtgttgggga

SEQ ID NO: 23216 - DNA, 4930 bp, Homo sapiens
  SIMILAR (3221)..(3970): 721254mologous to Mus musculus coronin-2,accession number AF143956,Smith-Waterman Score=1020.
caaacagcggcataacaaactatggagatctcattcagatagtgacctctcagaccaccacgaacccatctgcaaacctgggctagaactcaacaagaaggatatcaccacctcagcagaccagattgctgaggtgaagaccatggagagtcacccacccatacctcctgtctttgtggaacatatggtcccacaagatgcaaatcagaaaggcctgtgtaccaaagaaagaatgatctgcttggagtttacttctagggaatttcatgctggacagattgaggatgaattaaacttaaatgacatcaatggatgctcatcagggtgttgtctgaatgaatcaaaatttcctcttgacaattgccatgcatccaaagccttaattcagcctggacatgtcccagaaatggccaacaagtttccagacttaacagtggaagatttggagacagatgcactgaaagcagacatgaatgtccacctactgcctatggaagaattgacatctccactgaaagacccccccatgtcccctgatcctgagtcaccaagcccccaacccagttgccagactgaaatctcagatttcagtacagatcgcattgacttttttagtgccctagagaagtttgtggagctctcccaagaaacccggtcacgatctttttcccattcaaggatggaggaactgggtggaggaaggaatgagagctgtcgactgtcagtggtagaagtagccccttccaaagtgacagctgatgaccagagaagcagctctttgagtaatactccccatgcatcagaagaatcttcaatggatgaggaacagtcaaaggcaatttcagaactggtcagcccagacatcttcatgcagtctcactcggaaaatgcaatttcagtcaaagaaattgtcactgaaattgagtccatcagtcaaggagttgggcagattcaactgaaaggagacatcttacccaacccatgccatacaccaaagaagaacagcatccatgagctgctccttgagagggcccagactccagagaacaaacctggacatatggagcaagatgaggactcctgcacagcccagcctgaactagccaaagactcagggatgtgcaacccagaaggctgcctaaccacacactcatctatagcagacttggaagaaggggaaccagctgagggggaacaagagctccagggctcagggatgcacccaggtgccaagtggtaccctgggtctgtgaggcgagccaccttggagttcgaagagcgcttacggcaggagcaagagcatcatggtgctgccccaacatgtacctcattgtccactcgtaagaattcaaagaatgattcttctgtggcagacctagcaccaaaagggaaaagtgatgaagcccccccagaacattcatttgtcctcaaggaaccagaaatgagcaaaggcaaagggaaatacagtgggtctgaggctggctcactgtcccattctgagcagaatgccactgttccagctcccagggtgctggagtttgaccacttgccagatcctcaggagggcccagggtcagatactggaacacagcaggaaggagtcctgaaggatctgaggactgtgattccataccaggagtctgaaacacaagcagtccctcttccccttcccaagagggtagaaatcattgaatatacccacatagttacatcacccaatcacactgggccagggagtgaaatagccaccagtgagaagagcggagagcaagggctgaggaaagtgaacatggaaaaatctgtcactgtgctctgcacactggatgaaaatctaaacaggactctggaccccaaccaggtttctctgcacccccaagtgctacctctgcctcattcttcctcccctgagcacaacagacccactgaccatccaacctccatcctgagtagccctgaagacagaggcagcagcctgtccacagccctggagacagcagcaccttttgtcagtcatacaacccatttactgtctgccagtttggattacctgcatccccagactatggttcacctggagggcttcacagagcagagcagcactacagatgagccctctgcagaacaggttagctgggaagaaagtcaggagagccctctctccagtggcagtgaggtgccatataaggactcccagctaagtagcgcagacctaagtttaattagcaaacttggtgacaacactggggagttacaggagaaaatggacccattgcctgtagcctgtcgactcccacatagctctagtagtgaaaacataaagagtctcagccacagccccggtgtggtgaaggagcgtgctaaagaaatcgagtctcgagtggttttccaggcagggctcaccaaaccatcccaaatgaggcgctcagcttctctcgccaaattaggttacttggacctctgtaaagactgcttaccagagagggagcctgcctcctgtgaatcccctcatctcaaactgcttcagcctttcctcagaacagactcaggcatgcacgcgatggaggaccaagagtccctagaaaacccaggtgccccccacaacccagagcccaccaagtcttttgtagaacaactcacaacaacagagtgtattgtgcagagcaagccagtggagaggccccttgtgcagtatgccaaagaatttggttctagtcagcagtatttgctccccagggcaggacttgaattgactagttctgaaggaggccttcccgtgctacagacccagggactgcaacctgaggcatcgaatgggctaaaggtcagccagaagtcagagggctctcagccttcatccagccgcagccctttagagttcctgaaggaggcagagagccgcaggatcggccagagtgcggagctggacacccgggtcccagatactacagacacccggagaggtggctccttcgccctgaagccttcctcggccccctacgcactcgggccccttccgcagaggattcgcagcgtgagcgccccgcagcccgctcaggaccagatgcgagttcggtatcctgtggtggctgcagtcttggccccatacctggctttaagccaagatccaatggtcaagtcttctgcttctggacagggtgcctctgggagctacaaccacgtccgtgaagagatgctcatcaaggctggcggtgctatgagcagacgtgtggttcggcaaagcaagttccgccatgtgtttgggcaggcagcaaaggccgaccaggcctacgaggacatccgtgtgtccaaggtcacatgggacagctccttctgtgccgtcaaccccaaattcctggccattattgtggaggctggaggcgggggtgccttcatcgtcctgcctctggccaagacagggcgagtggataagaactacccactggtcactgggcacactgcccctgtgctggatattgactggtgtccacacaatgacaacgttatcgccagtgcctcagacgacaccaccatcatggtgtggcagattccagactatacccccatgcgcaacattacggaacctatcatcacacttgagggccactccaagcgtgtgggcatcctctcctggcaccctactgccaggaatgtcctgctcagtgcaggtggtgacaatgtgatcatcatctggaatgtgggcaccggggaggtgctgctgagcctggatgatatgcacccagacgtcatccacagtgtgtgctggaacagcaacggtagcctgctagccaccacctgcaaggacaagaccttgcgcatcattgaccccagaaaaggccaagtggtggcggagcaagcccggcctcacgagggcgcccgcccgctgcgggctgtcttcaccgcagacgggaagctgctcagcaccggcttcagcaggatgagtgagcggcaactcgcgctctgggacccggagaggtttgcggcccacgaggggatgaggcccatgcgggccgtcttcacgcgccagggccatatcttcaccacgggcttcacccgcatgagccagcgagagctgggcctgtgggacccgaacaacttcgaggagccagtggcactgcaggagatggacacaagcaacggggtcctattgcccttttacgatcccgactccagcatcgtctacctgtgtggcaaggtgctcacggccgggcagggagaacagggcactggatggagatgtggagggccttgtccgggcgcgcccctgaaccgactgattttgcagggcgacagcagcattcggtactttgagattaccgacgagccgcctttcgtgcactacctgaacacgttcagcagcaaagagccgcagcggggcatgggtttcatgcccaaaaggggactggatgtcagcaagtgtgagatcgcccggttctacaagctacacgaaagaaagtgtgaacctatcatcatgactgtgccccgcaagtcagacctcttccaggacgatctgtacccggatacgccaggcccggagccggccctagaagcggacgaatggctatccggccaggacgccgaacccgtgctcatttcgctgagggacggctatgtgccccccaagcaccgcgagctccgggtcacgaagcgcaacatcctggacgtgcgcccgccctccggcccccgccgcagccagtcggccagcgacgcccccttgtcggtaagatcggccctgctgcactctggcccaatctacatctcccccaaccgcccctatacgacacggcctctctgtcctccgccccagcagcagcacaccctggagacgctgctggaagagatcaaggccctccgcgagcgggtgcaggcccaggagcagcgcatcacggctctggagaacatgctgtgcgagctggtggacggcacggactag

SEQ ID NO: 23217 - DNA, 1900 bp, Homo sapiens
  SIMILAR (1775)..(1897): 531254mologous to Homo sapiens NY-REN-25 antigen,accession number AF155103,Smith-Waterman Score=109.
atgtcccgaaaggggccgcgagcggaggtgtgtgcggactgcagcgccccggtaggacctgattttgcattggcaatttcagaactggtcagcccagacatcttcatgcagtctcactcggaaaatgcaatttcagtcaaagaaattgtcactgaaattgagtccatcagtcaaggagttgggcagattcaactgaaaggagacatcttacccaacccatgccatacaccaaagaagaacagcatccatgagctgctccttgagagggcccagactccagagaacaaacctggacatatggagcaagatgaggactcctgcacagcccagcctgaactagccaaagactcagggatgtgcaacccagaaggctgcctaaccacacactcatctatagcagacttggaagaaggggaacagctgagggggaacaagagctccagggctcagggatgcacccagaattcaaagaatgattcttctgtggcagacctagcaccaaaagggaaaagtgatgaagcccccccagaacattcatttgtcctcaaggaaccagaaatgagcaaaggcaaagggaaatacagtgggtctgaggctggctcactgtcccattctgagcagaatgccactgttccagctcccagggtgctggagtttgaccacttgccagatcctcaggagggcccaggacctgaggcatcgaatgggctaaaggtcagccagaagtcagagggctctcagccttcatccagccgcagccctttagagttcctgaaggaggcaggagttcccaatcagacgctctcttctgggactccggatccatacttcatggccctcttgggacccaagctcaattctagaagaccacacctccaccccgtctcccacacgctcgacctaggcaatagccccccacttccccagcagtttgcaaaatgccagcgggggaggaaggggcccgagggcaagtatccgctgcactacctcgtgtggcacaaccgccaccgcgagctggagaaggaggtccgcgcgggccagaccctgatcactcagactctgagccaagccaaccccactgccatcactgcagaagaatacttcaaccccaactttgagctgggcaaccgtgatatgggccgccccatggaactgaccaccaagacacagaagttcaaggccaagctgtggctgtgtgaggagcatcccctgtccctgtgtgagcaggtggcccccatcattgacctcatggccgtcagcaatgcgctttttgccaagctccgggacttcatcaccctgcaaatcccgatcttccacatcctcaacgcccgcatcaccttcgggaacctcaacggctgcgacgaaccggtgccatcggtgcgaggcagccccagcagcgagacgccttccccaggcagcgactcctccagcgtcagcagctccagctccacgagtgaggccccccgcgagaacgcctgcccctcggctctccccggggtggcctcctgccgcggctgcgagatctccccagcgttgttcgaggccccgcgcggctacagcatgatgggcggccagcgggaggcggcgacccgggacgacgacgacgacctgctgcaattcgccatccagcagagcctgcttgaggcgggcagtgagtatgaccaggtcaccatctgggaggcgctaaccaacagcaagccaggcacccaccccatgtcctacgagggtcgccgacaggacagggccaggttccggcggccacgtgttccggagctacgacgagcagctgcggctggcgatggaactgtcggcgcaggagcaggaggagaggcggcggcgcgcgcgccaggaggaggaggagctggagcgcatcctgaggctctcactgaccgagcagtag

SEQ ID NO: 23218 - DNA, 905 bp, Homo sapiens
  SIMILAR (1)..(342): 981254mologous to Homo sapiens hepatocellular carcinoma- associated antigen 66,accession number AF244135,Smith-Waterman Score=575.
catgaactgaagcttctgtcagaatgccaatacaagcggttgagggtttcgttgctgtgttataacttcctgagggaagctctggaagtggcagtagctggaactgaattgtttagagactctgggacaatgtggcagctgaagctgcaggtgctgatcgagtcaaagagccctgacatagccatgctttttgaagaagcctttgtgcacctgaaaccccaggtttgtctgccattgtggatttcctgggcagagtggagtgaaggtgccaaaagccaagaagacactgaggcagtctttaagaaagctctcttagctgtcataggtgccgactcagtaacccctgaagaataagtacctggattgggcttatcgaagtggtggctacaaaaaggccagacctgtgtttaaaagtttacaggagagccgaccattttcagttgactttttcaggaaaatgattcattttgaaaaggggcaagaatcctgcaatatggcgaacataagagaatattatgagagagctttgagagagtttggatccgcagattctgatctttggatggattatatgaaagaagaattgaaccacccccttggtagacctgagaactgtggacagatctactggcgagcgatgaaaatgttgcagggagagtcagcagaggcatttgtagctaaacatgctatgcatcagactggccatttatgaagatgaagaataccgtccgctttgtgaaatagtattgcaagccagcccccgtgggcaaatttgttattgagtccatctgtaatttgctcagtgatggcagacaagatggctgtctggttttgagacacactttaattttatgttaacttgttaaatctttttaaaaattaaaaaatttttatgattgagaaaa

SEQ ID NO: 23219 - DNA, 2738 bp, Homo sapiens
  SIMILAR (69)..(1028): 851254mologous to Homo sapiens hepatocellular carcinoma- associated antigen 66,accession number AF244135,Smith-Waterman Score=1376.
aaaccgggagcttcctgctcgtgttcgctgttgagaagctacccgcggggttgtagacctcggacctcatggcagagataattcaggaacgcatagaagatcggctcccggaattggaacagctggagcgcattggactgttcagtcatgcggagattaaggctatcattaagaaggcttccgatctagagtacaaaatccagagaagaacccttttcaaggaagactttatcaattatgttcaacgcattggatattcatttaagaaggatgagattgagaattctattgtacaccgggtacaaggtgttttccagcgtgcctcagcaaaatggaaagacgatgttcaactttggctctcctatgtggctttttgtaagaagtgggctactaaaactcgacttagcaaggtattctctgccatgttggcgattcattccaacaaaccagctttgtggattatggcagccaaatgggaaatggaagatcgattgtcttcagaaagcgcaaggcaactatttcttccgcgcactgcgctttcatccagagtgcccaaaactttataaagaatactttaggatggagctgatgcatgctggaaaaactggaggaaggagaaggaagaatttgaaaaagccagtatggatgtggagaatcctgattattctgaagaaatccttaagggcgagttggcatggatcatctacaaaaattctgtaagcataattaaaggtgcagaatttcacgtgtcactgctttcgattgcacagctatttgactttgccaaagatctacaaaaagagatttatgatgaccttcaggctctacacacagatgatcctctcacttgggattatgtggcaaggcgagaattagagattgagtcacagacagaagagcagcctacaacgaaacaagccaaagcagtggaggtcggccggaaggaggagaggtgctgtgctgtgtatgaagaggcagtgaagactctgccaacaggtgaacttcaccaaaccatgaggttggaaagaaccatgactgtattcaggaaggcacatgaactgaagcttctgtcagaatgccaatacaagcagttgagtgtttcgttgctgtgttataacttcctgagggaagctctggaagtggcagtagctggaactgaattgtttagagactctgggacaatgtggcagctgaagctgcaggtgctgatcgagtcaaagagccctgacatagccatgctttttgaagaagcctttgtgcacctgaaaccccagaaagctctcttagctgtcataggtgccgactcagtaaccctgaagaataagtacctggattgggcttatcgaagtggtggctacaaaaaggccagagctgtgtttaaaagtttacaggagagccgaccattttcagttgactttttcaggaaaatgattcagtttgaaaaggagcaagctgattggcgcttctgcggcggatcctcgggcgggcagccgggccggcgcgtcacgtggcccacggcgtccagggcgaccagccgcgggccgcagggcatggaccttcaggccgccggggcccaggcgcagggggccgcggagccgtctcggggcccgccgctgcctagcgcgcggggggcgccccccagcccggaggtgagcgccgcgtgggggccaggagcaacagccagccgcagcctggggcgggaagtcgcggggccgggctgggcgggggccgcggggccggggaagcgcctctggccggcctcgggccgccccgcgacacggagcgctgtttgggctcgcgctcgagctgaaaacggccaggccgcggggccgcggggctgcggggcggggaaagccgagggcgtgggtgggcgctctgggtcagcagagacggctgtccgcccgctgggcgccgctgcggatttggtaaatgggagtctgtaccggctaggtgctgagcggcttgaagcccgtggaacacagagcattcctaatgacagtcctgcccggggtgagggcacccattctgaagaggaaagctttgccatggaatgaaggaggaactctgatggagaactgaatacctgggaagctgtcagaagggacaaactgtcgcacccaaggaacagcctggcgatctttttaatgaggactgggaactcggaattgaaagcagatcaaggggaatccatatgatgctgacgacatccaggagagcatttctcaagagctttaaaccttggggtgtgctgtgcccccacaaaggagaccatgatctatgaccccagctggccaccatccgccttccactgatacccctattattccaagatggtctttgaaacaggaccagtttgaacgatgcctgaaagatttgagtgtggaagctttcctgcccttgtaggtgggcgggccctcccacgtccaagatctcttttccctgtctttgaaggtgaaaagtcatatcctgagaaaatgtttgcagtgacccctagtctggggtacacaggaccagtgttccttattgacagtgttcaataaggccccgtcattctcgcccagtctgttgttggttcttaatgggctcctcccttgaaatgtgtgtgtgtttgtgtcaagaggagttgtgatctttgtaaataaaggttaaaaaggagataaaaagaaagaaaaaaaatttttgccccaaaggggggcggttaaaagataacggcggcggggatttgtgagaatatgccc

SEQ ID NO: 23220 - DNA, 444 bp, Homo sapiens
  SIMILAR (302)..(349): 931254mologous to Homo sapiens Sm D2,accession number U15008,Smith-Waterman Score=72.
cagcaacgcggaggaaacgggagtgaacggagagcgtagtgaccatcatgagcctcctcaacaagcccaagagtgagatgaccccagaggaagcgagaggaggaggaatttaacaccggtccactctctgtgctcacacagtcagtcaagaacaatacccaagtgctcatcaactgccgcaacaataagaaactcctgggccgcgtgaaggccttcgataggcactgcaacatggtgctggaggaacgtgaaggagatgttgactgagggtaccgctacatctccaagatgttcctgggcgggggatccagtcatcgtggtcctgcggaacccgctcatcgccggcaagtaggggccgcctgtctgttgacagaactcactcctctgtcctatgaagaccgctgccattggtgttgagaataataaagctctgtgtttttttct

SEQ ID NO: 23221 - DNA, 613 bp, Homo sapiens
  SIMILAR (71)..(427): 371254mologous to Homo sapiens Sm D2,accession number U15008,Smith-Waterman Score=123.
aagctggtctcaaactcctgacctcaaatgatccacccgcctcgaccttccaaagtgctgggattacaggagcctcttcaacaagccccaagagtgagatgacccccagaggagctgcagaagcgagaggagcgaggaatttaacacccggtcccactcctctgtgcctcacacagtccagtcaagaacaatacccaaagtgctcaatcaacttgcccgcaacaataagaaacttcctggggccgcgtgaaggcctttcgatagagcctcccctccctgttccccaccaggcacttgcaacatggtgctgggagaacgtgaaaggagatgtggacttgaggtacccaagaagtgggcaagggcaaggaaggaagttccaagccaagtcaacaaagaccggcttacatcttccaagatgtttcctggcggcgggggattcagttcattcgtggttccttgcgggaacccgtttcattcggccgggcaaattagggggccgcctgttttgtttgacaagaactcacatcctctggtcctattgaagaccgcttgccatttggtgtttgagaattattaaagctctgtgtttttttctaaaaaaaaaaaaaaaaaa

SEQ ID NO: 23222 - DNA, 791 bp, Homo sapiens
  SIMILAR (240)..(338): 721254mologous to Homo sapiens Human secreted protein, SEQ ID NO: 7926,accession number G03845,Smith-Waterman Score=100.
  misc_feature (1)...(791): n = a,t,c or g
aggatccttaataaattaatccccccccccccgctttcctttcgctgctgcggccgcagccatgcagtatgctcagggcttcagaatgaggctcgcctctaggtgacctccggctgtggcaagaagaaggtctggttagaccccaatgagacccaatgaaatcgccaatgccaacttccgttcagcagatcccggaaggctcatcaaagatgggctgatcatccgcaagcctgtgacgggtccattcccgggctcgattgccggaaaaaacacctttggcccggcgnaaagggcacggcacactgggcataggtaagcggaagggtacagccaatgccccgaatgccaaaagagggtcaccatgggatgaggagaatgaggattttggcgccggcttgctccagaagataccgtgaatctaagaagatcgattcgccacatgtatcacagcctgtacctgaaggtgaaggggaaatgtgttcaaaaacaaagcggatttctcatgggaacacatccacaaggctgaaggcagagcaaggccccgcaaagaagcttcctggcttgaccaggctgaggccccgcaggtctaaggaccaaggaaagcacggaaagcgccgtgaagagcggcttccagggcaaaggaaggaggagatcaatcaaagactttattccaaggagggaaggagacccagaaataaaaacctcacactttgatctgtacaatacatgacctctgtgattacatagaaacaaccattaaaataaaacaagccttaaaaaaaaaaaaaacc

SEQ ID NO: 23223 - DNA, 2850 bp, Homo sapiens
  SIMILAR (1)..(2847): 1001254mologous to Homo sapiens protocadherin alpha 11,accession number AJ007609,Smith-Waterman Score=4882.
atgtttggttttcagagaaggggattgggcaccccacgactacagctctggcttctcctcctcgaattctgggaggtggggagcggccagctccactactccgtctcggaggaggccaaacacggcaccttcgtgggccgcatcgcgcaggacctggggctggagctggcggagctggtgcagcgcctgttccgggtggcgtccaaaacacatggggaccttctggaggtaaatctgcagaatggcattttgtttgtgaattctcggatcgaccgcgaggagctgtgcgggcagagcgcggagtgcagcatccacctggaggtgatcgtggacaggccgctgcaggttttccatgtgaacgtggaggtgaaggacattaacgacaacccgccggtgttctcgctcagagaacaaaagctgctgattgcggaatctaagcaatcggactcgcgttttccactagagggagcttctgatgctgacattgaagagaatgctctattgacctacaggctaagtaaaaatgagtatttttctttagattcaccaacaaatggtaagcagattaaaagactgtcacttattttaaagaagtctctggatagagagaaaactccggaacttaatttgctgctaacagctacagacgggggaaaaccagagcttactggcaccgttcggctgttagtccaagtcttggatgtcaacgacaatgatccagagtttgataaatcagaatataaggtgagccttatggaaaatgctgctaaagaaactcttgtgctcaaactaaacgccacagaccgagacgaaggagtcaacggagaggtaacatactccttaatgtcaattaagcccaatggaagacacttatttacactagatcaaaataatggagaagtgagggtcaatggaactttagattatgaagaaaacaagttttataaaattgaagtacaggctacagataaggggactcccccaatggcaggtcactgtacagtctgggtggaaatcttggacaccaacgataactctcctgaagtcgccgtgacttccttgtccctcccagtacgagaggacgctcagcccagcacggtcattgccctgatcagcgtgtctgaccgtgactcaggtgtcaacggacaggtgacctgctcgctgacgccccacgttcccttcaagctggtgtccaccttcaagaattactactcgttggtgctggacagcgccctggaccgcgagaacgtgtgggcctatgaactggtggtgactgcgcgggatgggggttcgccttctctgtgggccacggccagggtatccgtggaggtggccgacgtgaacgacaatgcgcctgcgttcgcacagcccgagtacaccgtgttcgtgaaggagaacaacccaccaggctgccacatcttcacagtgtcggcgcgggacgcggacgcgcaggagaacgcgctggtgtcctactcgctggtggagcggcggttgggcgaccgcgcgctgtcgagctacgtgtcggtgcacgcggagagcggcaaggtgtacgcgctgcagccgttggaccacgaggagctggagctgctacagttccaggtgagcgcgcgcgatgcgggcgtgccgcctctgagcagcaacgtgacgctgcaggtgttcgtgctggacgagaacgacaacgcgccggcactgctggcgactcaggctggcagcgcgggaggcgcagttaacaagctagtaccgcggtcggtgggtgcgggccacgtggtggcgaaggtgcgcgcagtggatgcggactcaggctacaacgcgtggctttcatatgaattgcagccggcggcgggcggctcgcgcatcccgttccgcgtggggctgtacacgggcgagataagcacaacgcgtgccctggacgaggcagactcgccgcgccaccgacttctagtactggtgaaggatcacggtgagccggcgctgacggccacggccaccgtgctggtgtcgttggtggagagcggacaggcgccaaaggcctcttcccggactttggcgggcgccgcgagcccagaggctgcgctggtggatgtcaacgtgtacctgatcatcgccatctgcgtggtgtccagcctcctggtactcacgctgctgctgtatacggcgctgtggtggtcggcaacgcccactgagggcgcgtgcgcgccggggaagcccacgctggtgtgctcccgcgcggtggggagctggtcatactcgcagcagaggcggcagagggtgtgctctgaggagggcccacctaagacggacctcatggccttcagccccagtcttcctctaggtctgaataaagaggaggaaggggaaagacaggagccagggtcaaatcaccccggacagccacgacagcccaaccctgactggcgttactctgcctccctgagagcaggcatgcacagctctgtgcacctagaggaggctggcattctacgggctggtccaggagggcctgatcagcagtggccaacagtatccagtgcaacaccagaaccagaggcaggagaagtgtcccctccagtcggtgcgggtgtcaacagcaacagctggacctttaaatacggaccaggcaaccccaaacaatccggtcccggtgagttgcccgacaaattcattatcccaggatctcctgcaatcatctccatccggcaggagcctactaacagccaaattgacaaaagtgacttcataaccttcggcaaaaaggaggagaccaagaaaaagaagaaaaagaagaagggtaacaagacccaggagaaaaaagagaaagggaacagcacgactgacaacagtgaccagtga

SEQ ID NO: 23224 - DNA, 2826 bp, Homo sapiens
  SIMILAR (1)..(2823): 1001254mologous to Homo sapiens protocadherin alpha 12,accession number AF152308,Smith-Waterman Score=4814.
atggtgattatcggaccaagaggcccgggatcccagcgtctgctgctctcgcttctgctccttgcagcctgggaggtggggagcggccagctccactactccgtctacgaggaggccaaacacggcaccttcgtgggccgcatcgctcaggacctggggctggagctggcggagctggtgccgcgcctgttccgggtggcgtccaaaagacacggggaccttctggaggtaaatctgcagaatggcattttgtttgtgaattctcggatcgaccgcgagaagctgtgcgggcggagcgcggagtgcagtatccacctggaggtgatcgtggacaggccgctgcaggttttccatgtggacgtggaggtgaaggacattaacgacaacccgccggtgttcagagaaagggaacaaaaggtacctgtttctgaatctgcgcctctggactctcattttcctctagagggcgcttctgatgcggatatcggcgtaaactctcttttgacctatgcgttaagtctaaatgagaattttgagcttaaaataaaaacaaaaaaagataaaagtatattgcctgaattagttcttcggaagttattggacagagagcaaacgccaaaactcaatttattgctgatggtaatcgatggcggtaaaccagaactaacagggtctgtccagattcaaataaccgtcctggatgtgaatgacaatggtccggcgtttgataagcccagctataaagtagtgttgtctgaaaatgtccaaaacgacacaagagtgatccaactaaatgcttccgatccagacgaaggacttaatggagaaatttcctatgggatcaaaatgattttgccagtgagtgagaaatgtatgttttcaataaatccagacacaggtgaaattagaatttatggtgaactggattttgaagagaataatgcctatgaaattcaggttaacgccattgataaagggattccttccatggcaggtcacagcatggtcctggtggaagttctggacgtgaatgacaatgtccctgaagtaatggttacttcactgtcgctccctgtgcaagaggatgctcaggtgggtaccgtcattgccctgattagcgtgtcggatcgtgactctggagccaatggacaggtcatctgctcactgacacctcatgttcccttcaagctggtgtccacctacaagaattactactcgttggtgctggacagcgccctggaccgcgagagcgtgtcggcctatgagctggtggtgactgcgcgggatgggggctcgccttcgctgtgggccacggctagagtgtccgtggaggtggccgacgtgaacgacaatgcgcctgcgttcgcgcagcccgagtacacagtgttcgtgaaggagaacaacccgccgggctgccacatcttcacggtgtcggcatgggacgcggacgcgcagaagaacgcgctggtgtcctactcgctggtggagcggcgggtgggcgagcacgcactgtcgagctacgtgtcggtgcacgcggagagcggcaaggtgtacgcgctgcagccgctagaccacgaggagctggagctgctgcagttccaggtgagcgcgcgcgacgccggcgtgccgcctctgggcagcaacgtgacgctgcaggtgttcgtgctggacgagaacgacaacgcgccggcactgctggcgactccggctggcagcgcaggaggcgcagttagcgagttggtaccgcggtcggtgggtgcgggccacgtggtggcgaaagtgcgcgcggtggacgctgactccggctataacgcttggctgtcctacgagttgcaaccggcggcggtcggcgcgcacatcccgttccacgtggggctgtacactggcgagatcagcacgacacgcatcctggatgaggcggacgctccgcgccaccgcctgctggtgctggtgaaggaccacggtgagcccgcgctgacgtccacggccacggtgctggtgtcgctggtggagaacggccaggccccaaagacgtcgtcgcgggcctcagtgggcgctgtggatcccgaagcggctctggtggatattaacgtgtacctcatcatcgccatctgtgcggtgtccagcctgctggtgctcacgctgctgctgtacactgcgctgcgttgctcagcgccgcccaccgtgagccggtgcgcgccgggcaagcccacgctggtgtgctccagcgccgtggggagttggtcttactcgcagcagaggaggcagagggtgtgctctgcagagagcccgcccaagacggacctcatggccttcagcccaagccttcagctgtctcgagaagattgtttaaatcctcccagtgaaccacgacagcccaaccctgactggcgttactctgcctccctgagagcaggcatgcacagctctgtgcacctagaggaggctggcattctacgggctggtccaggagggcctgatcagcagtggccaacagtatccagtgcaacaccagaaccagaggcaggagaagtgtcccctccagtcggtgcgggtgtcaacagcaacagctggacctttaaatacggaccaggcaaccccaaacaatccggtcccggtgagttgcccgacaaattcattatcccaggatctcctgcaatcatctccatccggcaggagcctactaacagccaaattgacaaaagtgacttcataaccttcggcaaaaaggaggagaccaagaaaaagaagaaaaagaagaagggtaacaagacccaggagaaaaaagagaaagggaacagcacgactgacaacagtgaccagtga

SEQ ID NO: 23225 - DNA, 8035 bp, Homo sapiens
  SIMILAR (6)..(2423): 991254mologous to Homo sapiens protocadherin alpha 11 short form protein,accession number AF152476,Smith-Waterman Score=4067.
atgcgatgtttggttttcagagaaggggattgggcaccccacgactacagctctggcttctcctcctcgaattctgggaggtggggagcggccagctccactactccgtctcggaggaggccaaacacggcaccttcgtgggccgcatcgcgcaggacctggggctggagctggcggagctggtgcagcgcctgttccgggtggcgtccaaaacacatggggaccttctggaggtaaatctgcagaatggcattttgtttgtgaattctcggatcgaccgcgaggagctgtgcgggcagagcgcggagtgcagcatccacctggaggtgatcgtggacaggccgctgcaggttttccatgtgaacgtggaggtgaaggacattaacgacaacccgccggtgttctcgctcagagaacaaaagctgctgattgcggaatctaagcaatcggactcgcgttttccactagagggagcttctgatgctgacattgaagagaatgctctattgacctacaggctaagtaaaaatgagtatttttctttagattcaccaacaaatggtaagcagattaaaagactgtcacttattttaaagaagtctctggatagagagaaaactccggaacttaatttgctgctaacagctacagacgggggaaaaccagagcttactggcaccgttcggctgttagtccaagtcttggatgtcaacgacaatgatccagagtttgataaatcagaatataaggtgagccttatggaaaatgctgctaaagaaactcttgtgctcaaactaaacgccacagaccgagacgaaggagtcaatggagaggtaacatactccttaatgtcaattaagcccaatggaagacacttatttacactagatcaaaataatggagaagtgagggtcaatggaactttagattatgaagaaaacaagttttataaaattgaagtacaggctacagataaggggactcccccaatggcaggtcactgtacagtctgggtggaaatcttggacaccaacgataactctcctgaagtcgccgtgacttccttgtccctcccagtacgagaggacgctcagcccagcacggtcattgccctgatcagcgtgtctgaccgtgactcaggtgtcaacggacaggtgacctgctcgctgacgccccacgttcccttcaagctggtgtccaccttcaagaattactactcgttggtgctggacagcgccctggaccgcgagaacgtgtgggcctatgaactggtggtgactgcgcgggatgggggttcgccttctctgtgggccacggccagggtatccgtggaggtggccgacgtgaacgacaatgcgcctgcgttcgcacagcccgagtacaccgtgttcgtgaaggagaacaacccaccaggctgccacatcttcacagtgtcggcgcgggacgcggacgcgcaggagaacgcgctggtgtcctactcgctggtggagcggcggttgggcgaccgcgcgctgtcgagctacgtgtcggtgcacgcggagagcggcaaggtgtacgcgctgcagccgttggaccacgaggagctggagctgctacagttccaggtgagcgcgcgcgatgcgggcgtgccgcctctgagcagcaacgtgacgctgcaggtgttcgtgctggacgagaacgacaacgcgccggcactgctggcgactcaggctggcagcgcgggaggcgcagttaacaagctagtaccgcggtcggtgggtgcgggccacgtggtggcgaaggtgcgcgcagtggatgcggactcaggctacaacgcgtggctttcatatgaattgcagccggcggcgggcggctcgcgcatcccgttccgcgtggggctgtacacgggcgagataagcacaacgcgtgccctggacgaggcagactcgccgcgccaccgacttctagtactggtgaaggatcacggtgagccggcgctgacggccacggccaccgtgctggtgtcgttggtggagagcggacaggcgccaaaggcctcttcccggactttggcgggcgccgcgagcccagaggctgcgctggtggatgtcaacgtgtacctgatcatcgccatctgcgtggtgtccagcctcctggtactcacgctgctgctgtatacggcgctgtggtggtcggcaacgcccactgagggcgcgtgcgcgccggggaagcccacgctggtgtgctcccgcgcggtggggagctggtcatactcgcagcagaggcggcagagggtgtgctctgaggagggcccacctaagacggacctcatggccttcagccccagtcttcctctaggtctgaataaagaggaggaaggggaaagacaggagccagggtcaaatcaccccggacagaaaagggtgactgctcataaaatacctcaggcaagcgatcccttaaaactgattgtcccaactcagaggccctcattttctgcaatggtgattatcggaccaagaggcccgggatcccagcgtctgctgctctcgcttctgctccttgcagcctgggaggtggggagcggccagctccactactccgtctacgaggaggccaaacacggcaccttcgtgggccgcatcgctcaggacctggggctggagctggcggagctggtgccgcgcctgttccgggtggcgtccaaaagacacggggaccttctggaggtaaatctgcagaatggcattttgtttgtgaattctcggatcgaccgcgagaagctgtgcgggcggagcgcggagtgcagtatccacctggaggtgatcgtggacaggccgctgcaggttttccatgtggacgtggaggtgaaggacattaacgacaacccgccggtgttcagagaaagggaacaaaaggtacctgtttctgaatctgcgcctctggactctcattttcctctagagggcgcttctgatgcggatatcggcgtaaactctacttttgccctatgcgttaagtctaaatgagaattttgagcttaaaataaaaacaaaaaaagataaaagtatattgcctgaattagttcttcggaagttattggacagagagcaaacgccaaaactcaatttattgctgatggtaatcgatggcggtaaaccagaactaacagggtctgtccagattcaaataaccgtcctggatgtgaatgacaatggtccggcgtttgataagcccagctataaagtagtgttgtctgaaaatgtccaaaacgacacaagagtgatccaactaaatgcttccgatccagacgaaggacttaatggagaaatttcctatgggatcaaaatgattttgccagtgagtgagaaatgtatgttttcaataaatccagacacaggtgaaattagaatttatggtgaactggattttgaagagaataatgcctatgaaattcaggttaacgccattgataaagggattccttccatggcaggtcacagcatggtcctggtggaagttctggacgtgaatgacaatgtccctgaagtaatggttacttcactgtcgctccctgtgcaagaggatgctcaggtgggtaccgtcattgccctgattagcgtgtcggatcgtgactctggagccaatggacaggtcatctgctcactgacacctcatgttcccttcaagctggtgtccacctacaagaattactactcgttggtgctggacagcgccctggaccgcgagagcgtgtcggcctatgagctggtggtgactgcgcgggatgggggctcgccttcgctgtgggccacggctagagtgtccgtggaggtggccgacgtgaacgacaatgcgcctgcgttcgcgcagcccgagtacacagtgttcgtgaaggagaacaacccgccgggctgccacatcttcacggtgtcggcatgggacgcggacgcgcagaagaacgcgctggtgtcctactcgctggtggagcggcgggtgggcgagcacgcactgtcgagctacgtgtcggtgcacgcggagagcggcaaggtgtacgcgctgcagccgctagaccacgaggagctggagctgctgcagttccaggtgagcgcgcgcgacgccggcgtgccgcctctgggcagcaacgtgacgctgcaggtgttcgtgctggacgagaacgacaacgcgccggcactgctggcgactccggctggcagcgcaggaggcgcagttagcgagttggtaccgcggtcggtgggtgcgggccacgtggtggcgaaagtgcgcgcggtggacgctgactccggctataacgcttggctgtcctacgagttgcaaccggcggcggtcggcgcgcacatcccgttccacgtggggctgtacactggcgagatcagcacgacacgcatcctggatgaggcggacgctccgcgccaccgcctgctggtgctggtgaaggaccacggtgagcccgcgctgacgtccacggccacggtgctggtgtcgctggtggagaacggccaggccccaaagacgtcgtcgcgggcctcagtgggcgctgtggatcccgaagcggctctggtggatattaacgtgtacctcatcatcgccatctgtgcggtgtccagcctgctggtgctcacgctgctgctgtacactgcgctgcgttgctcagcgccgcccaccgtgagccggtgcgcgccgggcaagcccacgctggtgtgctccagcgccgtggggagttggtcttactcgcagcagaggaggcagagggtgtgctctgcagagagcccgcccaagacggacctcatggccttcagcccaagccttcagctgtctcgagaagattgtttaaatcctcccagtgaagacgccgattcgggctacaatgcgtggctttcgtatgaattgcagccggcggcgatagctctgaggtttttggagtgtaccatgctgtcttcctggcaaggaggcccaagaccgcggcaactactgctctggcttctgatcctcgcagcctgggagacgggtagtggccagctccactactccgtccccgaggaagcaaaacacggcaccttcgtgggccgcatcgctcaggacctggggctggagctggcggagctggtgccgcgcctgttccgggtggcgtccaaaagacacggggaccttctggaggtaaatctgcagaatggcattttgtttgtgaattctcggatcgaccgcgaggagctgtgtgggcggagcgcggagtgcagcatccacctggaggtgatcgtggacaggcctctgcaggttttccatgtggaggtgaaggtgagggacattaacgacaacccgcccatattccctgaaagcaagaaacgaataatcattgcagaatctagacctccggaaactcgatttccactagatggcgcatccgatgcagatattggagtaaactcggcattgacctaccgactggatcccaacgattatttcactttggacgcacaaaacagtcttgagcaaatgtcttcattatcacttgtactgaggaaaacactggacagagaggaaattccaggaaccatagtttaattacctgaacagcccagtgatggaggtaaacccgagcctgactggccacagttccagcctgcctcatcacgattctggacgtgaatgacaacgccccggaattttaccaatccgtttataaagtgacggtgttagagaacgccttcaatggaacattagtgatcaagctaaatgccacagatcctgatgatggtacaaatggagatatagtttactcatttagaaggcctgtatggcctgcagtggtatatgcatttaccataaatccgaacaatggagaaattaggacaaaaggcaaactagatttcgaagaaaagaaattatatgaaatatccgtggaggcagttgacaaaggaaatattccaatggcgggtcattgtacccttttggtggaagtactagatgtaaatgataacgccccagaggttaccatcacttctttgtcactccccatcagagaagacactcagcctagcgccattattgccctaatcagtgtgtccgatcgtgactctggctcaaatggacaggtcacctgcaccttgacgccgcatgtccccttcaagctggtgtccacctacaagaactactactcattagtgctggacagcgccctggaccgcgagagcgtatcagcctatgaactggtggtgaccgcgcgggacgggggctcgccttcgctgtgggccacggccagcgtgtcggtgggggtggccgacgtgaacgacaacgcgccggcgttcgcgcagcccgagtacacggtgttcgtgaaggaaaacaatccgccgggctgccacatcttcacggtgtctgctcaggacgcggacgcacaggagaacgcgctggtctcctactcgctggtggagcggcgggtgggcgagcgtgcgctgtcgagctacgtgtcggtgcacgcggagagcggcaaggtgtacgcgctgcagccgttggaccacgaggagctggagctgttgcagttccaggtgagcgcgcgcgactctggcgtgccgcctctgggcagcaacgtgacgctgcaggtgttcgtgctggacgagaacgacaacgctccggcgctgctgacgcccggggctggcagcgcgggaggcacagtgagcgagctgatgccgcggtcggtgggtgcaggccacgtggtggcgaaggtgcgcgcggtggacgccgattcgggctacaatgcgtggctttcgtatgaattgcagctggcggcggtcggcgcgcgcatcccgttccgcgtggggctgtacactggcgagatcagcacgacgcgccctctggacgaggtggacgcgccgcaccaccgccttctggtgctggtgaaggaccacggtgagcccgcgctgacggccacggcaacggtgctgttgtcgctggtggagagcggccaagcgccacaggcttcgtcgagggcgtcggcaggcgctgtgggtccagaagcggcgctggtggatgtcaatgtttacttgatcattgccatctgcgcggtgtccagcctgttggtgctcacgttgctgctgtatactgcgctgcggtgctcggcaccgcccaccgagggcgcgtgcgcgccgggcaagcccactctagtgtgctccagcgcggcagggagttggtcgtactcgcagcagaggcggccgagggtgtgctctggggagggcccgcataagacggacctcatggccttcagtcccagccttcctccttgtctgggttctgcagagggaacaggccagagggaggaggactcagaatgcttgaaagagccacgacagcccaaccctgactggcgttactctgcctccctgagagcaggcatgcacagctctgtgcacctagaggaggctggcattctacgggctggtcccaggagggcctgatcagcagtggcccaacagtatcccagtgcaacacccagaacccagaggcaggagaagtgtcccctcccagtcggtgcgggtgtcaacagcaacagctggacctttaaatacggaccaggcaaccccaaacaatccgagtcccggtgagttgcccgacaaattcattatcccaggatctcctgcaatcatcgtgcatgcggcaggagcctactaacagccaaattgacaaaagtgacttcataaccttcggcaaaaaggaggagaccaagaaaaagaagaaaaagaagaagggtaacaagacccaggagaaaaaagagaaagggaacagcacgactgacaacagtgaccagtgaggtcctcaaatgggaaacaagccacttagccagtttttgtaataatgggcaaatctctcccatgtaggcaattccctgctcctttttcctatcttacatggggccctctttaggagaccttcaggaattttgcaggaaagtttccctgtgtctgtctagaacgcatttaacaggttttgtcgtaaaagctttactaagtctggggttaactctttctctccactctggcttggt

SEQ ID NO: 23226 - DNA, 1680 bp, Homo sapiens
  SIMILAR (1363)..(1410): 931254mologous to Homo sapiens tripartite motif protein TRIM31 alpha,accession number AF230386,Smith-Waterman Score=73.
atgggggcaaaggatggccgtctactcagtgagtcctcacaaggtctttcctcatgtggagcatccctggtgcccttctgtgtgtccaaatctcgtcttcttatgaagacgccagtcagattagacaaagaaacagtatccacagtggactccggggctcctacagacttggcacagcttcctacagtcttgaaacagccctgttgttcctgtcatggccagtgggcagtttgtgaacaaactgcaagaggaagtgatctgccccatctgcctggacattctgcagaaacctgtcaccatcgactgtgggcacaatttctgccctcaatgcatcactcagattggggaaacatcatgtggatttttcaaatgtcccctctgcaaaacttccgtaaggaagagacgcaatcaggttcaactccgctgttgcggaaatctggtgggagaaaatccaagctctacaagcctctgaggtgcagtccaaaaggaaaagaggctacattgcccgaggcaccaggagatgttccactatttctgcgaggatgatgggaagttcctctgttttgtgtgtcgtgaatccaaggaccacaaatcccataatgtcagcttgatcgaagaagctgcccagaattatcaggggcagattcaagagcagatccaagtcttgcagcaaaaggagaaggagacagtacaagtgaaggcacaaggtgtacacagggtcgatgtcttcacggaccaggtagaacatgagaagcaaaggatcctcacagaatttgaactcctgcatcaagtcctagaggaggagaagaatttcctgctatcacggatttactggctgggtcatgagggaacggaagcagggaaacactatgttgaaattccactgatgcccacagttgaacgatctcaagaagctcgttgttacccctgaagaccaatggcagaactagccacccaggcagctgctggaggtatacaaagtcgtcttgtgcagctcaaccacatcttcctagaagtgaagagtttcagtttctcaacccaacccctgttcctctggaactggagaaaaaactcagtgaaggcaaaatcaagacacgactccatcacagggagcctgaaaaaattcaaagaccaactccaggctgataggaaaaaagatgaaaacagattcttcaaaagcatgaataaaaatgacatgaagagctgcggcagaactacatcggggccaccaaatcaccactcttcagccccatcccactccctgtttcgggcctcgtctgctgggaaagtcacttttccagtatgtctcctggcctcttatgatgagatttctggtcaaaggagcgagctctcaggatacggaagacatttgacgttgcgctgtccgaggagctccatgcggcactgacccctgtgacactggacgcagcctcggcccacccggatctcatcctttcccaggatgagatagtgacgctgaacctcgcatcccagggcggttcgcagaagcggggcaacccccgacgcttctacaggcggggcttcctggaggtggagcccttgaccggcttcgtggagctgcacagcagcggctcccagtgccaggcgctcatcgagagcggttcccgggaggatctcccgatctgtccgaacaaagtgggcgtccgcttggattactag

SEQ ID NO: 23227 - DNA, 744 bp, Homo sapiens
  SIMILAR (676)..(20): 371254mologous to Homo sapiens arylsulfatase A,accession number X52151,Smith-Waterman Score=289.
ggccattaactggacttctgccaggccagtaagccagtgctgggacccggtgccctccttcccaggtcgtctgcttggctggacttcctccttgacgagtttgccaaaatccagtgaagggacccacactgcccgctagctcacacttctgagcccacgggccattgtctcctgtaaaccagaggaatgtgttttccttcactgtgtggtcaactttgtccttgatctggcccaccagactgtccatctcccagagccctgcaccatacaggcttctgccccgtggcgctgctggtagctgagtcacaggtaagggcacgtgcatgtgggccagagccacatagagcaggaagggcctcccgctggtgcttgcacgctggatgaactgggttgctttctcagcatacttctgggcaaggctgctcaagttcaccggctgctccacaatgttgaggttttcataaagagggagggccacgtcagtgtaacagtctctttgaaggttccttgatggtccatcaccctgtggacacgctggacaaggagggtggttgtagcctggagtatcagtacagcccatatcatggctatatgggattccaaagtagtaatcaaaaccacggaagttggggtgataagagccgtggtgtccaagatgccatttgcacgggaaaccacagtgaaaggggaagacagcccatctccaggagcccggagaagcgtgagcctctgaattacaccacg

SEQ ID NO: 23228 - DNA, 645 bp, Homo sapiens
  SIMILAR (255)..(296): 501254mologous to Mus musculus SPR2G protein,accession number AJ005565,Smith-Waterman Score=40.
atggcttgctactgcccatcatttttcaatgccatattcggtgacatctccatagctggaaatcagccatggagacaccagatccatcatggtaccacttcctgctgcataggagctggtctcagtatcccctcaccacaggaatatgccctcaaggtgccaacacctgatctggtccaacccctcaactgtcaaggacacataaaggatgaccccagactcacacgggaaaccacagtgaaaggggaagacagcccatcaccaggagcccggagaagcctgagcctctgcccctcaaagagggctccacagacacagcaaccccacatgggctccttcactttgccctcccgcgctggggccctgcaaaggcaccaggaggcccagggtgcaggtgcaccgccccacatcgtctcagaaatgcccgcttcctgcctggtttcatcatcttcctctctggccaacatcagcagcccgcagttcaagcaccgagacacctacggggcagcaaatgaggaaactcagacaccctgctgctcctcggtctgcaaatgcgctcagtctgggggaataatcgggcaatgtgtggcaagagctctgacagtgtcagaactctctgatctgctcttccgctctgaggagtag

SEQ ID NO: 23229 - DNA, 456 bp, Homo sapiens
  SIMILAR (135)..(455): 971254mologous to Homo sapiens alphaCP-4,accession number AF176330,Smith-Waterman Score=529.
  misc_feature (1)...(456): n = a,t,c or g
agtttgataacataggaagngcgctgaattccgtgccagagcccagcatcaccctcacgctgcggatgctgatgcacgggaaggaagtgtgcagcatcatcgggaagaagggcgagactgtaaagcgaatccgggagcaggacctttgtgctgctcctgcaaatggtggaaatgtctccaggcctccagtgaccctgcgccttgtcatccctgccagtcagtgtggctcactgattgggaaggctggcaccaagatcaaggagatccgagagactacgggtgcccaggtacaggtggcaggggacctgctccccaactccacagagcgagctgttacggtatctggggtgcctgatgccatcatcctgtgtgtgcgccagatctgcgctgttatcctggagtccccacccaaaggagccactatcccctaccatccgagcctctccctatgtactg

SEQ ID NO: 23230 - DNA, 352 bp, Homo sapiens
  SIMILAR (228)..(335): 1001254mologous to Homo sapiens LYST-interacting protein LIP4,accession number AF141340,Smith-Waterman Score=198.
cactggctctccggtctccatcgccctggcccagtacctcatcactgcctgggccgccgccgggcttggcggcctacactgccaagatggcagcagctaatgggagtcagggaggagggcccgttgggtagctggggccaggcttctctccccaccacctgcagatttcttgctgcttccactgatacccttttgactggaatgaactggctgggcttgtcagggggcaccccaaagagggggcactgccaggtagctgggggagtggcatggggcaggggcccagttctcagcagcagacactctgtacagttttttcaatccctgtttttgaataaaaaatctcagcgac

SEQ ID NO: 23231 - DNA, 266 bp, Homo sapiens
  SIMILAR (249)..(109): 401254mologous to Homo sapiens Secreted protein 108-005-5-0- D6-FL,accession number Y59686,Smith-Waterman Score=84.
caggacaaatatgcttttttattgtgtctgtgagatgaaatgaggagtcctggctgggtctgaccctggcctctggcctccaatcccagaggctgtctccctggttcagggagggtggcggtccagactgtccaagctcatgccaggctgggagctgggagtgggttagttcaaggtagatggtcaaggaaggcaagccgagttcccaaaacctggaaggtcaagggccacggcccggtagccccctctgtgacagtagctgcagt

SEQ ID NO: 23232 - DNA, 454 bp, Homo sapiens
  SIMILAR (338)..(183): 711254mologous to Homo sapiens aminoacylase-1,accession number L07548,Smith-Waterman Score=179.
gtttttctttaaccagctgccaggagtaaccttggtcagcagcagagtctctggggaaagggttcctccctaacctggaggggctgcctcagtctatttacttggggaatggctggaggggttggggagccatttgggacagcagagtggggctcagctgggtgacaggggttggaggctggtttagagcacagtccccgtcccttaggccccgtcacaggctctggaaccaccgtcttctcaccatagtcaggcttgggctggacagtgcggatacgcaggtactggcggaagagcgtcaccgatgggtgctcctcctcgggacccttgctggtcatggcgctgcgcgtggtgagctggaaggtcaagggccacggcccggtagcccctctgtgacagtagctgcagtgtgcccagctgctcccacgtgtgagaggaattccaccacactggc

SEQ ID NO: 23233 - DNA, 3978 bp, Homo sapiens
  SIMILAR (2165)..(3259): 671254mologous to Homo sapiens alphaCP-4,accession number AF176330,Smith-Waterman Score=1119.
actagttctctctctctctctcttttcacttcccaggcaggacaaatatgcttttttattgtgtctgtgagatgaaatgaggagtcctggctgggtctgaccccagctggcctctggcctccaatcccagaggctgtctccctggttcagggaggggtggcggtccagactgtccaagctcatgccaggctgggagctgggagtgggttagttcaaggtaaatggtcaaggaaggcaagcaggacaaggtggaagtcttgcggcttgtggaggttaacaggcatggcctgcattgcgtagcttcaccacagagtgtttggggcaggtggcggacctgccggcaagttgactctcgaagccaggatgtggtccagctctccatacaggataagggttggagtctggaaggtcaagggccacggcccggtagcccctctgtgacaagtagctgcaagtgtgcccagctgctcccacgtgtgagagttaaaggcctttccatgaagcaagcaccacctccaccctgtgtgccttggttgagtgggagcacttcgcggtaaaagattgggcgagttgccaggggtgagaccagccaggactgtgacattggggtctccccagaggcaggaagtctgctcaatggggcctggcagccccacatacagtaggagcatgagcagcagactcaggcccagcagggctacctgggaccggctcatggaggtctgtaccacagtcgggcccaacgggatgagcgggcgggccccgcccaggcggaaccagcagccgcacagcgccccgaccatggctgcctccgcagctccgcgggccgctccggctctaggcggccaggagcgcggccatctcggcgcgcctgcgcactccgcagccgcgggcctgcaacccagttaccgagtcgtctgcgtggagggggtcaccgccagcacgcgcctgcttcccgtctgcgcgagtccacgcagctccccagagctagcgagccagaaccgtagtccgcggaagcaacctgaccgcgaggtcaacgcgttgggccccaggtggcagcgcgttgagcaccccgcatccccggcgggtcgcctttcccactgggcgcttcggtttccgcctctagaaaatgggctttccggtgtggaagcgcgcctgtggttccagctactggggggtgttctgtggcccctcatcatcgtggttttgaaccacaggcccttcaccagcacagcagcagcaggcatggcagcaagcgtggagcagcgcgagggcaccatccaggtgcagggccaggccctcttcttccgagaggccctgcccggcagtgggcaggctcgcttctctgtactgctgctgcatggtattcgcttctcctccgagacctggcagaacctgggtacactgcacaggctggcccaggctggctaccgggctgtggccattgacctgccaggtctggggcactccaaggaagcagcagcccctgcccctattggggagctggcccctggcagcttcctggcggctgtggtggatgccttggagctgggccccccggttgtgatcagtccatcactgagtggcatgtactccctgcccttcctcacggcccctggctcccagctcccgggctttgttgccagtggcccccatctgcactgacaaaatcaatgctgccaactatgccagtgtgaagactccagctctgattgtatatggagaccacggacccccatgggtcagaccagctttgagcacctgaagcagctgcccaaccacccgggtgctgatcatgaagggggcggggcacccctgttacctggacaaaccagaggagtggcatacagggctgctggacttcctgcaggggctccagctctggctcatgcacatgcaacagctgatgtcactcgcagttgtgagcggccgcctctcccggggacaatgtgggactgagcggcccagccgccgtgccgccgccgccgccgccgcaggacagccccagcgaggccatttccagcacatagaagagagattggaaaccaacgtgcagaactgccagtcccctgacacgctgtgccccacccactgcagcccagtgctgaatgaaccctgcccagaggtgtctgtagtcgctgtggccccagcctcgcctgacagaatgagcggctcggacgggggactggaggaggagccagagctcagcatcaccctcacgctgcggatgctgatgcacgggaaggaagtgggcagcatcatcgggaagaagggcgagactgtaaagcgaatccgggagcagagcagtgcccggatcaccatctccgagggctcctgccctgaacgcatcaccaccatcaccgggtctacagcagctgtcttccatgcagtctccatgattgctttcaaactggatgaggacctttgtgctgctcctgcaaatggtggaaatgtctccaggcctccagtgaccctgcgccttgtcatccctgccagtcagtgtggctcactgattgggaaggctggcaccaagatcaaggagatccgagagactacgggtgcccaggtacaggtggcaggggacctgctccccaactccacagagcgagctgttacggtatctggggtgcctgatgccatcatcctgtgtgtgcgccagatctgcgctgttatcctggagggcttctctgtccagggtcagtatggggctgtgaccccagctgaggtcaccaagctccagcagctctcaagccatgcggtcccctttgccacacccagcgtggtgccaggactggatcccggcacacagaccagctcacaggagttcttggttcccaacgatgtgagcaggggatgggatggctggaggttgattggctgtgtgatcgggcgccagggcaaccaagatcaacgagatccggcagatgtcaggggcacatatcaagatcgggaaccaaggcagagggcgctggggagcggcatgttcaccatcactggctctccggtctccatcgccctggcccagtacctcatcactgcctgtctagagacggccaagtctacctctggggggacgcccagctcggcccccgcagacctgcctgcccccttctcgccacccctgacggccctgcccacagcttcccccttggcctgctgggcacaccctatgccatctccctctccaactttaatcggctttaaagcccatgcccttcttggctttaccacctgcttccccagggccgccgccgggcttggcggcctacaccgccaagatggcagcagctaatgggagcaagaaggatgagcggcagaaattctccccctactgaggccagctgaggtacaggcaggggcaggcaggaccaccagcagggggcttgcctctgcaccctacccgcccaaggagactccaccctggggtcccaaacgccgctaacgcccagacgcatggattgcaccccctaccctgcctccatctatgggagttctttctctcagagtgggggcagttttctggccccaggggtctgaagctgcggccagccccagggcagggggccctaacctcctcaagctctgtgcttggaatacagggagccagcccaggagactccctaggtgcccccaacccatggcgggtgtcactcacgcactccccagtcccttagggcttcctggccctactgcatccttgtgggagtcagggagaaggggcccgttgggtagctggggcccaggcttctctccccacccacctgcagatttcttgctgcttccactgatacccttttgactggaatcgcactggctgggcttgtcagggggcaccccaaagagggggcactgcacaggtagctgggggagtggcatgggacaggggcccagttctcagcagcagacactctgtacagttttaacaataccctgtttttgaataaatattctcagcgcccagaaaaaaaaaaaaaaaaa

SEQ ID NO: 23234 - DNA, 363 bp, Homo sapiens; identical to SEQ ID NO: 817
  SIMILAR (40)..(150): 781254mologous to Homo sapiens Human secreted protein, SEQ ID NO: 5576,accession number G01495,Smith-Waterman Score=142.

SEQ ID NO: 23235 - DNA, 1148 bp, Homo sapiens
  SIMILAR (92)..(595): 511254mologous to Homo sapiens dJ261G23.3 (novel protein),accession number AL136131,Smith-Waterman Score=306.
cccacgcgtgcggggggcctcaaggctctggtgttcggctgtgggcgttttctccgtgggctactagcgggcccggcagcgaccagctgggtctcggcttccagctcgcgggttcagggaagtggtggagacccaagaagggaagacaactataattgaaggccgtatcacagcgactcccaaggagagtccaaatcctcctaacccctctgggccagtgccccatctgccagttggaacctgaagcacaagtataactatggacgatgttctgcttgcttagccagtttcatccggcctcatgggagggattgcttgccccgaaagattcacagggcctattgccaggggaaggaacaccgcaagattcgagggagtgttgttgaagatggcccaccgagcaggtctatttaccaaatcacaaggcctcggcttcctggaaggagtttgttcccgaagagcaaaccccaaactcaaccgggtaacttgacggcgctgggctcctggctcccgtcaaagcccatctacaaaaaaagggcccccggcttggaacaaggggttgcgcaatgccccgtttggggtcaacccctttcttgaagggacaatgtctggctaattcaagaaacaccttggaagctgtatcactgacagagagcagtgcttccagagttcctcctgcacctgtgctggggagtaggaggccccactcaccaagcccttggccacaactatactcctgtcccacccccaccacggatggccctggtccctcccaacatgcatggacaggggacagtgggactaacttcagtacccttggcctgcacagtagcaatgcttgggagctataagcaagccggggcatttggtccccttgccaactgctatgggggcttaggccatgctcagtgctggggacaggagttttgcccaacgcagtgtccataaaactgggttcgatgggcttacccattgggtgttgcgctcacttgcttttgggaagttgcagggggtcctggggcacattgccagctgggtgctgagcattgagtcactgatctcttgtgatggggccaatgagtcaattgaattcatgggccaaacaggtcccatcctcttcatgaaaaaaaaaaaaaaaaaaaaaaaaa

SEQ ID NO: 23236 - DNA, 681 bp, Homo sapiens
  SIMILAR (152)..(649): 981254mologous to Homo sapiens Human cell-cycle phosphoprotein CECYP-1,accession number Y16600,Smith-Waterman Score =843.
ccgcggggcctgtgacaccgcacgctgagctctgtgaggtagccgcttgcggagactgcaagcagccgcggcgcgcccggccctccctcttccgctgccgccgtgggaatggaaacatctgccccacgtgccggaagccaagtggtggctgacaactgcgcgccactccgcggcctaccgcgcagatcctctacgtgtgtcctcgcgagacaagctcaccgaaatggccgcgtccagtcaaggaaactttgagggaaattttgagtcactggaccttgcggaatttgctaagaagcagccatggtggcgtaagctgttcgggcaggaatctggaccttcagcagaaaagtatagcgtggcaacccagctgttcattggaggtgtcactggatggtgcacaggtttcatattccagaaggttggaaagttggctgcaacagctgtgggaggtggattttttctccttcagcttgcaaaccatactgggtacatcaaagttgactggcaacgagtggagaaggacatgaagaaagccaaagagcagctgaagatccgtaagagcaatcagatacctactgaggtcaggagcaaagctgaggaggtggtgtcatttgtgaagaagaatgttctagtaacatgggggatttttcggaggctttctgcttggcatggcatcctaag

SEQ ID NO: 23237 - DNA, 517 bp, Homo sapiens; identical to SEQ ID NO: 1402
  SIMILAR (517)..(407): 941254mologous to Homo sapiens low-Mr GTP-binding protein Rab31,accession number U59877,Smith-Waterman Score=188.

SEQ ID NO: 23238 - DNA, 760 bp, Homo sapiens
  SIMILAR (586)..(633): 811254mologous to Homo sapiens Human secreted protein, SEQ ID NO: 7420,accession number G03339,Smith-Waterman Score=67.
ctgaacttcctaagcccatgaattgggcttcatgcagcagaaccttggcctcctttttgttgcaggccgccagatcccacccttggacccccatgaaaatggaaacaatggaacaatcaaagttgagaagccaaccatgcaagccagccgccggtgctgttgacccaagggccgtggtccacggtacttgaagaagccagagcccacatcctgtgcactgctgaaggaccctacgctcggtggcctggcacctcactttgagaagagtgagcacactggctttgcatcctggaagacctgggagatactgggtgggagtgtgaacatttggctccacattacttatgcaaatttctgcagccagcttggatttctcctcagaaaatgggattttcttttctatcacattgccagactgcaaattttctaaacttttatgctctgcttcccttataaaaccaaatgcctttaacagcacccaagtcacctcttgaatgcttctctgcttagaaatttcttccgccaggtaccctaaatcatctctctcaagttgaaaattccagaaatctctagggcaagggcaaaatgctgccagtctctttgctaaaacataacaagagtcacctttgctccagttgccaacaagttccccatctccatctaagaccacctccgcctggactttattgtccatattgctatcagcattttgggcaaagccgttcaacaagtctctaggaagttccaaactttcccacat

SEQ ID NO: 23239 - DNA, 1280 bp, Homo sapiens
  SIMILAR (99)..(224): 801254mologous to Canis familiaris Rab22a protein,accession number Z22820,Smith-Waterman Score=172.
  misc_feature (1)...(1280): n = a,t,c or g
gagcgtggggcaaaggcgatagacgccggcggtgcgcgggcgcggcnggccccggaggatgctgctgagccccggcactgcctggctgcgagcacatgatggcgatacgggagctcaaagtgtgccttctcggggacactggggttgggaaatcaagcatcgtgtgtcgatttgtccaggatcactttgaccacaacatcagccctactattgggggcatcttttatgaccaaaactgtgccttgtggaaaatgacttcacaaagttcctcatctgggacactgctggtcaggaacggttttcattcattgggctcccattgtactattcgaggcttcagctggcagctgtttattcgtgttatggatatttaccaagcagggatttcatttttattaccttgaaagaaatgggtccaagcggctgaaagaacttggtccggaaaaacattgtaatggccatcgctggaaacaagtgcgacctctcagatatttagggaggttccccctgaagggatgctaaaggaatacggctgaatccataggtgccatcgtggttgagacaagtgcaaaaaatgctattaatatctgaagagctctttcaaggaatcagcccgccagatcccacccttggacccccccatgaaaaatgggaaacaatgggaccatcaaaagttgagaagccaacccatgcaagccagccgccggtgctgttgaccccaaggggccgtggtcccacgggtactttgaagaagccagagcccacatccctgtggcactgctgaaggaccctacgcttcggtgggcctgggcacctcactttgagtaagagtgaggcacactggctttgcatcctggaagacctgcagggggcggggcaggaaatgtacctgaaaaggattttagaaaaccctgggaaaacccaccacaccaccaccacaaaatggcctttagtgtatgaaattgcacatggaggggatgttagtttgcatttttgctaaaaaaaaaaaaaaaaacctttaaaaattgttggatgtgtacaaaagtcttactgccttattatgtgtatgggattctaaagtggcattccacttggatttcctgtgctacctatccaaattccaagtaactacttcaggggcattgcctttgttacctaaccacccttccctgaagggcaaatttagttcaggggggtagtttttacctacctttggaagaaaccctttatttattactttttggaggaaatcaaaaaaggggcaagggcccgcccctcaa

SEQ ID NO: 23240 - DNA, 428 bp, Homo sapiens
  SIMILAR (15)..(44): 901254mologous to Homo sapiens snRNP E protein (AA 1- 92),accession number X12466,Smith-Waterman Score=46.
ttgtgacttccaccatggcgtaccgcgcccagggccaaaaggtgccagaaggtgatggtgcagcccatcaaccttatcttcagatacttgcaaaatagatctcgaattcaggtgtggctgtatgaacaagtgaatatgcggatagaaggttgtattattggctttgatgagtacatgaacctcgtattagatgatgcagaagagattcattctaaaacaaagtcaagaaaacaactgggtcggatcatgctaaaaggagataatattactctgctccaaagtgtttccaactagcagtgaatggtgaagtctgtaggatgttgagaagaccccttgagcgtgtttaaagatgtctgctgcaacctgcatttactcaacttgttttacttgcacattattattagggtgacaataaatgctgtaggaag

SEQ ID NO: 23241 - DNA, 771 bp, Homo sapiens
  SIMILAR (151)..(351): 621254mologous to Homo sapiens small nuclear ribonucleic protein,accession number M21259,Smith-Waterman Score=179.
ggcacgagagttgctctcagaggcagcgtgcgggttgtgctctttgtgaaaattcccacccatggcggtcccgtggcccaggggtccagaaaagtgcagaagggttatggtgccagcccatctgcagaacctcatcctccagatacttaccaaaataggatcgccggattccaggtgtggctctatgagcaagtgaatatgccggatagtaaggctgtatcattggttttgagtgagtatgtgaaccttgtattagatgatgcagaagagattcattctaaaacaaagtcaagaaaaacaactgggtcgtgatcatgctaaaacggagataatattactctgctacaaacgtgtctcccacctagaatggtccatggaagtggagaaattgtttgaaaaaggatacagtttgtttttaagatgtccttttgtcccatgttgaacatttattccatattgttttgattaccctcgtcgttactacatagatggcaataaatacgtatgggattgtttgtattaaaaaatttacattgcttcttactattcagcagtagaaactttttacacagtaacaccattcgttgttggtatttagttttctgaagggtcgcagttgccttgagcacttggtattcgcagagcttggacctgtagatttttaggcagattaggaattctgcctgatgggtaagcttccagtattgggaggtggagaaggggagggttcagaaaaataaataagagttattgctctaaaaagaattaaaa

SEQ ID NO: 23242 - DNA, 476 bp, Homo sapiens
  SIMILAR (404)..(475): 1001254mologous to Homo sapiens unnamed protein product,accession number AK001851,Smith-Waterman Score=127.
  misc_feature (1)...(476): n = a,t,c or g
cccttgcctggctcctgtggtggcaggctgngcacgaggaccatgctgggccggagcctccgagaagttatataccaccttataatgctacagtagttcagaagttgttggatcagggagctctactaatgggaaaaacaaatttagatgagtttgctatgggatctgggagcacagatggtgtatttggaccagttaaaaacccctggagttattcaaaacaatatagagaaaagaggaagcagaatccccacagcgagaatgaagattcagactggctgataactggaggaagctcangtgggagtgcagctgctgtatcggcgttcacatgctacgcggctttaggatcagatacaggaggatcgaccagaaatcctgctgcccactgtgggcttgttggttcaaaccaagctatggcttagtttcccgtcatggtctcattcccctggtgaattcgatggatgtgccaggan

SEQ ID NO: 23243 - DNA, 748 bp, Homo sapiens
  SIMILAR (748)..(20): 1001254mologous to Homo sapiens unnamed protein product,accession number AK001851,Smith-Waterman Score=1234.
aatttgtaagatatgtttactgttttagagagacagaggctaacttttcattttcaaggactgctgaacaatcatccatgagttcttgaagttgaataacaggaaactgtacttgtttttcaaaccatttggctactgtaagaagctgctggtcacaaaacgcacgtccaataaactgtagtcctattggcaacccttggtttgagagtgcaacagggatactcactgctggcaatcctgccatatttacagcttgtgtaaaaatatcatcctgggcacttcgggttctgttgtcctctttgatgaactccaagtatggtactgcctcactcaaggtggtgggagttagcaagacatctactccagagttaaaagcatttacaaagtcattagcaatgaggcgtctcactttctgtgctttgacaaaataattttcatagttttcttttaataagaaaaagtttcctgagagaattcttcctctcaccacatcattaaacccttctcgtctggttgcagcatacatggcttcagtggacacatcaatgtcacatctgtgaccatattgtagcccatcaaatcttgccatattcgatgccacttctgatgtgcacaatacatggtagcagacaattgaataactggtgtgaggaagggatacttcaattactttggccccctcagactcaaagaggtcagcagctttggaccaaagagactgtacttcacttgataattccggtacaag

SEQ ID NO: 23244 - DNA, 963 bp, Homo sapiens
  SIMILAR (125)..(385): 871254mologous to Homo sapiens unnamed protein product,accession number AK001851,Smith-Waterman Score=375.
gcgcgatcgagaccctattgagtgccgtggaattcggctgcgcccatgtaacatcactagcgaccggtgacctctttttcccccttgcctgtctcctgtggtggcaggctgggcacgaggacacatgctgggccagagccaccaacaagttgctgccccactgaaacaccgtccaattacaccaacagagctctgtcaaaaatgtctctctcttatcaagaagaccaagtttctaaatgcctacattactgtgtcagaagaggtggccttaaaacacgctgaagaatcagaaaagagatataagaatggacagtcacttggggatttagatggaattcctattgcagaaaaagacaatttcagcacttctggcattgagacaaccatgtgcatcaaatatgttgaaaggttatataccaccttataatgctacagtagatcagaagttgttggatcaaggagctctactaatgggaaaaacaaaattaaatgattttgctatgggatctgggagcacagatggtgtatttggaccagttaaaaacccctggagttattcaaaataatgactttgcaaatgcttttaactctggagcagacgtcttcctaactcccaccatcttaagtgaggcagtaccatattcggagttcatcaaagtagacaacagaacacgaagttcccagaatgatatttttacacaagctgtaaatatggcaggattgccagcagtgagtatccctgctgcactctcaaaccaagggttgccagtaggactgcagttttttgaacatgcattttgtgaccagcagcttcttacagtagccaagtggtttgaaaaacaagtacagtttcctgttattcaacttcaggaattcatggatgattgttcatcaatgatcactcagtagggcacatcactcagtagggcaggaagaaatttctggattcttctcattctacct

SEQ ID NO: 23245 - DNA, 1300 bp, Homo sapiens
  SIMILAR (406)..(759): 821254mologous to Bos taurus neurocalcin,accession number D10884,Smith-Waterman Score=476.
  misc_feature (1)...(1300): n = a,t,c or g
gctgccgctgctgccgccgcctcgcccgaagcgacacagacgctgggatcggccttagcgagagatttcttctgacttgagcctgcagtgtgctgtgagagatctaccactagattatctcaactttggtctcctgggaccactcgttgctgacagggagaggttgcagggcatctgatctcctggtgttaaaatctgtcgtgataccgaggaaggccccgagatcccaggcactgagtgactgcatactctgaattcttgccgccaggatggggaaacagaacagcaagctgcgcccggaggtcatgcaggacttgctggaaagcacagactttacagagcatgagatccaggaatggtataaaggcttcttgagagactgccccagtggacatttgtcaatggaagagtttaagaaaatatatgggaactttttcccttatgggggatgcttccaaatttgcagagcattgtcttcccgaactttcgatgcaaatggagatggggacaatagactttagagaattcatcatcgccttgagtgtaacttcgagggggaagctggagcagaagctgaaatgggccttcagcatgtacgacctggacggaaatggctatatcagcaaggcagagatgctagagatcgtgcaggcaatctataagatggtttcctctgtaatgaaaatgcctgaagatgagtcaaccccagagaaaagaacagaaaagatcttccgccagatggacaccaatagagacggcacttgggtcccccacctggcgctgatctatagaacagcagaaggcggcttcgcagtacagagagcctctgtctccttttatcccccgcccagtgctggcaatgccatggtgaatgaggcagcagtgttcctggagattccactgggctcttccccgggacaggtgagtgctgtgtgtcacagtggcagaaaactctccctggaagagttcatccgaggagccaaaagcgacccgtccattgtgcgcctcctgcagtgcgacccgagcagtgccggccagttctgagccctgcgcccaccaatcgaattgtagagctgcttgtgttcccttttgattcttctttttaacaannnnnnnnnnnnnnngccaaacaatataaagggggaggccgccccctggggggtttgaggccccttcttcggggacgccttaagttttttttgtcggggatgcttcggggaaaggcccaaacccccagggtgtttggggaaaacatggacaaacttcgggggggtcattgttggaggattttaaaccgttt

SEQ ID NO: 23246 - DNA, 721 bp, Homo sapiens
  SIMILAR (605)..(721): 431254mologous to African swine fever virus pKP93L,accession number U18466,Smith-Waterman Score=68.
atggatgggaatttgagaaaaataagatttgaaaaacatgccattactgaggagtttaggaccacagaacctggacttgcagcattgaggttgccaagcacctggataaggggagtgagaacaagtgagagcaagagagaggttggaaaagggggacaaagccaacagtatgaaaacagagacacagaaggagaaggccatgtgatgacaaaggcaagagactggagtaaagcagctgcaagccaacgactgccagcaaaccatctgaagctaaggctctgcatcgatggctttcggtcccattccctccctgaagaggggcccaagaagccctgtcagcatcatgcagcacaggaagagccatgcacacgcagtggccgtttgccccaagcccatgaggggtcaatctcagactgttgcactagcagtgagcaaggctccatggacataggatctgtcgagccaggcacaggatataatctcctggtgtgccatttgctaagactttggaaaagcgcagtatttgggcaggagtgtcccgtttttccaggtaccatctgtcacggcttcccttggctaggaaaaggaaatcccctgactccttgcgcttcccagttactccttcccctaccgtccacaacccaaaaacgacaatctggtcatgccctttactccttcccctaccgtccacaacccaaaaacgacaatctggtcatgccct

SEQ ID NO: 23247 - DNA, 692 bp, Homo sapiens
  SIMILAR (143)..(409): 391254mologous to Homo sapiens Human secreted protein, SEQ ID NO: 5800,accession number G01719,Smith-Waterman Score=102.
cttccgtgcccctcacttgctcatgggcccatgcctagccctgattcgttggacagagcctttgtagacccttgtctgagaccgagctatgtggggcgacctctggctcctcccgcctgcctctgccaatccgggcactgggacagaggctgagtttgagaaagctgcagaggaggttaggcaccttaagacccaagcccatcggatgaggagatgctgttcatctatggccactacaaacaagcaactgtgggcgacataaatacagaacggcccgggatgttggacttcaacgggcaaggcacaagtgggatggcctggaatgagctgaaagggacctccaagggagatgccgtggaagccttacctcaaccaagttagaagagctaaagaaaaaatacggggatatggagagactggatttggttactgtgccatgtgtttatcctaaacctgagacaatccctttttttttttctaataccgtggatgggtgggaattccgggaaaataacccagttaaaccagctactcaaaggctgctcacccatacgggctcctaaccagattaagggggctaaaacgattactgactttccttgagtagtttttatctgaaaatcaattaaaaagtgtatttgttactttaaaaaaaaaaaaaaaaaaaaaaaaaaaaagatgcggccgcaagc

SEQ ID NO: 23248 - DNA, 3871 bp, Homo sapiens
  SIMILAR (552)..(1040): 781254mologous to Homo sapiens 07-JUN-1995 Wild type keratinocyte growth factor coding sequence,accession number T14334_cd1,Smith-Waterman Score=615.
acgcgctcacacacagagagaaaatcctttctgcctgttgatttatggaaacaattatgattctgctggagaacttttcagctgagaaatagtttgtagctacagtagaaaggctcaagttgcaccaggcagacaacagacatggaattcttatatatccagctgttagcaacaaaacaaaagtcaaatagcaaacagcgtcacagcaactgaacttactacgaactgtttttatgaggatttatcaacagagttatttaaggaggaatcctgtgttgttatcaggaactaaaaggataaggctaacaatttggaaagagcaactactctttcttaaatcaatctacaattcacagataggaagaggtcaatgacctaggaggtaacaatcaactcaggattcattttcattatgttattcatggaacacccggagcactacactataatgcacaaatggatactgacatggatcctgccaactttgctctacagatcatgctttcacattatctgtctagtgggtactatatctttagcttgcaatgacattgactccagagcaaatggctacaaatgtgaactgttccagccctgagcgacacacaagaagttatgattacatggaaggaggggatataagagtgagaagactcttctgtcgaacacagtggtacctgaggatcgataaaagaggcaaagtaaaagggacccaagagatgaagaataattacaatatcatggaaatcaggacagtggcagttggaattgtggcaatcaaaggggtggaaagtgaattcctatcttgcaatgaacaaggaaggaaaactcctatgcaaagaaagaatgcaattgaagatttgtaacttcaaagaactaattctggaaaaccattacaacacatatgcctcagctaaattgggacacacaacggaggggaaatgtttgttgccttaaatcaaaaggggattcctgtaagaggaaaaaaaacgaagaaagaacaaaaaacagcccactttcttcctatggcaataacttaattgcatatggtatataaagaacccagttccagccagggagatttctttaagtggactgttttctttcttctcaaatttttctttccttttattttttagtaatcaagaaaggctggaaaaactactgaaaaactgatcaagctggacttgtgcatttatgtttgttttaaggcactgcattaaagagacatttgaaaagtatacacaaaaatcagatttagtaactaaaggttgtacaaaattgtaaaactggttgtacaatcatgatgttagtaatagtaatttttttcttaaattaatttaccctttaagagtatgttagatttgattatctgataatgattatttaaatattccctatctgcttataaaatggctgctataataataataatacagatgttgttatataaggtatatcagacctacaggcttctggcaggatttgtcagataatcaagccacactaactatggaaaatgagcagcattttaaatgctttctagtgaaaaattataatctacttaaactctaatcagaaaaaaagaatattctcaaaaaaatctattacgaaagtcaataaaatagataatttaacaaaagtacaggattagaacatgcttatacctattaacaagaacaaaatttctaatgctgctcaagtggaaagggtattgctaaaaggatgtttccaaaaatcttgtatataagatagcaacagtgattgatgataatactgtacttcatcttacttgccacaaaataacattttataatttctcaaagtaaaattgagaaatctttaagtttttttcaagtaacataatctatctttgtataattcgtatttgggaatatggcttttaataatgttcttcccacaaataatcatgcttttttcctatggttacagcattaaactatattttaagttgtttttgaactttattgttttgttatttaagtttatgttatttataaaaaaaaaaccttaataagctgtatctgtttcatatgcttttaattttaaaggaataacaaaactgtctggctcaacggcaagtttccctcccttttctgactgacactaagtctagcacacagcacttgggccagcaaatcctggaagcagacaaaaataagagcctgaagcaatgcttacaatagatgtctcacacagaacaatacaaatatgtaaaaactctttcaccacatattcttgccaattaattggatcatataagtaaaatcattacaaatataagtatttacaggattttaaagttagaatatatttgaatgcatgggtagaaaatatcatattttaaaactatgtatatttaaatttagtaattttctaatctctagaaatctctgctgttcaaaaggtggcagcactgaaagttgttttcctgttagatggcaagagcacaatgcccaaaatagaagatgcagttaagaataaggggccctgaatgtcatgaaggcttgaggtcagcctacagataacaggattattacaaggatgaatttccacttcaaaagtctttcattggcagatcttggtagcactttatatgttcaccaatgggaggtcaatatttatctaatttaaaaggtatgctaaccactgtggttttaatttcaaaatatttgtcattcaagtccctttacataaatagtatttggtaatacatttatagatgagagttatatgaaaaggctaggtcaacaaaaacaatagattcatttaattttcctgtggttgacctatacgaccaggatgtagaaaactagaaagaactgcccttcctcagatatactcttgggagagagcatgaatggtattctgaactatcacctgattcaaggactttgctagctaggttttgaggtcaggcttcagtaactgtagtcttgtgagcatattgagggcagaggaggacttagtttttcatatgtgtttccttagtgcctagcagactatctgttcataatcagttttcagtgtgaattcactgaatgtttatagacaaaagaaaatacacactaaaactaatcttcattttaaaagggtaaaacatgactatacagaaatttaaatagaaatagtgtatatacatataaaatacaagctatgttaggaccaaatgctctttgtctatggagttatacttccatcaaattacatagcaatgctgaattaggcaaaaccaacatttagtggtaaatccattcctggtagtataagtcacctaaaaaagacttctagaaatatgtactttaattatttgtttttctcctatttttaaatttattatgcaaattttagaaaataaaatttgctctagttacacacctttagaattctagaatattaaaactgtaaggggcctccatccctcttactcatttgtagtctaggaaattgagattttgatacacctaaggtcacgcagctgggtagatatacagctgtcacaagagtctagatcagttagcacatgctttctactcttcgattattagtattattagctaatggtctttggcatgtttttgttttttatttctgttgagatatagcctttacatttgtacacaaatgtgactatgtcttggcaatgcacttcatacacaatgactaatctatactgtgatgatttgactcaaaaggagaaaagaaattatgtagttttcaattctgattcctattcaccttttgtttatgaatggaaagctttgtgcaaaatatacatataagcagagtaagccttttaaaaatgttctttgaaagataaaattaaatacatgagtttctaacaattaga

SEQ ID NO: 23249 - DNA, 1340 bp, Homo sapiens
  SIMILAR (200)..(547): 351254mologous to Homo sapiens dJ1162C3.1 (Prefoldin 4 (C- 1)),accession number AL133335,Smith-Waterman Score=128.
cccacgcgtccggacggaatgaggagacagtgttgtatttttgcggggagttctaggccgaccgggagcgagagaacgctcgggggcgaagcgcgccattgcggccctccccgccgactgcggtagtccagtcccaagatggcggccaccatgaagaaggcggctgcagaagatgtcaatgttactttcgaagatcaaccaaaagataaacaaatttgcacggaatacaagtagaatcacagagctgaaggaagaaatagaagtaaaaaaagaaacaactccaaaacctaggaagatgcttgtgatgacatcatgcttgcagatgatgatttgcttaattgataccttatccaattgggtgatgtcttcattagccattctcaagaagaaacgcaagaaatgttagaagaagcaaagaaaaatttgcaagaagaaattgacgccttagaatccagagtggaatcaattcagcgagtgttagcagatttgaaagttcagttgtatgcaaaattccgggagcaacataaaccttgaagctgatgaaagttaaacattttataatactttttttatttgtttaataaacttggaatattgtttaaaatgataattttccttcttcaaatgacatggaaagcaaaactttcttttttaaaaattttcatttatttaatggaaacttgcccattttcacatgtctgcctcatttatttttaatttttaaaagaagacagtattcacctatgtattttgcataacgattatatcaagtctaggggcttcatgtcatgttattaaaatcagttaagcaatcttttatgtttctatattatttagaatatttgttgttgcaatttttcgacataagaaaatttaacagttgtgtcatgttgtttctgtctgattttaattgctgtctaatgacggggaaagcacgatgaaaagatgtacaatcctgcatccttgcttatttcacaactaaagctttgtcatagactttaaaataatatatgtatatattttatttaaatatatgttacatattatatttaaacatacatatttaacattttttacatatctatcaatatcagagatttggggtaaaagaatgggtaatggttaaaacatgtggaggcatgtggagctttatacaaaacagggcagaacccacagaagaacggtttagaaacccaagagatgtgcagaaagaaatgtttagtgttttttccgttttaaattttagattttattttagtgctttgtaattaattggggtttatattgataaagatgtggaagttaaacagctatgtatgtaaaagtaaggcttatttctt

SEQ ID NO: 23250 - DNA, 2265 bp, Homo sapiens
  SIMILAR (736)..(1755): 991254mologous to Homo sapiens colon cancer antigen NY-CO- 45,accession number AF039442,Smith-Waterman Score=1785.
atggaatatgaaagtatggtgatttcttttgatgatagagtcatggagaagactgagtatggaccaatatttacagtctttgctatgggaaaccgaatgacctttgttactgaagaagaaggaattaatgtgtttctaaaatccaaaaaagtagattttgaactagcagtgcaaaatatcgtttatcgtacagcatcaattccaaagaatgtctttttagcactgcatgaaaaactctatattatgttgaaagggaaaatggggactgtcaatctccatcagtttactgggcaactgactgaagaattacatgaacaactggagaatttaggcactcatgggacaatggacctgaacaacttagtaagacatctcctttatccagtcacagtgaatatgctctttaataaaagtttgttttccacaaacaagaaaaaaatcaaggagttccatcagtattttcaagtttatgatgaagattttgagtatgggtcccagttgccagagtgtcttctaagaaactggtcaaaatccaaaaagtggttcctggaactgtttgagaaaaacattccagatataaaagcatgtaaatctgcaaaagataattccatggactcagatgaggatcctgttaacctacagagtaggtcagcgttggtgtgtgagatgttgcatgtccaacggtcctctagtgatgctgatgctattggtccccacgcagaccacagcttaagtaacagatgggaagttattcttgctgatgaacatgggatcatagcagatgatatgattagcaggtatgctctcagtgaaaaatctcaagtagaactttctacccaagtaattaaaagtgccagttcaaagtctgttaacaaatcagacattgacacttcagtatttcttaactggtataatccagaaaaaaaaatgataagagcttatgccactgtgatagatggacctgagtacttttggtgtcagtttgctgatacggagaaacttcagtgtttagaagtagaagtacagactgctggagaacaggtagcagacaggagaaattgtatcccatgtccttatattggagatccttgtatagtaagatacagagaagatggacattattatagggcacttatcactaatatttgtgaagattatcttgtatctgtcaggcttgtggactttggaaacattgaagactgtgtggacccaaaagcactctgggccattccttctgaacttctgtcggttcccatgcaagcctttccatgttgcctctcagggtttaacatttcagaaggattatgttctcaagagggaaatgactatttctatgaaataataacagaagatgtgttggaaataacaatactagaaatcagaagggatgtttgtgatatccctttagcaattgttgacttgaaaagcaaaggtaaaagtattaatgagaaaatggagaaatattctaagactggtattaaaagtgctcttccctatgaaaatattgactcagagataaagcagactcttgggtcctacaatcttgatgtaggacttaagaaattaagtaataaagctgtacaaaataaaatatatatggaacaacagacagatgagcttgctgaaataactgaaaaagatgtaaacattattggaaccaaaccaagtaacttccgtgaccctaaaactgataacatttgtgaagggtttgaaaacccctgcaaagataaaattgatactgaggaactggaaggagttagtcagaaagcacaggaatccatgtgtactgaggacatgagaaagtcaagttgtgtagaatcttttgatgaccagcgcaggatgtcattgcatctacatggagcagattgtgatcctaaaacacagaatgaaatgaatatatgtgaagaagaatttgtagagtataaaaacagggatgccatttcggcattgatgcctttgttctctgaggaagaaagcagtgatggaagcaagcacaataatggtttaccagatcatatctcagctcaactacagaacacctacactctgaaagcctttactgttggatctaaatgtgttgtgtggtcaagtctaagaaacacatggtctaaatgtgagattttagaaacagctgaagaaggaacaagggttttgaacctttcaaatggtatggaggagatagtgaaccctgagaatgtctggaatggcatacccaaattggataagagtccacctgaggtatggaattctataaatagtaattag

SEQ ID NO: 23251 - DNA, 2856 bp, Homo sapiens
  SIMILAR (37)..(90): 441254mologous to Mus musculus Nedd4 WW domain-binding protein 2,accession number AF220206,Smith-Waterman Score=40.
  misc_feature (1)...(2856): n = a,t,c or g
ccacgcgtccgcccacgcgtccgggcctgtcgcccgaccccacctcgccaaccgaggcggaccgcggagtgtgcgaacgaccccaccgctgctttctcctcccccagatcacgcaccccagctccggaagacggtgtttatgcctgctatcccccacctcgtttgatttctccctgctttacgagtctcagtccgaccgggctatctttggcgtggggacggagccggatcaagagccgccgccgccatatcatgaacaagttccagtttcagtctaccacccaacaacctaggccagacttgggtagcaactcagctgactgaagaggaacaaattaggatagctcaaagaataggtcttatacaacatctgcctaaaggagtttattgacccctggagagatggatcagaaaaaaagatccgggagtgtgtgatctgtatgatggactttgtttatggggacccaattcgatttctgccgtgcgtgcacgagtggtatcacctggactgtatagatgactggttgatgagatccttcacgtgcccctcctgcatggagccagttgatgcagcactgctttcatcctatgagactaattgagccagggtctctttatctgacttcaagtgaaccaccattttggtggtttttgatcttttgtcactgagccccaaagagccagggattaggaattaagatcgtgcacaaaagttatccttaaaaatcctggaaggctggcaaatgttgggggaaaaagtacgtggatattttataaacttagtgggaaaagtaggatggtatttttatgtaaagccttgacccaatgttttaaaaatataattgtatttaggatcttgttattgctccagtacatagggaattgtgtaaagtgttaacagcagcttgtattttgtttaaattgtgtgtattgaaggttagggaaaaagatagtagttatttttccctaaatgaaataactttcttctcttccccttccccaccccgaattcttttctgaagttgctggcatttgggtcaaggttttattaaaagctacattttataacactgggcacacaccaaaaaagtagttttaagcttgttttgcacagttcctttttttcccattgggaaatgggaattcattgccttaagtctttttaaatagtgtattattatcgttggggctggctctatgcttgaaaaccagtttatttataacctgttataagtgctatattctgtttgcagttagggaaatgcaggaattcaaagtgatctcctaggcttgtaaggcaaactgaggatgcactatcccttttctattaaaaaataggttaatgtgtccaggaacccactctattaagggtgggggttttaattattaccctttcctatgtggttttatctaattattttggttgttaatatgggtgataatgggaaagtcaagttaaatttttaaatattaagaattctgatttattgagattgaattatgcccaccacgtttatgtaaaaatgaaggtggcaccgtcggtgacgacctaatgaggaaatagttactcagttgtaaaaaattttggatttattctctttcttctggacctccttgcctcttgtcttggaaccataggcaaaagggatactggcatctctccattactgtaggtgctgagggttattggaggttattaccaaaacacatctccagtctctgtttcttgggaaagggtatcctattacatcctgctaggctgacgtgacaaaactaagcagggagaataaagataattgtattttatgttttgcacacaaacgcagaatttgtataaccatatgacttcagtagttgtgatctcaaaaaaagaaggaatttctcctttgtttcttgcagttaatgtaagaatactttaaatctctaagctttcctgaagtgttaggaggtagaggattggtctagttaaagatgtaggtaggaaatgttttatccattttagcatgtggtttattttttccatatggacctcaaagggtgacttattgggttcacccccaggnggtatttacaggctaaaaaaatccattccattagcaaaaggggaaaagtgggcctcaacccctaaccatccagaaggggtccccttattattattttatattgaggttgaatattgaactcctaacagttttcctacatacaaaaacacagtgtccatgaaggttattccataattgccattatagaggaatgtagtatgtccataagtactttgtaaagatttgacattcaacctgtagtatcccatatggttggcttaaaatttcccctatggagccccatgatgggaaagacctaaagatggatttggagaaaaattggaaggaatttaggtttatcagggtccggtaaaatggtacaaggaacctggctaaaattccggttaattaattaatatccacaccaagtacataaagcacaatttggaggaaacaactgaagttgtgcaatattttctgataattgttttttttattctggtgttttctacttaaacataatgtctgtgtcatcaagtattatagtcagacttttcttttttttctagattgttaaaattggcaaatgaacttttttaaaaatcatcttccatgttgcagttagtctttcttttcattacaagtctttcacagaagtttggtggtaatattgaaagaactagcattgggcagaatgtgtcttttttaggcactttatattctcaacatacaatgttaagaaccatcaattttgacttttactaagttgttaaataaagttataatacagctgtgaagggcaaaaaaaaaaaaa

SEQ ID NO: 23252 - DNA, 571 bp, Homo sapiens
  SIMILAR (161)..(253): 741254mologous to Homo sapiens Human secreted protein, SEQ ID NO: 7657,accession number G03576,Smith-Waterman Score=128.
  misc_feature (1)...(571): n = a,t,c or g
gggcccgaccgcggccgccccaccagccctgaactgcagcacggtgccagggcgggccaacacacgtccctgcctttgtaggcactgcctgccccacacggattccgggccacgccccagcccgacaatgtcgagaatattattattaatattattatgatttttgaaagaaccgaggcgatgccacgctttgctgctaccgccctgggctggactggaggtgggcatgccaccctcacacacacagntgggcatgcacccagngcctccccccccccatctggaagtgaaggcccagggactcctccaacagacaacggacggacggatgccgctggtgctcaggaagagctagtgccttaggtgggggaaggcaggactcacgactgagagagagaggagggggatatgaccaccctgccccatctgcaggagcctgaagatccagctcaagtgccatcctgccagtggcccccagactgtggggttgggacgcctggcctctgtgtcctagaagggaccctcctgtggtctttgtcttgatttttcttaataaacggtgctatccccg

SEQ ID NO: 23253 - DNA, 1734 bp, Homo sapiens
  SIMILAR (82)..(1719): 781254mologous to Homo sapiens heparan sulfate proteoglycan perlecan,accession number AL445795,Smith-Waterman Score=2123.
atggcagccccccgggaccaccttgctggaggggctggatgggactgttccagccccctcccaacccaccccatttgcacacagacccacggctcgctgctgcggctgcaccaggtgaccccggccgactcaggcgagtatgtgtgccatgtggcctcagtcctggtcaccatcgaagcctctgtcatccctggagcatctacaactctcactcccatccccactgctgcaggacccatcccacctgtcaggatcgagtcttcatcctccacagtggccgagggccagaccctggatctgagctgcgtggtggcagggcaggcccacgcccaggtcacatggtacaagcgtgggggcagcctccctgcccggcaccaggttcgtggctcccgcctgtacatcttccaggcctcacctgccgatgcgggacagtacgtctgccgggccagcaacggcatggaggcctccatcacggtcacagtaactgggacccagggggccaacttagcctaccctgccggcagcacccagcccatccgcatcgagccctcctcctcgcaagtggcggaagggcagaccctggatctgaactgcgtggtgcccgggcagtcccatgcccaggtcacgtggcacaagcgtgggggcagcctccctgtccggcaccagctggggccagaatgggtgccgtggagcacagacacagtaatggaggcctccttggggcccgatccattctccacacggcacacatattctccagaatcagctgagagtccgtacctgaaaggacaaccacttggatccgggcctgggcagtgcctgcagggctggtggccacgcagagctccaggactggcccagcccatctacatcgaggcctcctcttcacacgtgactgaagggcagactctggatctgaactgtgtggtgcccgggcaggcccatgcccaggtcacgtggtacaagcgcgggggcagcctccccgcccggcaccagacccatggctcccagctgcggctccacctcgtctcccctgccgactcaggcgagtatgtgtgtcgtgcagccagcggcccaggccctgagcaagaagcctccttcacagtcaccgtcccgcccagtgaggggtcttcctaccgccttaggagcccggtcatctccatcgacccgcccagcagcaccgtgcagcagggccaggatgccagcttcaagtgcctcatccatgacggggcagcccccatcagcctcgagtggaagacccggaaccaggagctggaggacaacgtccacatcagtcccaatggctccatcatcaccatcgtgggcacccggcccagcaaccacggtacctaccgctgcgtggcctccaatgcctacggtgtggcccagagtgtggtgaacctcagtgtgcacgggccccctacagtgtccgtgctccccgagggccccgtgtgggtgaaagtgggaaaggctgtcaccctggagtgtgtcagtgccggggagccccgctcctctgctcgttggacccggatcagcagcacccctgccaagttggagcagcggacatatgggctcatggacagccacgcggtgctgcagatttcatcagctaaaccatcagatgcgggcacttatgtgtgccttgctcagaatgcactaggcacagcacagaagcaggtggaggtgatcgtggacacgggcgccatggcccagggctcttcaggtcccagctga

SEQ ID NO: 23254 - DNA, 714 bp, Homo sapiens
  SIMILAR (22)..(597): 941254mologous to Homo sapiens heparan sulfate proteoglycan perlecan,accession number AL445795,Smith-Waterman Score=986.
atggccgaggaacccaactggggcagccccgcgcccaccatccactggtccaagctgcgttccccactgccctggcagcaccggctggaaggtgacacactcatcataccccgggtagcccagcaggactcgggccagtacatctgcaatgccactagccctgctgggcacgctgaggccaccatcatcctgcacgtggagagcccaccatatgccaccacggtcccagagcacgcttcggtgcaggcaggggagacggtgcagctccagtgcctggctcacgggacacccccactcaccttccagtggagccgcgtgggcagcagccttcctgggagggcgaccgccaggaacgagctgctgcactttgagcgtgcagcccctgaggactcaggccgctaccgctgccgggtcaccaacaaggtgggctcagccgaggcctttgcccagctgctcgtccaagcagggtccacgcccaccgtgcaggtcacgcctcagctagagaccaagagcattggggccagcgttgagttccactgtgctgtgcccagcgaccggggtacccagctccgttggttcaaggaagggggtcagctgctccgggtcacagcgtgcaggatggggtgctccggctcagggcagcccctgggccgcccgcccgtggctggcatgatggtctcggagcctgatgaggagtcccctctcagtaagtga

SEQ ID NO: 23255 - DNA, 1989 bp, Homo sapiens
  SIMILAR (661)..(1740): 731254mologous to Mus musculus perlecan,accession number M77174,Smith-Waterman Score=1451.
atggggataggagaaggccccaccacctccgagggctgtcgtgagagtgttgagtactcacatcagaaatcagagctcccgctcagtggagacagccaggtgccagggcccataggctgcaactgtgacccccaaggcagcgtcagcagccagtgtgatgctgctggtcagtgccagtgcaaggcccaggtggaaggcctcacttgcagccactgccggccccaccacttccacctgagtgccagcaacccagacggctgcctgccctgcttctgtatgggcatcacccagcagtgcgccagctctgcctacacacgccacctgatctccacccactttgcccctgggacttccaagctttgccctgtgaacccacagcgaaacagccgcctgacaggagaattcactgtggaacccgtgcccgagggtgcccagctctcttttggcaactttgcccaactcggccatgagtccttctactggcagctgccggagacataccagggagacaagggggaggcgtactttgcgcggatgcgccgggctcaccagaaccgcacatccctctcagaggagcagttgcgggcagccgtgacagctgggaggatcccagagcccccagagggcagggactgggcacagcgggcatcacagttctctctctcctacgaaggcttctctctgcttcctggaagcctctattactggcagctgccccgggccttcctgggggacaaggtggcggcctacggtgggaagttgcgatacaccctctcctacacagcaggcccacagggcagcccactctctgaccccgatgtgcagatcacgggcaacaacatcatgctagtggcctcccagccagcgctgcagggccctgagaggaggagctacgagatcatgttccgagaggaattctggcgccggcccgatgggcagccggccacacgcgagcacctcctgatggcactggccgacctggatgagctcctgatccgggccacgttctcctccgtgccgctggcggccagcatcagcgcagtcagcctggaggtcgcccagccggggccctcaaacagaccccgcgccctcgaggtggaggagtgccgctgcccgccaggctacatcggtctgtcctgccaggactgtgcccccggctacacgcgcaccgggagtgggctctacctcggccactgcgagctatgtgaatgcaatggccactcagacctgtgccacccagagactggggcctgctcgcaatgccagcacaacgccgcaggggagttctgcgagctttgtgcccctggctactacggagatgccacagccgggacgcctgaggactgccagccctgtgcctgcccactgaccaacccagagaacatgttttcccgcacctgtgagagcctgggagccggcgggtaccgctgcacggcctgcgaacccggctacactggccagtactgtgagcagtgtggcccaggttacgtgggtaaccccagtgtgcaagggggccagtgcctgccagagagctccgagctccacttccccagcgtccagccctcggatgctggggtctacatttgcacctgccgtaatctccaccaatccaataccagccgggcagagctgctggtcactgaggctccaagcaagcccatcacagtgactgtggaggagcagcggagccagagcgtgcgccccggagctgacgtcaccttcatctgcacagccaaaagcaagtccccagcctataccctggtgtggacccgcctgcacaacgggaaactgcccacccgagccatggatttcaatggcatcctgaccattcgcaacgtccagctgagtgatgcaggcacctacgtgtgcaccggctccaacatgtttgccatggaccagggcacagccactctacatgtgcagggctctgcagaagcaggggagagaagcatgtacagtatctcggtcctcctgaagtacacgtcctag

SEQ ID NO: 23256 - DNA, 14586 bp, Homo sapiens
  SIMILAR (2598)..(12305): 991254mologous to Homo sapiens Human basement membrane heparan sulfate proteoglycan core protein,accession number X62515,Smith-Waterman Score=17158.
  misc_feature (1)...(14586): n = a,t,c or g
ggccggcgagcgggcggctgcgggcggcgcggagcgggcggcgcggagcgagcgagcgagagagcggcgcgggccgggccatggggtggcgggcgccgggcgcgctgctgctggcgctgctgctgcacgggcggctgctggcggtgacccatgggctgagggcatacgatggcttgtctctgcctgaggacatagagaccgtcacagcaagccaaatgcgctggacacattcgtacctttctgatgatgagtacatgctggctgacagcatctcaggagacgacctgggcagtggggacctgggcagcggggacttccagatggtttatttccgagccctggtgaatttcactcgctccatcgagtacagccctcagctggaggatgcaggctccagagagtttcgagaggtgtccgaggctgtggtagacacgctggagtcggagtacttgaaaattcccggagaccaggttgtcagtgtggtgttcatcaaggagctggatggctgggtttttgtggagctcgatgtgggctcggaagggaatgcggatggtgctcagattcaggagatgctgctcagggtcatctccagcggctctgtggcctcctacgtcacctctccccagggattccagttccgacgcctgggcacagtgccccagttcccaagagcctgcacggaggccgagtttgcctgccacagctacaatgagtgtgtggccctggagtatcgctgtgaccggcggcccgactgcagggacatgtctgatgagctcaattgtgaggagccagtcctgggtatcagccccacattctctctccttgtggagacgacatctttaccgccccggccagagacaaccatcatgcgacagccaccagtcacccacgctcctcagcccctgcttcccggttccgtcaggcccctgccctgtgggccccaggaggccgcatgccgcaatgggcactgcatccccagagactacctctgcgacggacaggaggactgcgaggacggcagcgatgagctagactgtggccccccgccaccctgtgagcccaacgagttcccctgcgggaatggacattgtgccctcaagctgtggcgctgcgatggtgactttgactgtgaggaccgaactgatgaagccaactgccccaccaagcgtcctgaggaagtgtgcgggcccacacagttccgatgcgtctctaccaacatgtgcatcccagccagcttccactgtgacgaggagagcgactgtcctgaccggagcgacgagtttggctgcatgcccccccaggtggtgacacctccccgggagtccatccaggcttcccggggccagacagtgaccttcacctgcgtggccattggcgtccccgccccctttctcatcaattggaggctcaactggggccacatcccctctcagcccagggtgacagtgaccagcgagggtggccgtggcacactgatcatccgtgatgtgaaggagtcagaccagggtgcctacacctgtgaggccatgaacgcccggggcatggtgtttggcattcctgacggtgtccttgagctcgtcccacaacgagcaggcccctgccctgacggccacttctacctggagcacagcgccgcctgcctgccctgcttctgctttggcatcaccagcgtgtgccagagcacccgccgcttccgggaccagatcaggctgcgctttgaccaacccgatgacttcaagggtgcgttggcgggcgggtgtgaatgtgacaatgcctgcgcagcccggcacgccacccctctcctccacgcagctgcagatcgacccatccctgcacgagttccagctagtcgacctgtcccgccgcttcctcgtccacgactccttctgggctctgcctgaacagttcctgggcaacaaggtgaactcctgggggggttggggtgcgggacaacgtgcgctaccacttggcccgtggcatgctgaagccactgcatcgcccggacgtggtcctcgtgggtgccggataccgcctcctctcccgaggccacacacccacccaacctggtgctctgaaccagcgccaggtccagttctctgaggagcactgggtccatgagtctggccggccggtgcagcgcgcggagctgctgcaggtgctgcagagcctggaggccgagctcatccagaccgtgtacaacaccaagatggctagcgtgggacttagcgacatcgccatggataccaccgtcacccatgccaccagccatggccgtgcccacagtgtggaggagtgcagatgccccattggctattctggcttgtcctgcgagagctgtgatgcccacttcactcgggtgcctggtgggccctacctgggcacctgctctggttgcaattgcaatggccatgccagctcctgtgaccctgtgtatggccactgcctgaattgccagcacaacacggaggggccacagtgcaacaagtgcaaggctggcttctttggggacgccatgaaggccacggccacttcctgccggccctgcccttgcccatacatcgatgcctcccgcagattctcagacacttgcttcctgggacacggatggccaagccacatgtgacgcctgtgccccagggtaacactgggccgccgctgtgagagctgtgcccccggataacgagggcaaccccatccagcccggcgggaagtgcaggcccgtcaaccaggagattgtgcgctgtgacgagcgtggcagcatggggacctccggggaggcctgccgctgtaagaacaatgtggtggggcgcttgtgcaatgaatgtgctgacggctctttccacctgagtacccgaaaccccgatggctgcctcaagtgcttctgcatgggtgtcagtcgccactgcaccagctcttcatggagccgtgcccagttgcatggggcctctgaggagcctggtcacttcagcctgaccaacgccgcaagcacccacaccaccaacgagggcatcttctcccccacgcccggggaactgggattctcctccttccacagactcttatctggaccctacttctggagcctcccttcacgcttcctgggggacaaggtgacctcctatggaggagagctgcgcttcacagtgacccagaggtcccagccgggctccacacccctgcacgggcagccgttggtggtgctgcaaggtaacaacatcatcctagagcaccatgtggcccaggagcccagccccggccagcccagcaccttcattgtgccttttccgggaagcaagcattggcagcggcccgatgggcagccagccacacgggagcacctgctgatggcactggcaggcatcgacaccctcctgatccgagcatcctacgcccagcagcccgctgagagcagggtctctggcatcagcatggacgtggctgtgcccgaggaaaccggccaggaccccgcgctggaagtggaacagtgctcctgcccacccgggtaccgtgggccgtcctgccaggactgtgacacaggctacacacgcacgcccagtggcctctacctgggtacctgtgaacgctgcagctgccatggccactcagaggcctgcgagccagaaacaggtgcctgccagggctgccagcatcacacggagggccctcggtgtgagcagtgccagccaggatactacggggacgcccagcgggggacaccacaggactgccagctgtgcccctgctacggagaccctgctgccggccaggctgcccacacttgttttctggacacagacggccaccccacctgtgatgcgtgctccccaggccacagtgggcgtcactgtgagaggtgcgcccctggctactatggcaaccccagccagggccagccatgccagagagacagccaggtgccagggcccataggctgcaactgtgacccccaaggcagcgtcagcagccagtgtgatgctgctggtcagtgccagtgcaaggcccaggtagaaggcctcacttgcagccactgccggccccaccacttccacctgagtgccagcaacccagacggctgcctgccctgcttctgtatgggcatcacccagcagtgcgccagctctgcctacacacgccacctgatctccacccactttgcccctggggacttccaaggctttgccctggtgaacccacagcgaaacagccgcctgacaggagaattcactgtggaacccgtgcccgagggtgcccagctctcttttggcaactttgcccaactcggccatgagtccttctactggcagctgccggagacataccagggaggcaaggtggcaggctacggtgggaagttgcgatacaccctctcctacacagcaggcccacagggcagcccactctcggaccccgatgtgcagatcacgggcaacaacatcatgctagtggcctcccagccagcgctgcagggcccagagaggaggagctacgagatcatgttccgagaggaattctggcgccggcccgatgggcagccggccacacgcgagcacctcctgatggcactggccgacctggatgagctcctgatccgggccacgttctcctccgtgccgctggtggccagcatcagcgcagtcagcctggaggtcgcccagccggggccctcaaacagaccccgcgccctcgaggtggaggagtgccgctgcccgccaggctacatcggtctgtcctgccaggactgtgcccccggctacacgcgcaccgggagtgggctctacctcggccactgcgagctatgtgaatgcaatggccactcagacctgtgccacccagagactggggcctgctcgcaatgccagcacaacgccgcaggggagttctgcgagctttgtgcccctggctactacggagatgccacagccgggacgcctgaggactgccagccctgtgcctgcccactgaccaacccagagaacatgttttcccgcacctgtgagagcctgggagccggcgggtaccgctgcacggcctgcgaacccggctacactggccagtactgtgagcagtgtggcccaggttacgtgggtaaccccagtgtgcaagggggccagtgcctgccagagacaaaccaagccccactggtggtcgaggtccatcctgctcgaagcatagtgccccaaggtggctcccactccctgcggtgtcaggtcagtgggaggggaccccactacttctattggtcccgtgaggatgggcggcctgtgcccagcggcacccagcagcgacatcaaggctccgagctccacttccccagcgtccagccctcggatgctggggtctacatttgcacctgccgtaatctccaccgatccaataccagccgggcagagctgctggtcactgaggctccaagcaagcccatcacagtgactgtggaggagcagcggagccagagcgtgcgccccggagctgacgtcaccttcatctgcacagccaaaagcaagtccccagcctataccctggtgtggacccgcctgcacaacgggaaactgcccacccgagccatggatttcaatggcatcctgaccattcgcaacgtccagctgagtgatgcaggcacctacgtgtgcaccggctccaacatgtttgccatggaccagggcacagccactctacatgtgcaggcctcgggcaccttgtccgcccccgtggtctccatccatccgccacagctcacagtgcagcccgggcaactggcggagttccgctgcagcgccacagggagccccacgcccaccctcgagtggacagggggccccggcggccagctccctgcgaaggcacaaatccacggcggcatcctgcgcctgccagctgtcgagcccacggatcaggcccagtacttgtgccgagcccacagcagcgctgggcagcaggtggccagggctgtgctccacgtgcatgggggcggtgggcccagagtccaagtgagcccagagaggacccaggtccacgcaggccgcaccgtcaggctgtactgcagggctgcaggcgtgcctagcgccaccatcacctggaggaaggaagggggcagcctcccaccacaggcccggtcagagcgcacagacatcgcgacactgctcatcccagccatcacgactgctgacgccggcttctacctctgcgtggccaccagccctgcaggcactgcccaggcccggatccaagtggttgtcctttcagcctcagatgccagccaaccgccggtcaagattgagtcctcatcgccttctgtgacagaagggcaaacactcgacctcaactgtgtggtggcagggtcagcccatgcccaggtcacctggtacaggcgagggggtagcctgcctcaccacacccaggtgcacggctcccgtctgcggctcccccaggtctcaccagctgattctggagagtatgtgtgccgtgtggagaatggatcgggccccaaggaggcctccattactgtgtctgtgctccacggcacccattctggccccagctacaccccagtgcccggcagcacccggcccatccgcatcgagccctcctcctcacacgtggcggaagggcagaccctggatctgaactgcgtggtgcccgggcaggcccacgcccaggtcacgtggcacaagcgtgggggcagcctccctgcccggcaccagacccacggctcgctgctgcggctgcaccaggtgaccccggccgactcaggcgagtatgtgtgccatgtggtgggcacctccggccccctagaggcctcagtcctggtcaccatcgaagcctctgtcatccctggacccatcccacctgtcaggatcgagtcttcatcctccacagtggccgagggccagaccctggatctgagctgcgtggtggcagggcaggcccacgcccaggtcacatggtacaagcgtgggggcagcctccctgcccggcaccaggttcgtggctcccgcctgtacatcttccaggcctcacctgccgatgcgggacagtacgtctgccgggccagcaacggcatggaggcctccatcacggtcacagtaactgggacccagggggccaacttagcctaccctgccggcagcacccagcccatccgcatcgagccctcctcctcgcaagtggcggaagggcagaccctggatctgaactgcgtggtgcccgggcagtcccatgcccaggtcacgtggcacaagcgtgggggcagcctccctgtccggcaccagacccacggctccctgctgagactctaccaagcgtcccccgccgactcgggcgagtacgtgtgccgagtgttgggcagctccgtgcctctagaggcctctgtcctggtcaccattgagcctgcgggctcagtgcctgcacttggggtcacccccacggtccggatcgagtcatcgtcttcgcaagtggcagaggggcagaccctggacctgaactgcctcgttgctggtcaggcccatgcccaggtcacgtggcacaagcgcgggggcagcctcccggcccggcaccaggtgcatggctcgaggctacgcctgctccaggtgaccccagctgattcaggggagtacgtgtgccgtgtggtcggcagctcaggtacccaggaagcctcagtccttgtcaccatccagcagcgccttagtggctcccactcccagggtgtggcgtaccccgtccgcatcgagtcctcctcagcctccctggccaatggacacaccctggacctcaactgcctggttgccagccaggctccccacaccatcacctggtataagcgtggaggcagcttacccagccggcaccagatcgtgggctcccggctgcggatccctcaggtgactccggcagactcgggcgagtacgtgtgtcacgtcagtaacggtgcaggctcccgggagacctcgctcatcgtcaccatccagggcagcggttcctcccacgtgcccagagtctccccaccgatcaggatcgagtcgtcttcccccacggtggtggaagggcagaccttggatctgaactgcgtggtcgccaggcagccccaggctatcatcacatggtacaagcgtgggggcagccttccctcccgacaccagacccatggctcccacctgcggttgcaccaaatgtctgtggctgactcgggcgagtatgtgtgccgggccaacaacaacatcgatgccctggaggcctcaatcgtcatctccgtctcccctagcgccggcagcccctccgcccctggcagctccatgcccatcagaattgagtcatcctcctcacacgtggccgaaggggagaccctggatctgaactgcgtggtccccgggcaggcccatgcccaggtcacttggcacaagcgtgggggcagcctccccagttaccatcagacccgcggctcacggctgcggctgcaccatgtgtccccggccgactcgggtgaatacgtgtgccgggtgatgggcagctctggccccctggaggcctcagtcctcgtcaccatcgaagcctctggctcaagtgctgtccacgtccccgccccaggtggagccccacccatccgcatcgagccctcctcctcccgagtggcagaagggcagaccctggatctgaagtgcgtggtgcccgggcaggcccacgcccaggtcacgtggcacaagcgtggaggaaacctccctgcccggcaccaggtccacggcccactgctgaggctgaaccaggtgtccccggctgactctggcgagtactcgtgccaagtgaccggaagctcaggcaccctggaggcatctgtcctggtcacaattgagccctccagcccaggacccattcctgctccaggactggcccagcccatctacatcgaggcctcctcttcacacgtgactgaagggcagactctggatctgaactgtgtggtgcccgggcaggcccatgcccaggtcacgtggtacaagcgcgggggcagcctccccgcccggcaccagacccatggctcccagctgcggctccaccacgtctcccctgccgactcaggcgagtatgtgtgtcgtgcagccggcggcccaggccctgagcaagaagcctccttcacagtcaccgtcccgcccagtgaggggtcttcctaccgccttaggagcccggtcatctcgatcgacccgcccagcagcaccgtgcagcagggccaggatgccagcttcaagtgcctcatccatgacggggcagcccccatcagcctcgagtggaagacccggaaccaggagctggaggacaacgtccacatcagtcccaatggctccatcatcaccatcgtgggcacccggcccagcaaccacggtacctaccgctgcgtggcctccaatgcctacggtgtggcccagagtgtggtgaacctcagtgtgcacgggccccctacagtgtccgtgctccccgagggccccgtgtgggtgaaagtgggaaaggccgtcaccctggagtgtgtcagtgccggggagccccgctcctctgctcgttggacccggatcagcagcacccctgccaagttggagcagcggacatatgggctcatggacagccacacggtgctgcagatttcatcagctaaaccatcagatgcgggcacttatgtgtgccttgctcagaatgcactaggcacagcacagaagcaggtggaggtgatcgtggacacgggcgccatggccccaggggcccctcaggtccaagctgaagaagctgagctgactgtggaggctggacacacggccaccttgcgctgctcagccacaggcagccccgcgcgcaccatccactggtccaagctgcgttccccactgccctggcagcaccggctggaaggtgacacactcatcataccccgggtagcccagcaggactcgggccagtacatctgcaatgccactagccctgccgggcacgctgaggccaccatcatcctgcacgtggagagcccaccatatgccaccacggtcccagagcacgcttcggtgcaggcaggggagacggtgcagctccagtgcctggctcacgggacacccccactcaccttccagtggagccgcgtgggcagcagccttcctgggagggcgaccgccaggaacgagctgctgcactttgagcgtgcagcccctgaggactcaggccgctaccgctgccgggtcaccaacaaggtgggctcagccgaggcctttgcccagctgctcgtccaaggccctcccggctctctccctgccacctccatcccagcagggtccacgcccaccgtgcaggtcacgcctcagctagagaccaagagcattggggccagcgttgagttccattgtgctgtgcccagcgaccggggtacccagctccgttggttcaaggaagggggtcagctgcctcccggtcacagcgtgcaggatggggtgctccgaatccagaacttggaccagagctgccaagggacgtatatatgccaggcccatggaccttgggggaaggcccaggccagtgcccagctggttatccaagccctgccctcggtgctcatcaacatccggacctctgtgcagaccgtggtggttggccacgccgtggagttcgaatgcctggcactgggtgaccccaagcctcaggtgacatggagcaaagttggagggcacctgcggccaggcattgtgcagagcggaggtgtcgtcaggatcgcccacgtagagctggctgatgcgggacagtatcgctgcactgccaccaacgcagctggcaccacacaatcccacgtcctgctgcttgtgcaagccttgccccagatctcaatgccccaagaagtccgtgtgcctgctggttctgcagctgtcttcccctgcatagcctcaggctaccccactcctgacatcagctggagcaagctggatggcagcctgccacctgacagccgcctggagaacaacatgctgatgctgccctcagtccaaccccaggacgcaggtacctacgtctgcaccgccactaaccgccagggcaaggtcaaagcctttgcccacctgcaggtgccagagcgggtggtgccctacttcacgcagaccccctactccttcctaccgctgcccaccatcaaggatgcctacaggaagttcgagatcaagatcaccttccggcctgactcagccgatgggatgctgctgtacaatgggcagaagcgagtcccagggagccccaccaacctggccaaccggcagcccgacttcatctccttcggcctcgtggggggaaggcccgagttccggttcgatgcaggctcaggcatggccaccatccgccatcccacaccactggccctgggccatttccacaccgtgaccctgctgcgcagcctcacccagggctccctgattgtgggtgacctggccccggtcaacgggacctcccagggcaagttccagggcctggatctgaacgaggaactctacctgggtggctatcctgactatggtgccatccccaaggcggggctgagcagcggcttcataggctgtgtccgggagctgcgcatccagggcgaggagatcgtcttccatgacctcaacctcacggcgcacggcatctcccactgccccacctgtcgggaccggccctgccagaatggcggtcagtgccatgactctgagagcagcagctatgtgtgcgtctgcccagctggcttcaccgggagccgctgtgagcactcgcaggccctgcactgccatccagaggcctgtgggcccgacgccacctgtgtgaaccggcctgacggtcgaggctacacctgccgctgccacctgggccgctcggggttgcggtgtgaggaaggtgtgacagtgaccaccccctcgctgtcgggtgctggctcctacctggcactgcccgccctcaccaacacacaccacgagctacgcctggacgtggagttcaagccactcgcccctgacggggtcctgctgttcagcggggggaagagcgggcctgtggaggacttcgtgtccctggcgatggtgggcggccacctggagttccgctatgagttggggtcagggctggccgttctgcggacggccgagccgctggccctgggccgctggcaccgtgtgtctgcagagcgtctcaacaaggacggcagcctgcgggtgaatggtggacgccctgtgctgcgctcctcgcccggcaagagccagggcctcaacctgcacaccctgctctacctggggggtgtggagccttccgtgccactgtcccccggccaccaacatgggcgctcacttccgcggctgtgtgggcgaggtgtcagtgaatggcaaacggctggacctcacctacagtttcctaggcagccagggcatcgggcaatgctatgatagctccccatgtgagcgccagccttgccaacatggtgccacgtgcatgcccgctggcgagtatgagttccagtgcctgtgtcgagatggattcaaaggagacctgtgtgagcacgaggagaacccctgccagctccgtgaaccctgtctgcatgggggcacctgccagggcacccgctgcctctgcctccctggcttctctggcccacgctgccaacaaggctctggacatggcatagcagagtccgactggcatcttgaaggcagcgggggcaatgatgcccctgggcagtacggagcctatttccacgatgatggcttcctcgccttccctggccatgtcttctccaggagcctgcccgaggtgcccgagaccatcgagctggaggttcggaccagcacagccagtggcctcctgctctggcagggtgtggaggtgggagaggccggccaaggcaaggacttcatcagcctcgggcttcaagacgggcaccttgtcttcagctcatacttcttgggcctggatgactgcaggtaccagcttgggtagtggggaggcccgcctggtctctgaggacccattcaatgacggcgagtggcaccgggtgacagcactgcgggagggccgcagaggttccatccaagtcgacggtgaggagctggtcagcggccggtccccaggtcccaacgtggcagttaacgcccaagggcagcgtttacatcggcggagcccctgacgtggccacgctgaccgggggcagattctcctcgggcatcacaggctgtgtcaagaacctggtgctgcactcggcccgacccggcgccccgcccccacagcccctggacctgcagcaccgcgcccaggccggggccaacacacgcccctgccccttgtaggcacctgcctgccccacacggactcccgggccacgccccagcccgacaatgtcgagtatattattattaatattattatgaatttttgtaagaaaccgaggcgatgccacgctttgctgctaccgccctgggctggactggaggtgggcatgccaccctcacacacacagctgggcaaagccacaaggctggccagcaaggcgaggttggatgggagtgggcacctcacaaagtcaccaggacttggggtcaggaacagtggctgggtgggcccagaactgcccccactgtccccctacccaccgatggagcccccagatagagctgggtggcctgttttctgcagcccttgggcagttctcaatccttaggaggagccaacctcggcttgtggggttggtgccccacagctacctgagacgggcatcgcaggagtctctgccacccactcaggattgggaattgtctttagtgccggctgtggagcaaaaggcagctcacccctgggcaggcggtccccatccccaccagctcgtttttcagcacccccacccacctccacccagcccctggcacctcctctggcagactccccctcctaccacgttcttcctggcctgcattcccaccccctcctgccagcacacagcctggggtccctccctcaggggcatgtacgggaaggccccacccccaactcttaccaggagctgctacaggcaggagcccagcactgataggggcnccgcccaccgggccccgcccaacccccagggccacatcccccacccattttggaaagtgaaggcccagggactccctccaacagacaacggacggacggatgccgctggtgctcaggaagagctagtgccttaggtgggggaaggcagggactcaccgactgagagaaagaggagggggatatgaccacccctgccccatctgcaggagcctgaagatccagctcaagtgccatcctgccagtggcccccagactgtggggttgggacgcctggcctctgtgtcctagaagggaccctcctgtggtctttgtcttgatttttcttaaataaacggtgctatccccgccagaaaatagaaaaaacnnnnnnnnnnnnnnngggggggccccttaaaaaaaactctgttttggatcgggggttataaagaaataannnnnnnnnnatggcccccaaaaataaatcccggggccggggtttaacaacgtggggacgggaaaaacccgggggtaccccaattaaat

SEQ ID NO: 23257 - DNA, 1362 bp, Homo sapiens
  SIMILAR (142)..(1323): 731254mologous to Homo sapiens cytokeratin 18 (424 AA),accession number X12883,Smith-Waterman Score=1339.
gagcatctggaaaatgagtcttctagaagaccaaggctgacactacctggtttttttcctgcccagcctcagaaggtatacagtatcactttcaccaaattccactagttaccaactactggtccctgggcccagctacaggctctgccaattagcagcgcggctagcctctatgcaggcgccagggggctctggttcccggatgtccgtgtcccactccaccagcctccgggacggcataagttccgggggcctggcgcggggatggccaggggtctgggaggaatgggaggcatccagaacaagaaggaaaccacgcaaagcctgaatgacagcctggcggtcagagtaaggagtctggagactgagaaccggaagctcgaaagcaaaatccgggagcacttggagaagaagggaccccaggtcagagactggagccattacttcaagaccatcgaggacctgagggctcagatcttcgcaaatactgtggacaatgtccgcatctttctgcagatcgacaatgcccgtcttgctgctgatgactttagagtcaagtatgagacagagctggccatgcgccagtctgtggagagcgacatctatgggctccacaaggtcattgatgacaccaatgtcatcaatggctgcagcttcttcatgaagaagaaccacggagaggaagtaaaatgcctacaagcccagattgccagctctgggttgaccatggaggtagatgcccccaaatctcaggacctcgccaagatcacagcagacatctcgacccgatatgacgagctggctcggaagaaccgagaagagctggacaagtactggtctcagccgattgaggagagcaccacagaggtcaccatgcagtccgccaaggttagagctgctgagatgacattcatggagctgagacgtacagtccagtccttggagatcgacctggacttgatgagaaatccgaaggccagcttggagaacagcctgagggaggtggaggcctgttatgccctgcagatggagcagctcaacctggatcctggatcctgctgcacctggagtcagagctaacacagacccgggcagagggacagcttccaagcccagaagtacaaggccctgctgaacatcaagaacaagctggaggctgagatcgccacctactgcctcctgctggaagatggcaaggacttcaatcttggtgataccctggacagcagcaaccccatgcaaaccatccaaaagaccaccaccagccggatagtggatggcaaagtggtgtctgagaccaacgacaccaaagtttggagacattaagccagcagaagcagagtaccctttggggaccaggag

SEQ ID NO: 23258 - DNA, 774 bp, Homo sapiens
  SIMILAR (154)..(771): 851254mologous to Homo sapiens template acyivating factor-I alpha,accession number D45198,Smith-Waterman Score=962.
atggcctccaaatgccagtctccactcctccctcaaaagaagaaaccaagaccacttcctgctctgggaccggagaagacatcagcctctgcaggcttgccgaagaagggagaaaaagaacagcaagaaacaattgaacacattcatgaagtacaaaatgaaatggacagacttaatgaacaagccaatttttgggtaacaatatttgtcaatcatccagaagtgtctgcactgcctggggaggaggacgaagaggcactgcattatttgaccagagttgaaatgacagactttgatgatattaaatcaggttacagaatagatttttattttgatgaaaatccttactttgaaaataacattctcgccaaagaatttcatctgaatgagagtggtgatccatcttcaaagcccaccgaaatcaaatggaaatatggaaaggatttgatgaaacgttcaagtcaaacgcagaataaagctcacaggaagaggcagcatgaggaaccagagagcttctttacctggtttactgaccattctgatgttggtgctgatgagttaggagaggtcatcaaagatatttggccaaatccattacagtactacttggttcctgatatggataatgaagaaggagaaggagaagaagatgacgatgatgatgaagaggaggaaggattagaagatattgatgaagaaggggatgaggatgaaggtgaagaagatgaagatgaaggggagaaaggagaggaggatgaaggagaaaatgactaa

SEQ ID NO: 23259 - DNA, 1659 bp, Homo sapiens
  SIMILAR (855)..(1046): 851254mologous to Homo sapiens template acyivating factor-I alpha,accession number D45198,Smith-Waterman Score=274.
atgttttcacatggaaattttgaaaacgcaagtgactctatgaggttccagattgccaggtgtggagggagaggcgtggacgggaaccggggctgcagggtggtggagctcgtgggccagcgcgagttccgggtgggcacgggctccgcgggccccacactcagatcggctgaccggccagcaccaccagccccaggcagtgaggggcttagcacccgggccagcagctacggagagtgtgctgggtcccccagcactgctgtcctgcctgcgccgcacttgaattctcgcggggcctcagccgcctccccacggggcagggctcgggacctgcagcctgccatgcccgagccccccgcgacagctcaagtgttatccagcccagtgccctcttggtacctggatgctgggttcttgtccagcatccaggaagaatcaggtcacacaggcaaattgaaggatagtgaatgcaagagattttattgccagatggaggttataattcatgatgttcagagaaacctgagtggggagggggttggtgcagaagagacagtagatcatggagagaaacacattcacccagacctgttcccatgtgaagtctgcttcaagttttttgtcagagcatccaactcttctcttgcaattgttcacattggcaaacacatcacactggcaaacgctgtgtcaatctcagagcatcctcagatgagcgaggagactcatagtcttgttcttggacttccccagcagcatggcccccaaacgccagtctccactcctgcctcaaaagaagaaaccaagaccacctcctgctctgggactggaggttcttggacttccctagcagcatggcctccaaatgccagtctccactcctccctcaaaagaagaaaccaagaccacttcctgctctgggaccggagaagacatcagcctctgcaggcttgccgaagaagggagaaaaagaacagcaagaaacaattgaacacattcatgaagtacaaaatgaaatggacagacttaatgaacaagccaaagaggtcagaattgatctccaaaatcccagatttttgggtaacaatatttgtcaatcatccagaagtgtctgcactgcctggggaggaggacgaagaggcactgcattatttgaccagagttgaaatgacagactttgatgatattaaatcaggttacagaatagatttttattttgatgaaaatccttactttgaaaataacattctcgccaaagaatttcatctgaatgagagtggtgatccatcttcaaagtccaccgaaatcaaatggaaatatggaaaggatttgatgaaacgttcaagtcaaacgcagaataaagctcacaggaagaggcagcatgaggaaccagagagcttctttacctggtttactgaccattctgatgttggtgctgatgagttaggagaggtcatcaaagatatttggccaaatccattacagtactacttggttcctgatatggataatgaagaaggagaaggagaagaagatgacgatgatgatgaagaggaggaaggattagaagatattgatgaagaaggggatgaggatgaaggtgaagaagatgaagatgaaggggagaaaggagaggaggatgaaggagaaaatgactaa

SEQ ID NO: 23260 - DNA, 1416 bp, Homo sapiens
  SIMILAR (45)..(920): 801254mologous to Homo sapiens template acyivating factor-I alpha,accession number D45198,Smith-Waterman Score=1158.
gggcgaggagactcgtggtctggttctgggacttccctaacagcatggcccctaaacgccagtctccactcccgcctcaaaagaagaaaccaagaccacctcctgctctgggaccggaggagacatcggcctctgcaggcttgccgaagaagggagaaaaagaacagcaagaagcgattgaacacattgatgaagtacaaaatgaaatagacagacttaatgaacaagccagtgaggagattttgaaagtagaacagaaatataacaaactccgccaaccattttttcagaagaggtcaaaatgtgagcgccggaatcccaaatttttgggtaacaacatttgtcaacccatccacaagtgtcttgcactgcttggggaggaagatgaagaggcactgcaattatttggaccagagttgaagtgacagaatttgaagatattaaatcaggttacagaatagatttttattttgatgaaaatccttactttgaaaataaagttctctccaaagaatttcatctgaatgaggagtggtgatccatcttcgaagtccaccgaaatcaaatggaaatctggaaaggatttgacgaaacgttcgagtcaaacgcagaataaagccagcaggaagaggcagcatgaggaaccagagagcttctttacctggtttactgaccattctgatgcaggtgctgatgagttaggagaggtcatcaaagatgatatttggccaaacccattacagtactacttggttcccgatatggatgatgaagaaggagaaggagaagaagatgatgatgatgatgaagaggaggaaggattagaagatattgacgaagaaggggatgaggatgaaggtgaagaagatgaagatgatgatgaaggggaggaaggagaggaggatgaaggagaagatgactaaatagaacactgatggattccaaccttcctttttttaaattttctccagtccctgggagcaagttgcagtccttttttttttttttttttttttccctcttgtgctcagtcgccctgttcttgagtctcttttctctactccatggttctcaatttatttggggggaaataccttgagcagaatacaatgggaaaagagtctctacccctttctgttcgaagttcatttttatcccttcctgtctgaacaaaaactgtatggaatcaacaccaccgagctctgtgggaaaaaagaaaaacctgctcccttcgctctgctggaagctggagggtgctaggcccctgtgtagtagtgcatagaattctagcttttttcctcctttctctgtatattgggctcagagagtacactgtgtctctatgtgaatatggacagttagcatttaccaacatgtatctgtctactttctcttgtttaaaaaaaaaaaaaaaaa

SEQ ID NO: 23261 - DNA, 1659 bp, Homo sapiens; identical to SEQ ID NO: 23259
  SIMILAR (855)..(1046): 851254mologous to Homo sapiens template acyivating factor-I alpha,accession number D45198,Smith-Waterman Score=274.

SEQ ID NO: 23262 - DNA, 1418 bp, Homo sapiens
  SIMILAR (62)..(922): 591254mologous to Homo sapiens PHAPII (Putative HLA DR Associated Protein II),accession number X75091,Smith-Waterman Score =770.
gggcgaggagactcgtggtctggttctgggacttccctaacagcatggcccctaaacgccagtctccactcccgcctcaaaagaagaaaccaagaccacctcctgctctgggaccggaggagacatcggcctctgcaggcttgccgaagaagggagaaaaagaacagcaacgaagcgattgaacacattgatgaagtacaaaatgaaatagacagacttaatgaacaagccagtgaggagattttgaaagtagaacagaaatataacaaactctcgccaaccattttttcagaagaggtcaaaatgtgagcgccggaatcccaaatttttgggtaacaacatttgtcaacccatccacaagtgtcttgcactgcttggggaggaagatgaagaggcactgcaattatttggaccagagttgaagtgacagaatttgaagatattaaatcaggttacagaatagatttttattttgatgaaaatccttactttgaaaataaagttctctccaaagaatttcatctgaatgaggagtggtgatccatcttcgaagtccaccgaaatcaaatggaaatctggaaaggatttgacgaaacgttcgagtcaaacgcagaataaagccagcaggaagaggcagcatgaggaaccagagagcttctttacctggtttactgaccattctgatgcaggtgctgatgagttaggagaggtcatcaaagatgatatttggccaaacccattacagtactacttggttcccgatatggatgatgaagaaggagaaggagaagaagatgatgatgatgatgaagaggaggaaggattagaagatattgacgaagaaggggatgaggatgaaggtgaagaagatgaagatgatgatgaaggggaggaaggagaggaggatgaaggagaagatgactaaatagaacactgatggattccaaccttcctttttttaaattttctccagtccctgggagcaagttgcagtccttttttttttttttttttttttccctcttgtgctcagtcgccctgttcttgagtctcttttctctactccatggttctcaatttatttggggggaaataccttgagcagaatacaatgggaaaagagtctctacccctttctgttcgaagttcatttttatcccttcctgtctgaacaaaaactgtatggaatcaacaccaccgagctctgtgggaaaaaagaaaaacctgctcccttcgctctgctggaagctggagggtgctaggcccctgtgtagtagtgcatagaattctagcttttttcctcctttctctgtatattgggctcagagagtacactgtgtctctatgtgaatatggacagttagcatttaccaacatgtatctgtctactttctcttgtttaaaaaaaaaaaaaaaaa

SEQ ID NO: 23263 - DNA, 2031 bp, Homo sapiens
  SIMILAR (709)..(834): 1001254mologous to Homo sapiens Similar to BN51 (BHK21) temperature sensitivity complementing,accession number BC000516,Smith-Waterman Score=221.
  misc_feature (1)...(2031): n = a,t,c or g
atgggaaagcagaagggagggggaccccaggcctgggaggccgagggactgggtagggagtggatgagaatgccgcaggaagggaagggctctcagaggaagtcaacccagaaacagacaaagagggagatcgacgcgtacatcgtgcaggccaaggagcgcagctacgagaccgtgctcagcttcgggaagcggggcctcaacattgccgcctcccctgctgtgcaggctgccaccaaggtgctctgggcccccagccctccagcagcccccatcccacccctaaggccctttgggctcattcagctcctctgccagggagcccagagatggcagccggggagcagggaggtcaaggggcggctgtgccaggcaaggctggcggagacttcttccattgcagggaacctgcgcgttcaatcttatgaacggcccgtggaccctggcgttaccatggaccccctgttacctgggaggaccatagtgttcgcagccggagaccacaccctatggcgagcacctgtgagcagctgtgcacagaggagtggggtctggagcctggataacatgggtgtgaattctggctcagtccctttccatggggtgagaattcaagcaagtcagctgatttccctgagcttcaatttctccttctgtgaagcagatttaaaaaccccacttcatgggttcctgattctgccagccgggcccaaggaagaagtaactgtcaagaaggagaagcgtgaaagggacagagaccgacaacgagaggggcatggacgagggcgaggccgtccagaagtgatccagtctcactccatctttgagcagggcgccagctgaaatgatgaagaaaaaagggaactgggataagacagtggatgtgtcagacatgggaccttctcatatcatcaacatcaaaaaagagaagagagagacagacgaagaaactaaacagatcttgcgtatgctggagaaagacgatgtggatcaccacgccctgagtgagcacctggttaccactgccaccttctccatcggctccactggcctcgtggtgtatgactaccagcaggtggagtgcgggggccatgtacgggcagacttgaaaacccaagacctttactcccacgcccagtttggagacaacaactaccctgggggtgtggactggtaccgggccgggggcctgcaggacagcgacaccgaggatgagtgttggtcagatactgaggcagtcccccgggcgccagcccggccccgagagaagcccctaatccgcagccagagcctgcgtgtggtcaagaggaagccaccggtgcgggagggcacctcgcgctccctgaaggttcggacgaggaaaaagactgtgccctcagacgtggacagctagggtttgctgcatctgcccccttcttacctcgtgccctgcagggctccagggctatttggagggaccttggggctgcacatctggcctgcctgcaccagctgcctgggccccaccctcctgactcctgctgatgggttaaggggccgggagcagatgctggccaaggccacatgcagggatgcaccccncaatgtaccaaaagcaggctgggcccagggttctatttattgccttggctctgccctctcccttcccccggttgtgggacaagagccctccctgaacccctgcaaccctccctgaaccccctgcaaatgaaaccaaacgtccacccgggtgtgttcattccttcatgtccttcaaagtacttgatagcctttcataaggcctggcacatgtgtcccggtagtgtgtgtgtgtgttggtgagtgaggtcaggcctgcgagtgttctgataaataaatacataaaggggcgggcgcgcggtaaattctggcaactttgataaaaaagaaaccnnnnnnnnnnnnnnnncccccgccacatcctgttgtgggggctttggataaacacccccgcgcgcggctgacaccgggggggagaaggaacagtnnggcctggngacaaaaaaatccttt

SEQ ID NO: 23264 - DNA, 651 bp, Homo sapiens
  SIMILAR (554)..(640): 581254mologous to AKV murine leukemia virus gag-pol polyprotein (tag amber codon at 2250-2252 inserts Gln in Mo- MuLV),accession number J01998,Smith-Waterman Score=81.
gatgtcaagtaaatattattgtcagacctctgagcccaagcctgcaggtatacacccagatggcctgaagcaagtgaagaatcacaaaagaactgaaaatggccggttcctgccctccaccctataatccttctatcacctcccctcctcacacctggtccagcttacagtttcattctgtgactagccctcccccacctgcccaacaatttcctcttaaagaggtggctggagctaaaggcatagtcaaggttaatgctcctttttctttatccaacctctcccatctcagttagtatttaggctttttttcatcaaatcacccttacctgggtcaacgccagtatcccatcccacaacaggctttaaagggattaaagcctgttatcacttgcctgttacaacatgtccttttaaagcctgtaaactctccttacaattcccccattttacctgtccaaaaactggacatgccttacaggttagttcaggatctgtgccttatcaaccaaattgtcttgcctatccacgccatggtgccaaacccagaaaccttcataccccttaccgtcctcaatccttaggaaaggtagaactgattaatggtcttttaaaaacacacctcaccaagctcagcctccaacttaaaaa

SEQ ID NO: 23265 - DNA, 238 bp, Homo sapiens
  SIMILAR (7)..(153): 831254mologous to Homo sapiens Human secreted protein, SEQ ID NO: 5210,accession number G01129,Smith-Waterman Score=225.
atgcatgaaatttggtgccgtgactccgatcgggggacctcccttgggagatcaatcccctgtcctcctgctctttgctctatgaaaaagatccacttacaacctcgggtcctcagacccaccagcccaaggaatatctcaccaattttaaatcggcagctgaagactgacgctgcccaatcgcctcggaagcctacaggatcatcacagacgctctgggtaactctcacagtggagg

SEQ ID NO: 23266 - DNA, 263 bp, Homo sapiens; identical to SEQ ID NO: 10179
  SIMILAR (23)..(139): 561254mologous to Homo sapiens calbindin D28K,accession number S46006,Smith-Waterman Score=117.

SEQ ID NO: 23267 - DNA, 1080 bp, Homo sapiens; identical to SEQ ID NO: 5255
  SIMILAR (464)..(544): 401254mologous to Feline leukemia virus gag-pol precursor polyprotein gPr80,accession number M18247,Smith-Waterman Score=43.

SEQ ID NO: 23268 - DNA, 1359 bp, Homo sapiens
  SIMILAR (4)..(777): 931254mologous to Homo sapiens putative p150,accession number U93563,Smith-Waterman Score=1304.
atgctacctgacttcaaactatactacaaggctacagtaatcaaaaaagcatggtactggtaccaaaacagaggtatagatcaatggaacagaagagagccctcagaaataacgccgcatatctacaactatctgatctttgacaaacctgagaaaaacaagcaatggggaaaggattccctatttaataaatggtgttgggaaaactggctagccatatatagaaagctgaaactggatcccttccttacaccttatacaaaaattaattcaagatggattaaagacatgaacgttagacctaaaaccataaaaaccctagaagaaaacctaggcattaccattcaagacataggcatgggcaaggacttcatgtctaaaacaccaaaagcaatggcaacaaaagccaaaattgacaaacgggatctaattaaactaaagagcttctgcacagcaaaagaaactaccatcagagtgaacaggcaacctacaaaatgggagaacattttcacaacctactcatctgacaaagggctaatatccagaatctacaaagaactcaaacaaatttacaagaaaaaaacaaacaaccccatcaacaagtgggccaaggatatgaacagacacttctcaaaagaagacatttattcagccaaaagacacatgaaaaaatgctcatcatcactggtcatcagagaaatgcaaatcaaaaccacaatgagataccatctcacaccagttagaatggcgatcattaaaaagtcaggaaacaacagaattaaaaaaaacaactttagaattcctgtggaagcaaaaaagagcccatatagccaagacagtcctaagcaaaaagaacaaagctggaaccatcacactacccaacttcaaacaatactacaaggctacagtaaccaaaacagcaagctgaagactgacaccgcccaattgcctcggaagcctacaggaccatcacagacgctctgggtaactctcacagtggaggataagtccgtccccttcttagtcaatacggaggctacccactccacattaccttcttttcaagggcctgtttcccttgtctccataactgctgtgggtattgacggccaggcttctaaacctcttaaaactccccaactctgggatccggagccacaggccctttcagtgtctcaaagcactgaaaataatagatcaaatgtcataaccacacgggctgtggaggcagtgcacctcagagagcatcttagaagtaacaggaaagccaaatgtccagaaaaacagctccctatttccaagcagaggcttgtattttcacagttaaagttcctctttatggaagccttcatgatataa

SEQ ID NO: 23269 - DNA, 2234 bp, Homo sapiens; identical to SEQ ID NO: 3179
  SIMILAR (852)..(1361): 451254mologous to Felis silvestris polyprotein,accession number X51929,Smith-Waterman Score=350.

SEQ ID NO: 23270 - DNA, 1494 bp, Homo sapiens
  SIMILAR (592)..(990): 551254mologous to Moloney murine leukemia virus Pr180,accession number AF033811,Smith-Waterman Score=378.
atggccaaagccgtcctgagcaaaaagaacaaaactggaagcaccacactacccgacttcaaaatatattacaaggatatagtaactgaagaacctggtattgaaaccctgaggcacacaagtagcacaaagttttccaaaggcctacctagtcgtgaatctttctcagagaagcaaaacaaaacaacaacccacctgcacccaggtgaaataaacagctttattgctcacacaaagcctgcttggaggtctcttcacacggacgcgcatgaaatttggtgccgtgactcggatcaggtgaactcccctgggagatcaatcccctgtcctcctgctctttgctccatgagaaagatccacctacgacctctggtcctcagaccagccagcccaaggaacatctcaccaattttaaatccgctacacctcattgctgcccttcttcccaatccaaagcctccttttcgtcctcctcttgtatcccccgaccttaacccacaagtaaaagatatctctactccctcctgggcaaccgatcatgtacacctcaccgtctcattaaaaccttatcacccttaccctgctcaatgccaatatcccatcccacagcacgctttgaaaggattaaagcctgttatcactcgcctgctacagcatggccttttaaagcctataaactctccttacaattcccacattttacctgtcctaaaaccagacaagccttacaagttagttcaggatctatgccttatcaacccaattgttttgcctatccaccccatggtgccaaacccatatactctcctatcctcaatacctccctccacaatccattattctgttctggatctcaaacatgctttctttactattcctttgcacccttcatcccagcctctctttgctttcacctggactgaccctgacattcatcaagctcagcaaattacctgggccgtactgccgcaagccttcacagacagcccccacttcaaatcacccaagcagcttctcaggctcttggtattcagtggaaacttcatatcccttatcgtcttcaatcttcaggaaaggcagaacggactcgtggtctttgaaagacacacctcaccaagctcagcctccaacttaaaaaggactggacagtacttttacctcttgcccttctcagaattaagagcctgtcctcgagatgctacagggtacagtccatttgaacttgtatacggatgcgctttcttactcagccccaacctcgtcccagacaccagccccctagacaggtccagcaaaacgtccccagacatttcacaccagcaagctgccgccctcctccacacttacataaaaaacctttctccttatatcaactctactccccccatatttggacctctcacaacacaaactactattcctgtggccactcctttatgtatctctcagcaaagacccactggaattcccctgggtaacctttcaccttcttga

SEQ ID NO: 23271 - DNA, 520 bp, Homo sapiens
  SIMILAR (1)..(252): 351254mologous to Moloney murine leukemia virus reverse transcriptase,accession number M32803,Smith-Waterman Score=128.
gcagcttacaaagctgttaattatgacaagctgaaagaaactacccaaggtaaagatgaaaacccagcccagtacatggcccacttagcagtgacccttagacgctttactgccctagacccagaagggccagagggccgccttattcttaatatgcattttatcacccagtccactcccaacattaggaaaaaacttcaaaaattaaattccggccctcaaaccccacaacaggatctaattaacctcgccttccagctgaagactgacattgcccgatcacctcggaagcctacaggaccatcacagatgctctgggtaactctcacaatggaagaatctggaggagctgacatagagaagaaactcaggttcctcctgaaggacccatccatggagaggtcctcccagataccctggggcgaggtgatgaagacctgggacaaggccctcagccacaggaagaagatgaccatgaagagcttggggaagcaaatgcagagaaaggcctgtgtgtgtg

SEQ ID NO: 23272 - DNA, 2709 bp, Homo sapiens; identical to SEQ ID NO: 7845
  SIMILAR (913)..(2145): 861254mologous to Homo sapiens unknown,accession number AF149422,Smith-Waterman Score=1862.

SEQ ID NO: 23273 - DNA, 863 bp, Homo sapiens
  SIMILAR (363)..(779): 531254mologous to Gibbon ape leukemia virus pol polyprotein,accession number M26927,Smith-Waterman Score=387.
gggacatgcatgaaatttggtgccgtgactcagatcgggggacctcctttgggagatcaatcccctgtcctcctgatctttactccatgagaaagatccacctacaacctcaagtcctcagactgaccagcccaagaaacatctcaccaatttcaaatccggaccctactgaaaatcagactgttcaactcacctggcagccactcccagagcccctggaactctggcccaaggctctctgactgactccttcccagatcttctcagcttagcagctgaagactgacactgcccaatcgcctcagaagcctacaggaccatcacggatgcccgagcttcgagtaactctcacagtggagggccaatatcccatcccacagctcgctttaaaaagattaaagcctgttatcactcgcctgctacagcatggccttttagagcctataagctctccttacaattcccccattttacctgtcctaaaaccagacaagccttacaagttagttcaggatctgcgccttgtcaaccaaattgttttgcctatccaccccatggtgccaaacccatatacactcctatcctcaatacctccctccacaacccattattctgttctggatctcaaacattctttcgttactattcctttgcacccttcatcccagcctctcttcactttcacttggactgaccctgacacccatcaggctcagcaaatcacctgggctgtactaccacaaggcttcacagacagcccccattacttcagtcaagcccaaatttcatcctcatctgttacctatctcgggataattctcataaaaacacacgtgctctccctgctgatcgtgttcgactga

SEQ ID NO: 23274 - DNA, 1083 bp, Homo sapiens
  SIMILAR (514)..(999): 521254mologous to Phascolarctos cinereus pol protein,accession number AF151794,Smith-Waterman Score=421.
atgacctcaaacaagtccatagctccagattcccgtaatcatcggaagaaacggcatacaaaacaagcttttcgatacaccatctgcagtggaaccaccatcaaaatgcagatttttacaaaaactcttacagagaagaccatcaccctggaggttgaaacttcagatacaatagaaaatgtaaaggccaagatccaggataaggaaggaaatctgcctgcccacctgcacccaggtgaaataaacagctttattgctcacacaaagcctgtttggtggtctcttcacacagacacgcatgaaatttggtgctgtgactcggatcgggggaccacccttgggagatcaatcccctgtcctcctgttctttgttccaagagaaagatccacctacgaccttggtcctcagaccgaccagcccaagaaacatctcaccaatttcaaatccacctcctttgtgttctcctcttgtattcccccaccttaaccctcaagtatatctctactccctccttggcgaccgatcatgcaccccttaccatctcattaaaacctaatcacccttaccctgctcaatgccaatatcccatcccacagcatgctttgaaaggattaaagcctgctatcactcgcctgctacagcatggccttttaaagcctataaactctccttacaattcccccattttacctgtcctagaaccagagaagatttacaggttagtagttcaggatctgcgccttatcaaccaatttgttttgcctatccaccccatggtgccaaacccatatactctcctatcctcaatacctccctccacaacctattattctgttctggatctgaaacatgctttctttactattcctttgcatccttcatcccagcctctcttcgctttcacttggactgaccctgacactcatcaggctcagcaaattacctgggctatactgccgcaaagcttcactgacagcccccattacttcagtcaagcccaaatttcttcctcatctgttacctatcttggcataattctcataaaaacacatgtgctttccctgccgatcatgtccgactga

SEQ ID NO: 23275 - DNA, 678 bp, Homo sapiens
  SIMILAR (400)..(594): 531254mologous to porcine endogenous type C retrovirus reverse transcriptase,accession number AF033260,Smith-Waterman Score=166.
atgggaatagaagacacttcttctaggcccttatggaaacacgcaagtgttctgtggagcccagaagctcaagcagctgcagtgtatctcagttgcttgatgtcagccaacactcaggttctgaaattactgaatgcattacttccattccagtgtgcaaatagggctgcccctcaccaggcggagccaggtcctaattcttcctcagcctctactccccaaccctataatccttttatcacctcccctcctcacacctgttccagcttacagtttcattctgcgactagccctcccccacctgcccggcaatttcctcttaaaaaggtggctgaagctaaaggcatagtcaagcagctgaagactgacactgcccgatcacctcggaagcctacaggaccatcacagacgctctgggtaactctcacagtggaggatctcaaacatgctttctttactattcctttgcacccttcatcccagcctctcttcgctttcacttggactgaccctgacacccatcaggcacagcaaattacccgggctgtactgccgcaagtcttcacagacagcccccattacttcagtcaagctcaaatttcttcctcatctgttacctatcttggcataattctcataaaaacacatgtgctctccctgctgatcatgtctggctaa

SEQ ID NO: 23276 - DNA, 1392 bp, Homo sapiens
  SIMILAR (970)..(1389): 301254mologous to Murine leukemia virus reverse transcriptase,accession number M87550,Smith-Waterman Score=164.
atggaagttcataaacacccgttcaatacattggccctacggcatgagagtggctgtgaattagtttgggcagaaaaacacaggaatcagattttcccatttccgaagtcaacagcttccccaaagcaatgggacacaggacgtcataactcagacgccaaacagcaggagccaggagggagggaagaaaggaacacaatggaaatggagacaaaggagacacattttatccgtggacccaaaactctggcgtcggtcacggactgggaaggcagccttcccttggtgtttaatcattgcaggggcacctctctgattattcacccacgtttcaaaggtgtcagaccacgcagggatgcttgccttggtccttcacccttagcggcaagtcccgcttttctggggaaggggcaacacgctttaaaaggattaaagcctgttatcactcgcctgctacagcatgggcttctaaaacctataaactctcctttcccttcctcccattttacctgtcctaaaaccagacaaggcttacaagttagttcagaatctgcgccttatcaaccaaattgttttgcctatccaccctgtggtgccaaacccatacactctcctatcctcaatacctccttctactacccattattctgttctggatctcaaacatgctttctttactattcctttgcacccttcatcccagcctctctttgccttcacttagactgaccctgacacccattaggctcagcaaattacctgggctgtactgccgcaaggcttcacaaggcagcccccattacttcagttaagcccaaatttcatcctcatctgttacctatctcggcataattctcataaaaacacacgtgctctccctgctgatcgtgtctgactgatctttcaaccccaaaaccttctacaaaacaacaactcctttccttcctaggcatggttagtgtggtcagaattcttacacaagagctgggactgtaccctgtaagttttctgtccaaacaacttgaccttactgttttagcctaagcatcatgtctccgtgcagcggctgccgctgctttaacacttttagaggccctcaaaatcacaaactatgctcaactcactctctacagctctcataatttccaaaatctattttcttcctcacacctgacgcatatactgtctgctccccggctccttcagctgtactcactctttgttgagtctcccacaattaccattgttcctggcccggacttcaatcctgcctctcacattattctggataccacacctgaccctcatgactgcatctctctgatccacctgacgttcaccccatttccccatatttccttctttcctgttcctcaccctgatcacacttag

SEQ ID NO: 23277 - DNA, 1121 bp, Homo sapiens
  SIMILAR (430)..(729): 441254mologous to Sus scrofa pol protein,accession number AF038601,Smith-Waterman Score=234.
atgattcaagagcatgcagacaaacaggtgcagaggctgcagggagtgcttttgggctccatccccacagcagcatcaagggcccgcctgcacccaggtgaaataaacaaccatgttgctcatacagagcctgtttggtggtctcttcacatggacgcgtatgaaatttggtgccgtggctcggatcggaggacatcccttgggagatcaatcccccttcctcctgctctttgctccctgagaaggatccacctacgacctcaggtcctcagatcgaccagcccaagaaacatctcaccgatttcaaatccgggacacctctctgattatacacccacgtttcaagggtgtcagaccatgcagggacgcctgccttggtccttcacccttagcggcaagtctcgcttttctggggaaggggcaactcaacgccaatatcccatcccacagcaagctttgaaaggattaatgcctgctatcactcgcctgctacagcatggccttttaaagcctataaactctccttaccattcccccattttacctgtcctaaaaccagacaagccttacaagttagttcaggatctgcgccttatcaaccaaattgttttgcctatccaccccatggtgccaaacccatatactcttctatcctcaatacctgcctctacaacccattattctgttcgtatatgtcaaacatgctttctttactattcctttgcacccttcatcccagcctctctccactttcacttggactgaccctgacacccatcaagctcagcaaattacctaggctgtactgcctcaagtcttcacagacagcccccattacttcagtcaagcccaaatttcttcctcatctgttacctatctcggcataattcttcatgaaaacacccgtgctctccctgctgaccatgtctgactaatctcccaaaccccaatctcttctacaaaacaacaactcctttccttcctaggcatggttaggtacttctgcctttggatacctagttttaccatcctgactaaaccattatattaattcacaaaagcaaacctagctgaccccacagatcctaaatcctttccccactcctctttccgttccttga

SEQ ID NO: 23278 - DNA, 1030 bp, Homo sapiens
  SIMILAR (341)..(760): 481254mologous to porcine endogenous retrovirus pol,accession number Y17013,Smith-Waterman Score=336.
gatgtcaagtaaatattattgtcagacctctgagcccaagcctgcaggtatacacccagatggcctgaagcaagtgaagaatcacaaaagaactgaaaatggccggttcctgccctccaccctataatccttctatcacctccccctcctcacacctggtccagcttacagtttcgttccgtgacttagccctcccccacctgcccagcaatttactcttaaaaaggtggctggagctaaaggcatagtcaaggttagtgctcctttttctttatccgacctctcccaaatcagttagcgtttaggctctttttcatcaaatcacccttacctgggtcaacgccagtatcccatcccacaacaggctttaaagggattaaagcctgttatcacttgcctgttacaacatgtccttttaaagcctgtaaactctccttacaattcccccattttacctgtccaaaaactggacatgccttacaggttagttcaggatctgtgccttatcaaccaaattgtcttgcctatccacgccatggtgccaaacccatatactctcctaacctcgatacctccctccacaacccattattctgttctagatctcaaacctgctttctttactattcctttgcgcctttcattccagcctctcttcactttctcttggactgaccctgacacccatcaggctcagcagattacccgggctgtactgccgcaaagcttcacagacagcccccattatttcagtcaagcccaaatttcttcctcatctgttacctatctcggcatacctggttttgccatcctaacaaaaccattatataaactcacaaaaggaaaccttgctgaccccatagatcctaagtcctttccccactcctctttccgttccttgaagacagctttagagactgcccccatcctagctctccctgtctcatcccaacctttttcattacccacagctgaagtgtgggctgcgcagtcagaattcttacacaagaaccgggaccgcaccgagtag

SEQ ID NO: 23279 - DNA, 622 bp, Homo sapiens
  SIMILAR (114)..(299): 981254mologous to Homo sapiens polymerase (RNA) III (DNA directed) polypeptide K (12.3 kDa),accession number BC001381,Smith- Waterman Score=305.
  misc_feature (1)...(622): n = a,t,c or g
ttggctagcacttctgggaaaattcggcnngnnctctgntgntgctcaaggaggtaaagagagccagtgttcccacttttgcctttggtcttttgtaggtggactctgttatagaagtcaacttccaaatagccctagaatacggccaggcaatgacggtccgagtgtgcaagatggatggagaagtaatgcccgtggttgtagtgcagagtgccacagtcctggacctgaagaaggccatccagagatacgtgcagctcaagcaggagcgtgaagggggcattcagcacatcagctggtaagtggaacaacattcccttcattatagcccttcgtggggctagtgcccttcttggcactgtcaccagggcaccacctgggaaacagctctcagctctgcattgagtacagcaccacttgaagtgattgagctccctgttcacaagagtgatgagctccctgttcacagacagttgcggggttcgtttctgttgcctggggacttcttggccttcgggccattnccccaacatttcttgttctttcccttcgggcntcaccccttccgagttgttgggtatttttcatttggggggacattttnggggattttccatntttt

SEQ ID NO: 23280 - DNA, 830 bp, Homo sapiens
  SIMILAR (822)..(556): 861254mologous to Homo sapiens polymerase (RNA) III (DNA directed) polypeptide K (12.3 kDa),accession number BC001381,Smith- Waterman Score=381.
tcagttctgctccccccacccacctccttgctggaagctcacagacactgtgtgtacctccaaggcccagaggagatgcactggaggaagaggaggtttgtgtgacatgcctggtcccaaaagtctccggggtgccagcaagccatgctttggcttctcaggtaatgtgaaatagctaaatgagagggcgtctctgtgttcctcctcctttccccgtaccagggtcagccccaggtgtcccggagatgcagccccaggtgtcccagagatgtcctcatcgcggacgtggccccaggtgtcctcaggtgtctcgaagccatggcccctcctgggtgggtcacccagggatgccgctgtacggatcagacgcagttctactgtggcgctccgggtttggccgggccccctaatggcagccgtggagaatccctgaaaattagcgtttggatttttccatgccgtgattttggaaatttcaactgacatggagcccaccatcccgtgccccgatcgaaacccatggagacagcaagcaaagaagatggccagttcacgctctcggagcttatttcagtcttccgtgagtttctctcctgcagaggtcagatggtacgtcctccacacgtaggaccagctgatgtgctgaatgcccccttcacgctcctgcttgagctgcacgtatctctggatggcattcttcaggtccaggactgtggcactctgcactacaaccccgggcactgcttctccatccatcgtgcacactcggtccgtcactgcctggcagtattatagggctatttgagagttgacttcttccagctcgtgcc

SEQ ID NO: 23281 - DNA, 885 bp, Homo sapiens
  SIMILAR (166)..(564): 741254mologous to Homo sapiens polymerase (RNA) III (DNA directed) polypeptide K (12.3 kDa),accession number BC001381,Smith- Waterman Score=462.
aagctcccactgatgctctctggaccagcgtggtggaattcggctggcagtgcgggcagagcccggctgagaggggcggccctggaggagacggaggcggcgggtgggcccgaggcgcaagaggaagatgaggacgaagaagaggcgctgccgcactccgaggccatggacgtgttccaggagggtctggctatggtggtgcaggacccgctgctctgcgatctgccgatccaggttactctggaagaagtcaactcccaaatagccctagaatacggccaggcaatgacggtccgagtgtgcaagatggatggagaagtaatgcccgtggttgtagtgcagagtgccacagtcctgggacctgaagaaggccatccagagatacgtgcagctcaagcaggagcgttgaagggggcattcagcacatcagctggtcctacgtgtggaggacgtaccatcttgacctctgcaggagagaaacttacggaagacagaaagaagctccgagactacggcatccggaatcgagacgaggtttccttcatcaaaaagctgaggcaaaagtgagcctccagacaggacaacgctcttcatcactggtgggctgagctttttcccagcaggaattgggtcctcgaatcatcgtgcctcttttcacagaaaggacgttgtggtggcctcaccccagggcattgcccaacagggaactgttcagcataaacctgggggggccctcaggactaggacagggtgagccagtgctccctcctttcatgtacttggcctgagactgacctctccctaggtccaaatgccctagtcacatggcagacccacggcctggcccactgtataaaataaacctgtttgcttcttagtttgaaa

SEQ ID NO: 23282 - DNA, 12027 bp, Homo sapiens
  SIMILAR (11190)..(11321): 801254mologous to Bacteriophage N4 single-stranded DNA- binding protein,accession number U29728,Smith-Waterman Score=178.
atggcaaccagatggttctactatggtcatcccccaagggatgcccgtgtaccacgtattgttgctgaagcaaaagaaaagaatcttaccccaggtaagattatcgaagtggatgtcactatcgaagctcagattcgtcaggagtttctggacgctgaacgtgatacaggtggctttgttaaattcttccgtattaccaagaagaagctacaagagttcttcttaggagaagaggaagaacaagtccctcatgtatcacctgtagagttaggtgctaaacccactgctttcaatgcttttattgctaatgctgtgggcaaaactcttgctgtacaacatgcatcattaaaagcacctgaaccagaaatgacagttactcatgagcgtttttacggtaactatgctgtatggattacagatgtagacccacggaatcatcgtattgaggttattcatgttatccgtgaaatctcaggaagaaccagtgaatatgtcaataacctgctggctcaaccaaccccattcaaagtatttgattggctcacagagacgcaggctaaagagtttgtaagacgtctgaataacactcagggtgttatctctgtctataacaaactggaagacggtattcctgttaaggttgctgtaaaggccacagagccaaccaataaggaaaagctggaagctgcatcaactaagctgaaagctatgggtgctgtcgctactgatgcttatgagtttcatactgacttgaatgagaatgaagagactattgtagctgtagtgaatgataaggtggttcctgacgttcagaacctacaccgtcacatccgtcaatctgcaaacctgaaagactataaaggctttactaagttccttgaacgtctgtctactgtaattgataaacgtcgccactctgttgaagacctgatgaagtttatggaaaaaggtgacctgcccattgcagatgatggctccattgttatcttcaaacgtctggaaagcaaagacaatcctgaacatctcaaagacgtaatggatgatgtatttgttgattgccattctaagaagattgagcaatgcgttggtatgcgtgtaatggttaaagaaaaccttgtagaccagaaccgtcgtaaagactgttctcatggtctgcacgtagcttctctgcaatacattcgtaatttctcaggcaacgtaaccattattggtaaagttgctccagaggatgtatttgcagtaccagaatacgatgttactaagatgcgtgtatctgcttatcacatcattaccaagctacctgatgctattcgtgaccatgttaataatggcaatccaatctccaccattgagggtggtacggaaatcctgaacatggttctcagtggtaatcaccctgaaccttcccgtcaggtactagttggtggtcattatggaaccaatctgacttattcagaactcactcgtaattatctggatgatgatgaagacagcgttattccagatgaaccagtaattaagaaaactgccttgaatatggaagagagctttacggcaactaatcctaaagctgaaccagtgaaggcaacggatgttaaacctattaagaagactaagatggaaattcttaaagacctttggaaccagttcctgaaagcagagacttctaatgaagctattacactggctgatgaaatcattgctgctaagggcaaatgtaagaaatcatgggcttctttaggcttcagtggtgacatggttcagaaactgattgatgctcgtgctaataaacctaagccagaaaaagcagtcaaacaggataaaaccgttgcacctaagaaaactacagtcactcgtagtcggaatgctgatgttattcgtagttatctaaatgacaaaggtatgtctgattactgtaaagctcatgccattcacgatgtgaaacgtgctgctaagaaatcttatgctgcactgggtctgactcctgaagaatgcagccaaattgataaactgaagcatcacctgaagatacatactatggccaaagtttatcgtgctaaccgtaaagcccatgatgacgatattattcgtatgaatgcagtcggtttatcattgggaaccattgctaaaacactgggtgttcaccccactacagttaccttacgattacgctctcttggtattgaaccagccgacacacgtcgaacatttatggagaacgtactagcaccattacctactcacgtagctgattggttatcagaacaagtaggaccaaaatatgagattcgacaatacgttcgagacttattactggaagcctacaataatcgtcataatcataaggaaactgctcatgaacgattcctcaaaagatacgttgaagtagttgagatgctggaagaattggctccaaattctgaagaagcatacgatacacttcataatgccattgcagctttaactgaattgtcagaattaatgaagtcctctgataaagaagtttatgcacctaacagcaatcgcttagctattctggatgcactggcagaccagattgttacagcaactggcatcggtactttcttgggtatgaacgtacccggagcactcactgaagtgaaccgttctaattattcaaaatttgaagacggtgagcctgttttcaatgagaataagaaagtaatgaaagaggcagcggcagaaggtttcttcgactttctgctcgaccccaatgcttctgaacttcgtattagtggacctggtggtacaggcaagacatttacaatggctcatatgattgacgagattatgcctcgttatcatgagacatgtagtctgatgggaatccctgctctctataacgaagttattatgactgctactactaataaggcagcagaagtattagcccgtgcaacaggacgtcctacgtctacctatcattcctttcaaggtctgacagtacggaataacctgaagactggggaagcagacctgattccatctaagtccttcagtatcaaaaagaataaggtcatttttattgatgaagcatcaatgattgaccgtaaactgaagaagtttattaacgaaggtactcaccaaagtaagattgtttacttaggcgataaatgccaattgttacctgtaaaggaaacttcttcccctgtctacaatgacagtagcattaaagagtttatgctgacccaacagatgcgtactgatgtccctgaactccatgcactgcatgaacagcttcgtggaaccattgaagagttagtaagtaactctgctattcagattggtgctggtgaccgccttagtattgaacaggaatgccagattgttgaccaggattctgctactcgtaagattctgattgattcctctggcatcgaattagaagtacgtgattgcaccctggatactggttatggtggtgtctttgaaggtatccctattccggtagatatggattatttcattcgtttgcaaaagtactatgcacaccaaaagaactgggaacgtcacttctatttgaaagaaacattccctgaacttcgagcattacatgcttctactgtgcataagtctcaaggttctacctacgacaccatctttattgatgctactgatttatctacttgccgtcagcctgatgtagtagcacgtctgctttacgtagcagtatctcgtgctcgtcatcgtgttgtgttctatggctctttggcagagaaatttggtggagaacttatgcaactgggtgaaaaacaaatccgtgaaatgactaatagtagtgaactggttcaggaattattcttagccgagttacgtcggctagataaagtgctggatagtatcattacacgtaatggggaaacattcgctgtatacaactcaacagggttcctgtatttaggggagttctattcgagttcccgttcatcacaacaacctccttctggtcatcgtctggctctagctaatcacctactggatgatatgcgggagtatctggaacaagcaggtaaacttctgctagaagtccatatggtgaatcagatggtctttcgtctggttcagggctgtaagacttatcaagacgttcgtgatgcattgccagaatgcctcattgctatggataaacaaggtcatctgaaatccttacagagaaccagaaaggcagcatttactctggataatgatgctatggctctccgtcatatgagaaaatcttgccgattatcgaatactatgcgggaacccatcttatcttttgaggtctgtatgcgttacattacattcaacaatgagggtatctaccctattgctatccttactacaacgttacgtaaggatgatattgtcaaagcatacatggaaccctgggatgtagataaagattcagtaatgattcttgaacttcatacagccccagggaaaaagaaaactcctgctaaagagatgcaggagtttattacccaagaattagtgccagcattcgaagcagcacaaactcagtatatcatctgtggtgattctgaatattacaaacagctaaccaaacaaggtaaagctgatgccaatattggctatgtaatggattgtgcttatgggaaccagaaagttatttacgttcccaattacagacaaatcttttatgacccagataagataaagactaagattgctttatccatgcaggctctgattgattatgtctctggttcttatgttgagccaggaactaagattatccattatgctgattacccattaactccagaagctatatctaagtggttagataagttactggagatggatgttccattagcagtagatatagaaaccttcagtctgaagcattatgactgtggtataggcactattacattctgctggaacaagcacgaagggattgcattccctgtggattatgaaccaattgagggggctactgaagctccttatggtagacaagttcacaacatgcttgttcgttctatgctcagggacttttttattaagtatctgaacaggcagatgtatcacaatattgcctttgacgtatacgcactcatttaccagttatttatgacagaccttctggatacggaagggttgttgcatggcatgagtatcatgctaagaaactgggattgcactaagttaattacctatctggctactaactcttgtgccggtaataagctaagtcttaaagaccaggctcaggaatatgctggtaactatgctcaagaagaaatcaatgacattaccagaatcccattagcagagttgttggaatacaacttagtggatggattatgtacctggtatgtctatgaaaagcattgggatactctggttaatgaccaacagttagatgttatacaaacatctttagacctgcataaccatactcaagataccagtattctggaaattcttgatgctctgattgattacaaagctgtagataaaattctgacagcatttattccagcattaaaaaatgccagacaaggaccagatggttggcattatctctttggtaatctgaacttaggtgggactgtatcaggccgtctatccagtagtgaaccaaacctacagaacctaccttctggttccagatatgccaagatgattaaaaaatgttttgaggctcctcctggatggatattttgtgggctagactttgcttctctcgaagaccgtatatctgctttaacaaccaaagaccctaataaactaaaggtgtataccgatggttacgacgggcatagtctacgtgcatatgcttacttcggtgagatgatgcctgacattgaagatacggtagagtctgttaattctattcaggagaagtacaaagcatatcgtcaggattctaaagcacctacctttgctcttacctatcagggcacgtacatcactttgatgaagaactgtggtttccctgaacagaaagctcgaatggttgaggaacgttatcacacactttataaggtaagtgatgactgggttcaggctaaactagaccaagctgcaaaagatggttatgtaaccgtagcatttggcctgagagtcagaacccccttacttcaacaagttatccgtggaaccagtaaaactccttatgaagctgaagctgaaggacgtactgctggtaatgcattaggccaaagttggtgtcttctgaataaccgtgctggttcagagttcatgcgtaaggtacggaatagtaagcatcgtcttgatattcgtccaagtacccatatccatgatgctcagtatttccttatccgtgatgatatggatgttgtgatatataccaatactcatttggtgaaagcagtacaatggcaagaccatcctgatattgctcatccagatgttcatttggatggtcaggaaggtgctgttattgttcagaacactatgctgcttactgaagagaaacaggtaactttccgtgacctgggacgtgctcagtctgctctgtttcagaatctgaatgaccgttttggtcaagtggtagatgtacgggatattgtattcctgaacgtcagctacttgggtcatatgagccagcctgactttcagcaaaatctggtaaccaaccctcaacgtatggaacagcctccatatcaggccgagtgtgaggatattatccaagcactgaatatgacctttgatgaagggtgtctgttcaaggcattgtggcgtaatgctgctgctcgtttaggtaatggtaaaccaggtaacaatgccgtttatgatgcagagaagatggttcattatgctaaccgcatttttattaaagaatccggtgggcagaaaaaagaagcagaagaaccagtttctgcggctctgaagaagggtgaagagattcatatgtctctgtctgaattattcaccctgttaactggtgaagcagcagaagctgtctggcttttgcatgacgagtatgattatgtgaaggataaaaagtatctttctgtgactaccctgcttaagccaattaagcacattgtcatgaagcatcgtgtagacctttctgtagaaagtatggacatcatggatttggtgtccacttctatggggtatcctgagcgtgtcgttcagaatgttgtcatcaaccctacccctgagcagattgcatcaaatccaaacttaattcctgtatggatagaacaacgagcaactaaaaagattgctggttggactattgggggcaagttcgacattgttactgaaggtcttcttcaggatgtaaaatccacctccacttacacatgggtaaagggtggacgtgatgaagaacatagacttcaggggtcaatgtatcgttggttacatgacgacaagattaccgaagatgtgattcgtattaactacatcttcactgactggatgaaagcattagctacatctcaagaaaactatccaaagcatcgtgtgctgcataaagacattccattgatgtcttatgaagcgactgaagaatggattaaagccaagctggctctcattgataagtactgggatgctcctgaaagcgagattccagaatgtactgatgaagagttatggcgttctgacccagtgtttaaatactttgctgacccagagaaggcaaagcaacctggtgctcgttctaccaaaaacttccctactctctttgaggctcggaagttcatggcagagaaaggcaaaggcactattcttcatgttcctgagatatttcccatgattgacctgaccggagtctcacatcatccggcgattgaagaaatcgttgatgtgttatgtaacaagacgcaaaacactgaccgtggttttttccgtgtagaagtggcctatttccttgcgaaaatggcttcatgtatgggtgcaactatcatcactaaagaccgtggtgaaattccagtaaacatctatgcagtggctcttgctacttcaggcttcggtaaaggccattcggtcaacattgttgaagacggttttatggctggctttaagaagcggtttatggaagacaccatgcctgctttagcagaagaccgtctgtggaaaattgctaacgaacgttctgctcgtaatgctactgaccagaaggaagagtttgacaaggtggaagctgaatacagacgtactggtgcttatccatttacgtttgactcaggtacacctcctgctgtgaaacagttacgtcataaactcttattagctggatgtggtgctattaacttacagattgatgagattggttcaaaccttctcgctaatgctgatgtattaactgtgttccttgagttgtacgaccaaggcaagattaaacagaaacttactaagaatactgctgaaagtattcgtagtgaggaagttgatggtaaaactccagctaaccttcttctgtttggtacaccgagcaaacttctcaatgggagccagactgaggaactcttctatgacttccttgatactggctattctcgtcgttgtctgtttgctgtagatgcatccaagtttggttggaaaatgacagttgaagatgatgttggtattgcactaatcgactacaagattcagtgtgaaaaacaagcagcagctttagctgaccacgaagagattcgtaaagcagaactggaacatcgctattttaaggcactgaaattggcaggtgcatttgcatttgttgataacagtatcatggtagagatggaacatctgaagcaagcaattcttctggtggaagagtctggtgttgcattccagactatcctcaatcgtgaaaaagcctacgttaaattagccaagtatattgcatctgttggtactgaagttactcatgcagatttgcttgaagctttaccattctataagagtgggaatgctgcacgtaatgagatgatgactttagctactgcatggggctataagcagcatatcatcattaagaagacatacaacgaaggtattgagttcttccgtggtgaaacactgaaagagactgatactaacgaaatgattgtttcttatggtgagaactttgcttatgactatattgcagagaaagttccatttgaccagttacatgtactgacccagcaagcaggttatcactgggctaaccaccatttccgtcgagggcatcgtgctgaagagaatgctattgctggcttcaatatgattgtcattgatgtggatggtacgtgtagtttggacgtgtgccatgaattgatgaaagaataccgattcatgacatatacaaccaaacgccatactgatgaagaaaaccgtttccggttaattatcccaatgaactatcagcttgaacttgatggtgctgaatataaagagttcatggataacgttatggcatggctcccatttaaaacggacgagtctgctaatcaacgagccaagaaatgggaatcatgtgctaagggtacgtattactacaatatggatgctcccctgctagacgtaagagatttcattcctagaaccagtaagaatgaggcattccagcaagggatgcagaaggttcaaaatctggataatctcgaacgttggtttgcccaacgaattgctacaggcaatcgtaataaccacatgattaagtatgccctggctctggtagatagtggtataggcttcaatgaagttaaacaacgtgtgcatgagttcaataagaaactcagcaatcccctatctgctgatgaactggattccactgtaatgattactgtggctaaactccttttcttggttgaagaggactgtcagttaaaagaggaaactatgtcagaagaatttgaacatggcgaaatgaatgaccagctaatcctgattgtaggattttctgctgctggtaaatcggcctcacttcgtaacatccgtaaccaggaacgttgggtatatctgaatacagaagctggtaaacgtctgccatttaaaaataacttcaatggtgttcgtattactgacccataccaaatcctggaatactttgaccaatgcattgaacatcgtgatgacgtggacggaatcattgtagattccctgactttcatgatggatatgctggaaactcagtatgtactcactgctgcaaacactcagaaggcttggggtgaatttgcacagttcttcaaaattctccttcaggagaaagtagttaaatttgccaagccagttatcttcactgctcacgtcaaagacgaagtagatgaacgtgcaatggaactgaagactttcgttccagtaaaaggttctctgaagaacaatggcattgaagcatacttctctactgttgtatcagcagaacgtatcgaccttaaagaacttgaaaagtattccaatggaatgttggaaattactgaggatgagcaagagttggggtacaaacacgtattccagactcgacctactaagaaaacagtaggtaaacgtattcgttctcctatgggtatgttcagtaagcaagagacttatatggacaatgatgcccaaaaacttctcgaccatctggcagagtattactctaccggtcaggcagctaaagcagagaaagcaacggataacctgggtggtggatttggtgcaaaagaatctgatatttatctggctaatctgaaagtagcttatgcaggtaaagcagcttctggtgctaacttcattcagattattgcagacctgactgaccttgatggacacagtgctggtgaatatcgtgagcaactgtacatcacttctggtactgaaaaaggctgcaagtgtacttatgaaaagaatggtaaggaatacttcctgccaggctacactgtaatcaatgacatcctggtaatgacttctggtgagactattcctgaagcagtcttcgaagagaaagtcgttaacgtatatgacttcgatgagaagaaagaagttgccaaatctgtcatggttccagtcaatgctatcggtggtaagtttgctgtagctattctgaaatctgaagaagataagcagactaaagatggctccggtaactatgtgtctactggtgaaactcgtttcactaataccatcgaaaaagtattccaccctgacctgcatctgactgttgttgaagcagaagaactgactgaacgtggtaaagaactgaccgttgaagaagcagtcttttgggacaatggctggagaaaacaaaggcgttaccgtgacaaaacactaaaggcggtgcttccggtaaagctggtcagccaccaaaaccaggtgctactaatactggtgcgggtgcttctgctgcaaaatctctgttcgatacctgtgcttggagttgaccccagttttcgtaactggggactagcacggggaatgctcgacttagagacgggaatactctctggattagacctgaagctggtagaaaccaaacctgatggaaccaagcaagtaaggcagaacagcaaagatatgcaagctgctgaggacattactactggtgtcatcgactggttcaaagaagcaaaggtcatctttgtagaggttcccgttggctcacaaagtgccaatggaatgaaatcctatggtgtttgtgtaggcatcttaggagcactcagggcactaggacatgagattattgaagttactcctatcgagaacaaagtagctctgtccggtattaagactgcttctaaagatgtgatgattagagcagctacaggattttatccagaggccaactggctcaaggataccaaagtatttgaaacaatacagagaaataccatgcctcggaaactcagtgttgaattatttcattcttgggcagcctttaaacacatcagctcaggcctccagaagagaacctgtgaacatgttaccttcaacgacaaaagggactttgcagatgtgatgaaggatcttgagaaggagggttattttggttatgcaggtggtcacaatgttatcataaggacccttatgagagggaagcaagaggatcaaaatcagaaaaagatgtga

SEQ ID NO: 23283 - DNA, 16395 bp, Homo sapiens
  SIMILAR (7017)..(6931): 351254mologous to Caenorhabditis elegans coded for by C. elegans cDNA yk126f9.5; coded for by C. elegans cDNA yk159h6.3; coded for by C. elegans cDNA yk126f9.3; coded for by C. elegans cDNA yk159h6.5,accession number U67956,Smith-Waterman Score=41.
ttaacgtttcagacctgcaaacagagaaggtttggcttgtactggttctttagcctcttcttcctgtacttctttttcttcttcctgagcagcagcttcttcagctacttcaacagtttcatcaacagtttcagtagtagtttctacttcaactacttcttcactgcgagattcccaccattcctgataagcatcaaagtctctgttagcctgagcaaagccttctaccaaagcatccatagttgggtagtttgggtcagcaggcattgactgattcactaactggaagaatctgtatatgtactctttagctgtattttcaggactattaagagaacaaccaaatacagcatagatatactgaatatcaccaatatctttgttcttcttcaggtcatccataatgtcagaaatcttaccccctgtagccttcttaaaggctttcttacaaagagtatatgtagaaccagaaatccagttcttatcactacggatagggatgaatgaatagaatctgttattggtcgtcttattaataaacagagcatcaaggatggcattaccactgttctgtttataaataaacaattgaggcataccaccagcagacatagtagtaactacatctgtattctgataagaccatgtataacctaaagtatctgtagttactgtagtagttctggtttcagtaaccccaccacctaaatcaataacttcagtgtttgtagtggaaccagtagatacagtaccagtctgtacctgggtcattgtagtcttacgaataatgattaagcctacttcacttggttcacgaaattctttctcgtaaacatctgagaagttagtccaactaacctgttcttcttcagtattggtactttcctcatcaggtctgccatcagagaatacactcttaatatgagtaactgtcttcagggtagctgacttaggagtatggttctgagatacctgagtccattcagaagtagaaggtaagtcatcagcagatggtacagatacagcaggatgaaccactgggtctgcaacactagtaggctgtatgtagtaatagttcacatacagatacattgcatcctgactgtaattctctggataaaaggataactcactaccatcagtagcagtgagtacaatcctgtcatcatccatgatgtctatttcaaactcttcagtaatacggtctggataattctcatagaggaatttatcagcccattcctcaaaatcaccaaatccaatcctactgctctgaacctgtacctcataacctgctttttgaggaacttgccatttaactacttcagggtctatctgagacagtattgacaagttcccataagcaataccaattgaagggtcatagttagttgcagcccaaccagggaatctacgtaaacgaataccaggtccatttaaataagagttagtgatggtatcacccatactaaagtcagatttactgacgatgttaccaatcaccgtagtctttaaataatttggacgtttatgtatatcccctgccaaattgtagacagaggatgctacgtagattttagtcttacccaatgcgttgttattcttcaatgcagtaagaatgctatccagactggtgttagtgaagccattaggaggagacagaccctcatcaatggttttctgagtgacccatgcatcagtaaacagtttggcagctttaacttcagcatcacgtttataagacgtaatctgttggtcatagagttctttctgtttacctacagaaccagctacacgagtaccatcagtacgagtatcagaagtctgagcacgttgtgcttccttctgctctttcgtcatattgatttgttcagtagttaacttagtctgttcagcaacctgagtggtctggttcttcaacatcagtaattgttgaggaagcatagaggatagattgtattgagcagtacagtaagttactgactcattagacagcttcagcttagtaagggcatattcagctttagtagccagagcctgaatcttagctgtaacaaagttagctttgataataccaagattagcacgagcagtaattgcagctacctgagcagtaacagcattccaataagcctggtctttagtggtgaggaattgcacagcattagccatacatgcttccatagtagcaatgtatgccttaacgtaatcaccaccagtaattcggttattcttaaattctgccagtagatgattgcttgctgattgcattaaagcgtcaaatacaccagaacccccaacctcacgagtagttagttgttctgtggttatcttctctatctctgcatagatagggctattaatgccaccaggaatatcatactcactgccagacatgtcgatgtcaggaagcgtaaaatcctcaccagcagcaatctgagcagcagccagagtttgtaattcttccttagtcagtggagacagaacttcaatggcaaactcacgtacccatgcagacgtaatattaggctgaccattcttacctttggtaactcgaatgttcaggaacttacgttctttgaggaagttataaatacagtaagggatgtgatagccctcatcagtagcttcaccaaatggaacgaatttacgaacagtaccaatatattcgttagctactgtaataatctcaccaggcaggtctttcttcttagggtcaaggttctgaatacgtactcgaaccagctttaattgttctaagcgttgctggtgacgtaaagaagttgccgtagttactgtacctgtagacagagccagaggattaggctgaggttctactggttcctgagctgcttcaatcttcttacgaagagtttcagcactaatattatttgagtatgaaatacccatcatattagctcgttgtttcagcagagaaagttcatcaaccttaacttcatcaacggtgtcatcgttgccctgagttaaatcagcggtcggtttatcgttaatgctcatgtgtatatatccgtcagtctggaagccaatggaggtaaaggaatcatcacctactaccagcattgggtaaacgtcatagtgctcttggccagataccatagaggtacggtaaccagggttagctacagtagcctgtgcaccagcacctgccccagtgcagcatttctgaatgatacggaacttatcaatagaaccgacttcaccattcatgatagtacctgcatcagcatagtgctgagtttcgataaaggctttattaccgaacaggtctttcattgctttcagttctggaaccagttcagaacctacatacataacacgagtagcaccgatgactttagtatcaatcatacgggaaccagtgataatggtagtctgagtaggagtacggttctctgtcagaatctggtcaagacgcatcaggttcttataagaaacgatagacggagtagaaccttcaccagtgatggtggcatcagaagtagcagcaccagcatacagaacagtaccagcagcagccagcaggtctttttgcagtacagcttcagtaatctgagtagcaccattcatcagttcacgggacaggtgttccatcaggccatcatcagaatcgaagtcaatagattcctgagtgaactcatagaagaagccaaacttgtgaatagaaccttcacgagcaatacgagtaaaaccaacacggttaactcgaccaccgttttcagtcagtagaggcagtttggaagtaatgttaccgatgtctttgctggaaccatacaggttaccgttaacaatagtagcaccacttgcatcaataccctggtcattgatgttacggtcatccagcagaggaacatattcatataccttgatggtcttaccgtaatgcttcggcatgttagttacagaggccagtggcatgaagtactgctctttacgggcagtgatgattgctttcttcagccagaagaaggtttgcatctggtcagagttagcaccatcaatactagatttttctgtcttacgcggtgtaacccgtgatggggatgccgctgctgcctgttgagtattagtgatttcagacttaggtgttgcaacacgagttgctactggctgaaccactggttcaggttgttcaacaggtttctgcttaatcaaatcattaaaaccaccattagcagcaaggtagttaccgacttgattataagcatccaggaatgctgtaccgattgggatttggcctaagattttgagtcgttcaatttcagaaacaatacggtcgtaaataccgttagctttctgttcaacgatggtattaaccagaccacgattttccagcaatgcctgtttgctgtggtcatcccacgtagtcgaaattaactgaagagtagcttgtccttctggagtggatttagcatcttccagttcggttgcaaatgctgcttcagcatctgacacacggtgattaccagcttggtatttaacttcctcttctggattaatatccagaacatcaataccagattctttaaccaacttcttaatagcatcaggattccctttaactaaatcgatagcataagagagttgcccttcatctaataatccgttgttttctaacatcaggagatacttacgatacggctgaatctcctgcattttacgggtatagttagctcccatttgcatcaagctaatgacctcttcaggactctgaggagtaatcattttgccgttagctttaaacggagccattatccgttcataaccagccttatagtcgaagtcagttttctggtctgatacctgcttgtcttctactacttttgcttggccttgctcagtagtagaaggtgcattatcagtagcaggcttactgttgctgtcaaccttatttgggtcaactgtagcactatcattaccagttgtgaatgcatctgaattgctttctgattcagaagtattttctacttcagttggttcagtagttacttctggttcatcagtttgttcaacttcaacaattgggtctggttgtgcaggagtattattttctaccggttccgggttgttctgaatgcttgatggaccaggcatgttcagaatctcttcatccgacattttaaaaatgtcggaagctgtttttgcagcttccgtagtcatgggggtatcacgagcaacatccaatgcattctcaatatctgattggacacctaccagtgtttctgctttctgaagagtaatttccagataacgttttaaacaaccagcagcttgagccatagcaagagcatcagcacgttgacggtcttcaagcaatgggtcacaggattcttgtacataacgagcacagtctaatctaattcctgggttaagagctgggtcacgggttgggtcaaactgactggaaccaagtgaataagcagggttggcttcagcagctatatcccgttcagatacagattgaatacctgtatcctccccattagtcaatgcattatacccaattgcagcagataagttagggggaagttctccttccttacgtggcttggttaatgctttagtaatttctaattgctgattaccttgtgattgagctttcatcttctcaaggtcacgagcatgtttagtgccagattcttgttccagataatccagattcttattgtctcgttctgccatagctttttgagcttgtgcatcattaagacgaattttagaacgtaactcttcattctcaagctgtgctttctcaacagccaattgtttgagttgttcctgtactgggtctggttgaggttgccatgtacgtaaatcatgagccagtttaggcatacgtttcaagtcagcaatctctgcaagaatattcaaagtgatttgctggtctacgtttggaccaatagtctgaagcataaagcctaagtcttgggacttttggttgtctacttcagcagtagaaatatctacttcaaggtcaaagttacctttcaggtcttcacgtttaatagtgacaaattcttcattggtaatacgtactacttcatgctctgccaagaacacagcattcatagcaataatcttattaccaatttcagacatgcctttagctaaacgacgaaggatagccatctcacgtttagaagcagcatctaatacaccacgaataccagcagctacatcaccataagactcaccagttaccccaccagcaaatgctttaacaccagtaagagattctgcttcctggttctgaagagtagccatagtcagtgctgattgtggcaattcagggaacttatgctcaataatcatttgagcagggttttgtgtaggattgtattcataatcctcaccttccctgtaacgacgactattcagggcatcaagcatacctttaggcataccacgttgaccattggcactacgtccaagtaagtcaatcatcccacgcattacagcaccaagtactgcttggttatcacctaataactctgcatctggttcgccatacatatcccgtttaacaggcatatacggaattaatacaaatgggagtttgccgtcaggataaggattcttctctaaacgaataagggtagaaccaatccaagtagcaacgataggctctaatacaccattcccttcaatatcccagaatccccaatattcataagcaactacacgcttacgcatagggtcactaatctgaaattcttgaggagtagtggttgcatggtctggttcattaacgggagcagagctttgccaatcaatcttatttagattgtgataacggtctttctctttaagcaggtctgccttacaagtttcaaaagagacaatggcaaacattgccttattaatatcaccctgacatgaagggtcgataataatgttctctgggtttagcatttccaccgtaggatggtttgctaaaggaacttcaacttcagttgtagttgtcccagtttgtactgcatacgttgcttgtcccgtttcatcaaagaaacgtactgattccttaatagcttcatctacattctcttcataaccgcgagggttatctgtacgaagttgtagagcctgttgtaaagcatcagcttgttcttgtgtttgaatagggaacaaactaaatacaggaacttcttgcttctctttacgaatttccctgttccaaccaacacgaacaataccagtaccatcatcaacaactgaacgaacatagttatcaatgaaacttacacgatttagtttggtacggaattggtagttaagaaccagttcattctggcgtgcaccttgtacatcttcccaagttacaggagtaactttgaataacttattagaaccaaggaaaggttcagttaaagcagaataacgccattcagcttgacgacgtacaagtttaggctgtacctgtgaacgtcctttgactttaggtggcttggctttgccttcaatacgcataaggtcattccattctttgaccttaatcatcatggcagtatgagatggctttgctgcatccaagtctgctttaagtgcttgcaaggaaggttcattcttccagctagttaacttagtagcttggcttgggtctggcaatggaaccatagaatcagtgttttgttccatagtaattcggtcagaacgaatctggttccccagttcaatcagttggttatcacggagtctaacagttgccctgagttcttcaaccaaacgtctgccttcttcaagacttgagtcgagtctggctgcatggcttgcaagattgaggcattgagtggttccggttgaggcttgacgtttataactctcggctcgtttttctgactggagcaaccgactattgtactggttagtaatagaatcaataacgacttcataagactctttggctttatcaagtcgaagggtaagttgcccgacttcataactgtgttcccgattcttttggtcataagccagttttactctatcaagttcttttgagtactccttcttatcttcatcccatagtgcttgaactttcttttcaccatgttgtgaaccaagaagaaaaaggtagctcccagagctacccctctccagagggacattaccaatacgattagcaatccatcctgtagtgtactcaggcatattaagagataaatagtagtttaactgtttaccatctagagacttcaaaatgagcttacaggcttctactttgcctcgtttattctgaaggcttttatatgcacttagagttccagaaccgactttaccatcaacttgtattttagggtagtctttgccatttctggagaaagcattaagagattcttgtaaccaacgagatggtcttgcaggtccagtattaacaccagcatctactagtttttctgttaccgctggtgatacatctgcaaacttaacaaagccaggcttcaagatgtaatcgttgtaataaatacttgatgccatttcctgagttaagttcttcattgaaccatcccagttatacatcgactctagttcttgcttatgcttttgagcaacctgaatagttacaccatgattagtttcacctcctgggtctttggggtcattaacgtatccaccctcaacagcaaatacagcagcaatgattgctgcaataacccctccaacaccgccaaccttcttcttacttattgccacaccaatcctccatgcaaaaatctcccgtctggcagcagccagtataccaataatgatacctgatccagcccatacccatttaccaaacaatccagcaccaacaactttgtgtttgatggtaatgaactcttcaatagtagggacagactcagccagagacttttctacattctccagtcgagtgtccatcttattaatagacagttgaaggttacgtacagcatcatctaaatcttgccgagatttagcatcacgggcattattttcgaagagtgtcttcatacgttcctccattcgagctaggagcacctctacggattcatgactcatgctaaatcctgcctctagtgccaatccccacgccttatcaacatcagcccagattttcttagcatcttcaggtaacagtacgaatcctatgaagtagtgaactacattcaatggataccctagtctattcacggcagcatcaaatgtcagtggaaccaggtcaagtcttccatcaataatccaatcatagtcttcaatctgaacaaagtcatagttagggaatacccactctgactcagggaagtttaatcgacctgttagttcagatgcaggggacataatctgtggtgtaaagaacagaagggttgcctgtgcatcagggaacttaccttttacatagtcacgtatgtagttagtggattgacccagtttggtgcatagccaatctacataaggccactgatgttcttctactggagcaaagatgtctttaatccatggagtaggtacatcattacctgtctcttctttgtataaagccatagtcttagggtcataaatacaaggggcattcttaccctcacctgtattgtatgaaccatcccaccaccaaggctcaccaatctggaagtacagctccattcccaagttctggcattctttcaaaatctgacattgggctttacttacaaaatccagagcatctttgttagtaggtaatggataaacaggaaccagtctaagaacagacttagcaaggtctaaacaaacctttctggaagtctcaacattgaaatgaatctgtcctattcctggttcgaaggtaaagtcatccggcatgtactgtgccgtcaatgcccccatatgaacatcagtcatctcattaataagctgtaattgaatctccctaatgttagatgccccatctgcacgataaggtcttactcgccaaaccatatggtcagtcaggtaaccatactcggctgtaatttcttcagccgtccaagtgattgtaggtgctacaacaatctctgttttaacaacagtagagttctcagcattgataatctcaacctgccattggacagcatcacctacttcccatgacatagtacagttacctacagagtctttcttagcaaagccctgtccaactgttcctgctgtttccggtacagcaacatactcagtagtaagacccaatgcacctgattcaatatcatgttcttgagcacgaacagatacgcttgaagcagtaaagccataagcagctacctgttcttctcgtgtgaacacaagattgttatcagatacaaactggtcactaatagttgcactggacgttacatgcatatttcgaatacgaacatcacgtccaccaacagaaggtttatcccacataatcttaatattagagttacctgggtcaccggtgaacactgcatacaatccagcaacaggattcattggattagatggctgctctgtttgaccagtaacttgagcaccaatagatactaatccgttacttgggtcatactcagataccatgaagatgacatgagtagcaccaccttcttccaggccgtagaactcgttctgttctgcaacagtccatgttagagattcactagaccattctttagagaagataacagtcttagaatcattaacactggtattcactacccagaagtgttgccatgaaggacgtcctacccaagtgaagataatgtcaccattaagctgtttagcagctttcagttgagtaggagtctgcatataggaaccattctggactacccctacaaaggaagaagatgcacctactgcaccagaatcagcagcatactcagaaacagagaaactcatattaagagtgtccccgttataagcattttgctggtcattcagggtaaacacatactcgggactggtgaggataccagaagagatttctgcccctgtggtgacatgacggttagcatacttccagtgggtaatcccagcacggttatcccatgtcatcttaatatcacgagtagctaacttacgaccttgcagatttgctggtgggcgcaagtaagaccaatcaggtggattagtagcacggttaacattaagagccagtgcttcacctagctcaatggctgtggcatggaatgcttctaccgtgtagtaaatccaactggattccacattacggtacgcagtgtacaggttagaaccaggaacaaaggaacccagtttaaagcctatattagctgtagccatctgaatctgtttatcacgtacagtaacagtagcttcagagttaaggtcattaggtggagcaacaccaaaccaaacagtagtagccccctggaaccaaatctccagattagggttgccccagttggttctcatccatgcaagcattgctttgttagacgattcaaaagcagtcattaaagcaggccatgtagaagaattaacatccttcatatacatggtttcccacggattagcttcaatgaagtaatcaggtttaacacccaaacctttaaccatatcgttaatagccagtagtgcatcacctggggaattactggaagtattccaccatttgtgagtacctaccgtcatacctgcactatcagcagctacgttaataggcattacctgaataggacgtaatccagctttctctgcaaaagtcagacgtaacgtagaagcagataccttgtctttacgaccaattgcaccattagctgtggtagcagttgggtcagacatatcagtaaagtgtccaccaccaaactggttaatacctaccagaatggtcttcttaacaagccctgcattatccaaaggaatgttatctgaccaaggtgctgaaggaatttctctttcctgatacagacaaactactcgccacttcatgaactcccacggattaggagaaccaaccgcttccatcattacaggaatccagtcttctacagtgaagtcagcatatacataaccatttgcttcttgagtacctgatactacaaatgagtgaagtatctggttcaaattagaagggttatagatttcaatacgatattgagctaatgcagggtctaatccgtaagacttccaacggaactcaatatctccccatgtattacgacgggctgccaggaaagaaggtaatcctgtacgaataggtacattaggttcatcagtgttagtgatgccccatgcatagctcagttcctgaatgaagataggaatctgtccatacaaactacgaagatactcaaataccttcttagtagcttgcttggttctggttaatgatggtgctgggtcacggtcacctggatatgccaaagcagtggcatcttggtcaccttgcccccaaataatagctttaggcttgagcttacctacttgctctacacaatatagtaatgcaggaccgggtttatctgcttctaaatcccaccaccaaagaccacctgcatcggatgattgggtagggtcaaatacttcagaatcaggattaactgcacatgcacggtctacagcagtagaaccagttgtcccattaatagggcgtacacctgcatagttaatgccccaagtttcagtcatgtacttctggaatacatcatagccacggtcagggtatgcaccagacatgaagtgaatagcaacctgagattcaccagcaaatagaattgggtaatctaatacagtctgttctgtgattaactcacccgtttctttatcctgacgctcaggagtaaggttatagccatcatcaaagcctgaagtcatgcccatacccatcactacttgtggatatttacgttgacccagttgcttacgaccggaaccagatacagtaaggttagtaaaccatttaacagagtctacttgtttaataggaccatctgttacttcgaactcattctctgctgctggagcattaccattaacatccaagtatctccagatgcattggagtttatccccagcagctaaagcagcattagtatgaatacccccaatttccatctggaaagtagcaccatcgtcattgttatacatggcggcaatgtaagcatctttccctagaccatgatgtgcttcagtacagtcgaaagaaatcattgtgatattacgagggttaatagttaccccattaaatgccacacctgtacgtaaatcagcaaagtccagaatgaagatatagtccttagtgccatagacttctgtcatttcagattcaggaatatcttcatcagtagctacaaagatgtcagcctgatacgttctcttggttccatactttgtatccaaacactcccatcgacgggttttattattgaatccatatggagccagacgatacgtatatgctttttcaggagtctgaatagtaactgtgaatttatctggttcatcagggttatgacgaaaagccagaatcagacctaagtaattagggtctgtttcataacgatacagatgatggtcaaaggtatcctccgtcatccaacggacacctaagaagtctttgttagtacgccactgacaaggaactttaaaagacttagaaccatacggaatgatggtggctaccattaaggcattgtaatcaactacccaatactcagggtcgaaacgatttagtttagtgttataagtccgattacgacgagtgttgaccaacgtcagatgttccctgtctttcttaaattgagggaggtcttctctccaagaagagtgctggtcatccgggtcataattaggagaagctaggcaattcttgcctttgaggtaatcttcaatggacataactgctccagtaataaggccggtttcccggccttccgtggtgttaaattcactgaatttaacctgaacacgaccgacatctacgattagagaaccataaggtactttatagattccgtgcataccacgagagtacatgatacccataccttccaatggggcatcaagtaaagaaccatctggtttagcaatcttcaatacgaaggaactatcagtatgactcttcagttgtgccgtaagctgagtaccatcggtaggtaacagtaagctaaatgtaacagtagaatctttgataagagtactgtgatataccgttaactcaccagatactgtatcgaatgcacaataagtacccgaatcccaatcagatacagcagcccaaccaccacctgaatatttcagttgtgcttctgcttcaccaaccataaccagtacagcagcccctgccgtaacactggagaatcgtggggtcagtggagccttgcctgtaggggtaatgaaagtcatcactggttctacagtctgaaggctaggtggatatccaagagtgatgccaccatatgcatctacattcagagtcactgcactggaaggcatgatacgggtattcacaccggagattgctttagcagttaggtctgctttaaaacggagtggggcagtaacagatacagtagctgtattgtcagtagtagatgcacccataatcaggccatccaatgccatttgttgactaggtgctaccaacaaaccactaactttaccggctttataattaagaaccaggttagctactgcaccagcagtaggggcattcatgttgatggaaccagtagctaacgaccatactccaccagtagaggtcagtttacctgctacagcataaccacctttgtcattatccatagtaataacctgacggagcattgcacctactgtattagctgcataagtctgtgcctgattaaagccaatcagacctgcaccttcagcagtagcatacttttcatggtcagcaatgattgtgtctagctgctctgcaatggtaactaagtcacctaatctggcatgtacagctaatagttcagtcatgtgattatccaaatcaagcagtgctgccatattggtattcacattcttaatcgcattgatattagtacttactgtattaacagcatcaatggaaccagcaacggtattcacgttggtaatgctattagcaacagtaattactttatcaatttgagcagaaacaataattactttagcaatatcagttgctactgtattaactgcgtcaatgttagaagctacagtattgattggagtcaggttgtcatagaccctcagcaatgcctgaagattgtcatatagaccagtcagtttagataattgattgtagagttcctgtaacttatccagattattatgaataagttgtagttcatctagcttagtgtagatagcagatagctcagttaacttgttatggatagcaagtagctgagtcatattatcactgacatttttaataaaggtcattcgtaatgctacgaacttaacaacgtagtaagcattaccaatcatcttatcaacgattgggtcattaagtgtttcgcagcaataacagatgctgtcataaaaggacagatactctgctgcctttgctgaactctctggggtattcagagaagtgtaataacggtaagcaatgtaggcatccaaagctgggtcaagggtatcaggaatgtctatctcattatagccatcctctgctgtagacagtttaggatgtttagcctgatacattacgttcaatacttcccatgcttttggagcattgttctgtagaacgtttggccttggggtgaacaaactgtgaggattatttcggtcattcaacggacgtctacgacccttatcgtcatacacttccagaatacgaataacatcctcagcaaacttctcacctgctaagtccataatgaagggacacttcacttcatttgggtcataagactgaacagcatacttagctagtaatgggtagttggttctaccttcttgcatctcaacaaccacgttgttgttacgcatgttgaagcgaccatgcagacgagtcagtgcctcattagcagctacgataatgaaaggcttactatcatcttcaatgtcacctttgtcatctgtaacgatacctgcttgtggtttccacgggttcaggtagccaagcattgaaatggtatcaatacagtcatccttacctttaagaccattgatagtggctaaacgaatttgccccataaagagtgtcatgattgggctatctttcatttcagcaggaaaatacatcttaccagctttgaaccagggaaccacgaggttaaaccttgatagcttactggttacaggatgaatacccggttggcctccacgactggatgcaaagttaaagaacacattacggttaagcatttccttctgaagaagagaaataaaaccaccttgctgtccagtagtttctacaccaacttgttgtggttggtattcctgaaccagacggaataagtcatcaaagttcttatccat

SEQ ID NO: 23284 - DNA, 1574 bp, Homo sapiens
  SIMILAR (3)..(689): 291254mologous to Streptomyces coelicolor A3(2) putative ATP/GTP binding protein,accession number AL031515,Smith-Waterman Score=228.
caccagaagacctgtcaggtctgcctcgttttaaagaaaatggtcgtgctgaatttgctccatttgatgagctattcccattggaaggggatgctgtacctgaaggatttaatggctggcttctctttctcgatgagtttaactccgctcgtaaagagattcaggctgctgcttataaattggtactcgaccgtatgactggtcagaagaagctacatccttatgtagctatcgtatgtgctggtaacaaagcaactgaccgtgccattactaataacctgtctacagctatgcaatcacgtcttattcatctggaaatggagactgattttgatgtcttcatggaagatgtagccatccctaataagtgggatgagcgtgtaattgcattcctgaatgctaacccaaataaactgaatgattttgaaccagaccatcaagagaagactttctgttgttctcgtacatgggagttcgttaacaagattgtttccattctcccaccaggaccaattaatagtgaaatgactctactgttagcaggcactatcacttctggtgtagcaacatcattcgtccagtttactcaggtctatagcaacatggtgtctttgaatgagattttggataatcctaagaaagctcgtatgcctgaagacaataacctgttgtgggctgtagtcacttcactgattaacaatactgacgaagataatcattcgaaaatctttgattacgttgaacgtatgccatttacgttcaaggttttgtactaccgttccgtagagctatctaaagaacgccaactatggctatctcctaataaaacaatgattcaggcagatctggcagaagtacaacgtatgctggatgaatggtctgaagaccaaatgttcattgatggcaatgcagaagcaataaccgatgacatggcctctgatatggctgtgtttgtattacaagcaatggctgaaaagcgtgctcaagatgctatggccttcggtatttctgaagacccagcattcttccaaatactcagtgctaacctctattctaatcagaaactggcaatggtacgtgagacattgtgcaatagctgggatgctcatattgaggggaataaaacagatattcctatccatgtaaccattgataaagatggtttccttatcttccgtgactatggttctggtattcctaaagataagattcaagaggtctatggggtatatggtgcatctaccaagaaagctaatactgcttccactggtggctttggcttaggatgtaaatcccctatggcctatacagacagttttactgtcacatctatgtgtgacggaaccaagactgtctatcacattgctaaatcttctgttgagactaacggtaaaccagggattattcctattgttagcgtacctactgaagaatccgggcttgaagttaaaattcagcttcagtcagaagatattttagaaattgattcatatattcgagccattgtattacatgtaagcaatatgctcatctgtgtaagaaatggggaaatatggaaattgaccgtcaactag

SEQ ID NO: 23285 - DNA, 9159 bp, Homo sapiens
  SIMILAR (4701)..(4009): 271254mologous to Neisseria meningitidis MC58 transcriptional accessory protein Tex, putative,accession number AE002366,Smith- Waterman Score=117.
ttaaccggaaacgttttcttcatcagtatggcgtttggttgtatatgtcatgaatcggtattctttcatcaattcatggcacacgtccaaactacacgtaccatccacatcaatgacaatcatatcgaagccagcaatagcattctcttcagcacgatgccctgcttgctgggtcagtacatgtaactggtcaaatggaactttctctgcaatatagtcataagcaaagttctcaccataagaaacaatcatttcgttagtatcagtctctttcagtgtttcaccacggaagaactcaataccttcgttgtatgtcttcttaatgatgatatgctgcttatagccccatgcagtagctaaagtcatcatctcattacgtgcagcattcccactcttatagaatggtaaagcttcaagcaaatctgcatgagtaacttcagtaccaacagatgcaatatacttggctaatttaacgtaggctttttcacgattgaggatagtctggaatgcaacaccagactcttccaccagaagaattgcttgcttcagatgttccatctctaccatgatactgttatcaacaaatgcaaatgcacctgccaatttcagtgccttaaaatagcgatgttccagttctgctttacgaatctcttcgtggtcagctaaagctgctgcttgtttttcacactgaatcttgtagtcgattagtgcaataccaacatcatcttcaactgtcattttccaaccaaacttggatgcatctgcaaggctatgaaagtggttagcccacttattcacaacagcattgttatcctgcttaatcagattacgatagatttcttcagcactctggctcagatatgcacgtttatctgcctgacctacagcaaacagacaacgacgagaatagccagtatcaaggaagtcatagaagagttcctcagtctggctcccattgagaagtttgctcggtgtaccaaacagaagaaggttagctggagttttaccatcaacttcctcactacgaatactttcagcagtattcttagtaagtttctgtttaatcttgccttggtcgtacaactcaaggaacacagttaatacatcagcattagcgagaaggtttgaaccaatctcatcaatctgtaagttaatagcaccacatccagctaataagagtttatgacgtaactgtttcacagcaggaggtgtacctgagtcaaacgtaaatggataagcaccagtacgtctgtattcagcttccaccttgtcaaactcttccttctggtcagtagcattacgagcagaacgttcgttagcaattttccacagacggtcttctgctaaagcaggcatggtgtcttccataaaccgcttcttaaagccagccataaaaccgtcttcaacaatgttgaccgaatggcctttaccgaagcctgaagtagcaagagccactgcatagatgtttactggaatttcaccacggtctttagtgatgatagttgcacccatacatgaagccattttcgcaaggaaataggccacttcaggaacatgaagaatagtgcctttgcctttctctgccatgaacttccgagcctcaaagagagtagggaagtttttggtagaacgagcaccaggttgctttgccttctctgggtcagcaaagtatttaaacactgggtcagaacgccataactcttcatcagtacattctggaatctcgctttcaggagcatcccagtacttatcaatgagagccagcttggctttaatccattcttcagtcgcttcataagacatcaatggaatgtctttatgcagcacacgatgctttggatagttttcttgagatgtagctaatgctttcatccagtcagtgaagatgtagttaatacgaatcacatcttcggtaatcttgtcgtcatgtaaccaacgatacattgacccctgaagtctatgttcttcatcacgtccaccctttacccatgtgtaagtggaggtggattttacatcctgaagaagaccttcagtaacaatgtcgaacttgcccccaatagtccaaccagcaatctttttagttgctcgttgttctatccatacaggaattaagtttggatttgatgcaatctgctcaggggtagggttgatgacaacattctgaacgacacgctcaggataccctaacttgcgtaatgcattgtggtgtccgttatgccatgccttctcaatagaatcatgtaagcctgtacccatagaagtggacaccaaatccatgatgtccatactttctacagaaaggtctacacgatgcttcatgacaatgtgcttaattggcttaagcagggtagtcacagaaagatactttttatccttcacataatcatactcgtcatgcaaaagccagacagcacctaaatcaataacttcagtgtttgtagtggaaccagtagatacagtaccagtctgtacctgggtcattgtagtcttacgaataatgattaagcctacttcacttggttcacgaaattctttctcgtaaacatctgagaagttagtccaactaacctgttcttcttcagtattggtactttcctcatcaggtctgccatcagagaatacactcttaatatgagtaactgtcttcagggtagctgacttaggagtatggttctgagatacctgagtccattcagaagtagaaggtaagtcatcagcagatggtacagatacagcaggatgaaccactgggtctgcaacactagtaggctgtatgtagtaatagttcacatacagatacattgcatcctgactgtaattctctggataaaaggataactcactaccatcagtagcagtgagtacaatcctgtcatcatccatgatgtctatttcaaactcttcagtaatacggtctggataattctcatagaggaatttatcagcccattcctcaaaatcaccaaatccaatcctactgctctgaacctgtacctcataacctgctttttgaggaacttgccatttaactacttcagggtctatctgagacagtattgacaagttcccataagcaataccaattgaagggtcatagttagttgcagcccaaccagggaatcccaatgcgttgttattcttcaatgcagtaagaatgctatccagactggtgttagtgaagccattaggaggagacagaccctcatcaatggttttctgagtgacccatgcatcagtaaacagtttggcagctttaacttcagcatcacgtttataagacgtaatctgttggtcatagagttctttctgtttacctacagaaccagctacacgagtaccatcagtacgagtatcagaagtctgagcacgttgtgcttccttctgctctttcgtcatattgatttgttcagtagttaacttagtctgttcagcaacctgagtggtctggttcttcaacatcagtaattgttgaggaagcatagaggatagattgtattgagcagtacagtaagttactgactcattagacagcttcagcttagtaagggcatattcagctttagtagccagagcctgaatcttagctgtaacaaagttagctttgataataccaagattagcacgagcagtaattgcagctacctgagcagtaacagcattccaataagcctggtgagtagttagttgttctgtggttagcttctctatctctgcatagatagggcgagtaatgactccaggaatatcatactcactgccagacatgtcgatgtcaggaagcgtaagatcatcaccaggcaggtctttcttcttagggtcaaggttctgaatacgtactcgaaccagctttaattgttctaagcgttgctggtgacgtaaagaagttgccgtagttactgtacctgcatcaatagcaccagccaatgcagcactacgaagagtatttgctggaacaactgctttacccagtaaagatgcaccccttaatacaggaccagcacctaatagagaacctaccccttctgctaacccatcagaaataatggagtcagtttgggcagcgttctcaattgaacctacaaaatcacgtccaaatttagataaggaagctactatgtcattagtgccttctttcttatctgtttgatactgacgttcactctctacttcactcattaagttacgagcagcaaagagcttacgtttatcttgtaatgcttggctttgggtagcatggacagcatcattaaacttactcaattgttgagcaacaacagcacctgcatcatcgttgagtaagcctgccccaagagcaccaatgcccccaagggtattaacaaaaccaagaccaacaccagtagcaatatcccccagttcttccccaggagttcttgtagtaactgaatcattgaatacctggttcccagtacgggcagcttgcatttgataagcagcatcaggagaaacaagaggagtagtgacaccttgttcagctttcttctgggcggttgcagtagagacgtcaacttgctttgcattggttacgctgtccaatcgacgtccggcatctctgcctaaacttctccggtttgcctcgctctcttcctgtttaatattttgtaggctcttaatatccaaattctgagggtcagcagctacagcactacgagcaccatcaagaagacgtttagcagtgttaactcgctcctgatagcgaggtagtacacttctaaggttttcctgaccggtctgaatacgacgctgtacttcacgtaaatcagcaagtgcagtatctaacgtattctgtgctgcatagatgtttgattgaatttgtgcagtaagctgattacgagcattctgttcaatagcagtaccagtagttgcaagttttgcatttgcttctacggctgctttatccagttggtaatcaccacccaaatcaataacatcagtatcaaaggcatttcgaataccactaaaccatccctctggtttaccggtgatactacgttgaatgattgctcctgccatagcgggagaaatagcattctgttttgctacctcattgatttgtcgaaccagtgcaccttggttaatgcctttcagttcattgctatcaataatacgtttagccacctgaccagtcgtagaagggtcaacagtagcagcttggtattctggcagcagagtattaccaatattctgcatattacgagtaccaacagtattaccagcaacagaagtgaatgcttgttcctgtaatggattaatagaattacctgtttctgcttgagcaatgtaatccttcatttcatcccatgacaagttcttataagcaccaggagtatcatccggtaaagcagcccatgtactcttcagattgccattcttacgggcattaaaaatagcttcacccagtttgtcttggttctccggagacataggaatgttctgccaatcttcaccaaatacctttggagcaaagtctttaagagtatcttggttaatctggtatgcaccaacaggagaagcacctagtgtcttcttcatagtgtcttgatgctgaaccacctcacctaagttcatctgagtaataggtacatcagttggtgtgaacttataggtagtgtcatatgcagaaccattccgagtaccctgagtaccaggaggagatagggatgcagaaccagttcccggagtatatgcacctggatatgctctatctaactgagatagtgcacgacttactgctcctggtgacatttggtcgaacgtaccctctgcaagcatacgagcatcgtcagcactgtatgcaccacgacgaatattattcagtaactgcatagcagcctgagtatccgcatcgttacgtatatcaacacctaagttgaataagctgcgacgttgaccaataccagcagtaccctgtccttgaaggttgttcatgtagtccataacaacaccagcaggaagggtttttaatacatccccatactgagcctgtgctgcctgaacctttcttgggtcaccagattgataagcagatcgtttcttcttcagaatctggttctgtttttctacccattcttcattaagaagacgggtaaaatctttgattactttactgtcagcaattgtttttaacgcattgttatagtcttgggttaatgcctcttctacctccaatactgtcctcatattgataggcataccagttaactgcatttgaataatatcttcacatgcaggtttaaagatgtttgtataaacatctaactgttggtcattaaccagagtatcccaatgcttttcatagacataccaggtacataatccatccactaagttgtattccaacaactctgctaatgggattctggtaatgtcattgatttcttcttgagcatagttaccagcatattcctgagcctggtctttaagacttagcttattaccggcacaagagttagtagccagataggtaattaacttagtgcaatcccagtttcttagcatgatactcatgccatgcaacaacccttccgtatccagaaggtctgtcataaataactggtaaatgagtgcgtatacgtcaaaggcaatattgtgatacatctgcctgttcagatacttaataaaaaagtccctgagcatagaacgaacaagcatgttgtgaacttgtctaccataaggagcttcagtagccccctcaattggttcataatccacagggaatgcaatcccttcgtgcttgttccagcagaatgtaatagtgcctataccacagtcataatgcttcagactgaaggtttctatatctactgctaatggaacatccatctccagtaacttatctaaccacttagatatagcttctggagttaatgggtaatcagcataatggataatcttagttcctggctcaacataagaaccagagacataatcaatcagagcctgcatggataaagcaatcttagtctttatcttatctgggtcataaaagatttgtctgtaattgggaacgtaaataactttctggttcccataagcacaatccattacatagccaatattggcatcagctttaccttgtttggttagctgtttgtaatattcagaatcaccacagatgatatactgagtttgtgctgcttcgaatgctggcactaattcttgggtaataaactcctgcatctctttagcaggagttttctttttccctggggctgtatgaagttcaagaatcattactgaatctttatctacatcccagggttccatgtatgctttgacaatatcatccttacgtaacgttgtagtaaggatagcaatagggtagataccctcattgttgaatgtaatgtaacgcatacagacctcaaaagataagatgggttcccgcatagtattcgataatcggcaagattttctcatatgacggagagccatagcatcattatccagagtaaatgctgcctttctggttctctgtaaggatttcagatgaccttgtttatccatagcaatgaggcattctggcaatgcatcacgaacgtcttgataagtcttacagccctgaaccagacgaaagaccatctgattcaccatatggacttctagcagaagtttacctgcttgttccagatactcccgcatatcatccagtaggtgattagcaccaaatttctctgccaaagagccatagaacacaacacgatgacgagcacgagatactgctacgtaaagcagacgtgctactacatcaggctgacggcaagtagataaatcagtagcatcaataaagatggtgtcgtaggtagaaccttgagacttatgcacagtagaagcatgtaatgctcgaagttcagggaatgtttctttcaaatagaagtgacgttcccagttcttttggtgtgcatagtacttttgcaaacgaatgaaataatccatatctaccggaatagggataccttcaaagacaccaccataaccagtatccagggtgcaatcacgtacttctaattcgatgccagaggaatcaatcagaatcttacgagtagcagaatcctggtcaacaatctggcattcctgttcaatactaaggcggtcaccagcaccaatctgaatagcagagttacttactaactcttcaccaatacagaactctccgtggaatccattcatggctcgaatgaaggtgttatagttaacaacctgttggttggtataggcaacaatacgagtgtcagtcttagtcatgaaatgaccttcgacttcttttctcatttcatcaccatctttaatccagtcgataatacctggaactgctttaataggcaggaatccgtgcttaccttcaatggttccacgaagctgttcatgcagtgcatggagttcagggacatcagtacgcatctgttgggtcagcataaactctttaatgctactgtcattgtagacaggggaagaagttcctttcattactttcttattctcattgaaaacaggctcaccgtcttcaaattttgaataattagaacggttcacttcagtgagtgctccgggtacgttcatacccaagaaagtaccgatgccagttgctgtaacaatctggtctgccagtgcatccagaatagctaagcgattgctgttaggtgcataaacttctttatcagaggacttcattaattctgacaattcagtcaaagctgcaatggcattatgaagtgtatcgtatgcttcttcagaatttggagccaattcttccagcatctcaactacttcttccagatgacaaccaatttgggtactaatgtttttactcgttgggctgggtactgccttcagaaaccagttctgagtttgtaccaacgtatctggttccagagtcttagcaaattccatcagttgatctaacaaatcgttctgtgcacaacgcattgcacggaagtcttcgttagaggaattggttggcagatgttcctgagtatccagtggaataccagtaggcagagagatgaaacgttcatcttcagtgccttcattagctacatagccaacgttaatccagaattgagctttcgggcgagaaccattgttggattcagttttagtagaagcctgaccaaaagttttagcaaaagtagtgatagccat

SEQ ID NO: 23286 - DNA, 17727 bp, Homo sapiens
  SIMILAR (17053)..(17724): 961254mologous to Bacteriophage N4 single-stranded DNA- binding protein,accession number U29728,Smith-Waterman Score=1109.
atggctagtattgattctattgccgtatgtaatccacggcaggtacgtaaatttgttgaacactgtatccgttcaggattggttccatttatcacttcatctcctggtatgggtaaatctgcaattgttcgtcagattgcagaagattttggcctgaaactgattgaccatcgtctgtctacttcagcaccagaagacctgtcaggtctgcctcgttttaaagaaaatggtcgtgctgaatttgctccatttgatgagctattcccattggaagaggatgctgtacctgaaggatttaatggctggcttctctttctcgatgagtttaactccgctcgtaaagagattcaggctgctgcttataaattggtactcgaccgtatgactggtcagaagaagctacatccttatgtagctatcgtatgtgctggtaacaaagcaactgaccgtgccattactaataacctgtctacagctatgcaatcacgtcttattcatctggaaatggagactgattttgatgtcttcatggaagatgtagccatccctaataagtgggatgagcgtgtaattgcattcctgaatgctaacccaaataaactgaatgattttgaaccagaccatcaagagaagactttctgttgttctcgtacatgggagttcgttaacaagattgtttccattctcccaccaggaccaattaatagtgaaatgactctactgttagcaggcactatcacttctggtgtagcaacatcattcgtccagtttactcaggtctatagcaacatggtgtctttgaatgagattttggataatcctaagaaagctcgtatgcctgaagacaataacctgttgtgggctgtagtcacttcactgattaacaatactgacgaagataatcattcgaaaatctttgattacgttgaacgtatgccatttacgttcaaggttttgtactaccgttccaggaaaactgatatgtccatgacagatgctcaattaacccgtgaatatgacagatgtcaggctaaagcctttatgggcaaaactgctgcattctttggttcactgttatgttctctgaagttccgttgggtaaaagatggctgtgatacagcacaaaccgatggtgagcatctcgaatggaatcctgattggtttgaaagtctattacctgaatctcgtgtaacagtacttatgcatgaactatggcatgttggcttactgcattctgttcgtatgggttctcgtgacccagaagtatggaattatgcctgcgatatttatatcaacaatcagcttattcaggatggctacagctttataggaatcgaaaattgctggaaagaccctaagtatgctggttgggctgaagaacaaatctatgatgacctcatgagcaaacagatacgtcctcctaaagcatcaggtgcttttgggactggctcaggtggtgacatgaaaccttccacttcgaaggctagtcaggtgaatattgtcaataatgtagtaagagccatgcaccaacagaaactatctggtggctctttgcctggggtattacctggaaaaatggaagaagttattactcaattcctgaaaccagtagtaccgtggcaggttttacttgaacgcttcttcaatgacctgcaagaaacttactactcatggcaacggcctaatcgtagataccctgatatgtacctaccatctcctatggatgatgacggtagactggaacatctggcttatttcctcgatacatctggctccattaaacctaaagatgctttacgctttagctctgaagtggcctatgtaaaagagaaatatcagcctcagaagatgactctagttcagttcactacagagattgtagatgaacaagtcattgaagatggtgataagtttactgatgtcactatcaaaggacggggtggtactagtctggttcctggcatggttaacagtaaactcagttcaggtgagactacatttggactgggagaagctggttatgacatccgtattaaacaggatgttaccttctaccgatttcttggtttgattccctgcatcaagattaaagatgaaggaaagaccaagtggaagtttggcactttcacattagcttctgcaatggaacgtttcaatgtacctgctggcctagtaggtattgtccatgacaaatctacatgggcaaggcgtacattatctgtattcaataccgttattgaaccaggatggtcaggctatctgactttagaactggtttatcacggtcgtaaaaaacttcatatccctgctggttcaggtattgctcaggttaatggtcagaaagttactgttgttgctcgtaacgtagcttacgttactgaaaacagtgaaggccgtggtgtaattacttttactaacggtgattccattgatacccaggtaggttatgactctatccgtcgtaacgtagctaaagcacttgatggtgctaaagacatcgcagaaaaacgaacaccaaagctgtatcaaaagacttcagaagacggtttagccttgaaccagaaagctattaaggctgttagtgccctggttcaaggtaaacaggatgctgttgctttacgtcttgttgttgagcaaatcttagttgctctgacactggctcaagtagctaaacaagaaggtaaacaagaaacctgtaaaacagcattaggtgctttgtactggttgtataaagaccttgctgacaactttgaaatgtctatggataagtggcagggcatttcttgtgtacttgctcttagagaagggcaggaattactgtctactctaccaaaagcagaatttaaactagcctacactggagcacataagattgttcttggttccataaggacatctttaaccacctcaagctattcaaggctttctatgattaatgcaaaaatcctcgctgatagtattactctttctggtgaccgcctggtaacaatggaactggtttatccgcgtttcattcattcagaatttatgactcaccgagcacttaatcgtaatgcttccagtagtcgtgctattcctacccaacgccttattgagcaagttcgcaatgaaccagtaatgccagtacattggggtaagaaccagaaaggaatgcaggcaagtgaagaactcactcctatggagattaaggatgctgagttcatttgggaaaatgctgcctctgctgctgctgtatatgctgaacaacttcgtcgcggacaagtacataagcagattgttaatcgtattctggaaccattcacgcatatccgtgtagtagtgacagctactcaatggaataacttctttggtttacgcattcatcccgatgctcaaccagagatttgtgaattggctactaagatgaaggaacagtatgaccaatcaaaaccccgtaccctgttggctggggaatggcatttgccgtacattactaatagtgattacctcgatgcttacgattattgcaaacatcaacgaattactcgtgatgaaccaagtagtgatgagattaattgcctgttagtaaaaatctctgctgctcgttgtgcccgtgcttcctataacaactttaaaggtactccttctactatcgaagaagacttgcgtttgttctctaaattggttgaaagtaagcctgttcacgcaagtcctactgaacatcaagcaactcctcagcatgtaatgagtaaaggcttaaatgagcctactgacccatctacatgggaaaatggcattagccacatggacagaaatttacgtttatactcaggaggccatatggctaaaccacgtaaattccgtattaaggataagcctgtaatgggtagtgctgctggtcagtcacatgagaaaggagacattgtttatgaatgccttcagtatgattacggcgttgctcatgatgacactcgtgctactgagctatctaaagaacgccaactatggctatctcctaataaaacaatgattcaggcagatctggcagaagtacaacgtatgctggatgaatggtctgaagaccaaatgttcattgatggcaatgcagaagcaataaccgatgacatggcctctgatatggctgtgtttgtattacaagcaatggctgaaaagcctgactctactgaactgaccacatcagcaacgttaggtgctcaagatgctatggccttcggtatttctgaagacccagcattcttccaaatactcagtgctaacctctattctaatcagaaactggcaatggtacgtgagacattgtgcaatagctgggatgctcatattgaggggaataaaacagatattcctatccatgtaaccattgataaagatggtttccttatcttccgtgactatggttctggtattcctaaagataagattcaagaggtctatggggtatatggtgcatctaccaagaaagctaatactgcttccactggtggctttggcttaggatgtaaatcccctatggcctatacagacagttttactgtcacatctatgtgtgacggaaccaagactgtctatcacattgctaaatcttctgttgagactaacggtaaaccagggattattcctattgttagcgtacctactgaagaatccgggcttgaagttaaaattcagcttcagtcagaagatattttagaaattgattcatatattcgagccattgtattacatggtgagattaaatgtatttactgcaatcagtatacaggaccaaatacagtagaattactgcctgtactgggtatgtcttttgaaccaggtagctataacctagaccatagcacatggcataaatattacatgggcagtcattcaatatttatccgttatggtaatgttatgtaccctgctttggatacccctgctacacatgaagcattaaaactggttaaacagtttatgcaggttattaactgtagccgtatcgttgttcaagctgccccatcatcactagctgtagcacctagccgtgaaacactgtcatctcaaaaaatgaccgaagacggtatcgtaaatttggctgtagctttagtagataaaatggaagcagatattaaagctcgtcttccaaatgctattgaatatattgggaaggctattaaagaatatagtcctcaccgttttgaagtaaatagttatttgccttacaccaatttagtgcctgatgttattgtcagtcgttatatgtcctctactttattcagtaagcaatatgctcatctgtgtaagaaatggggaaatatggaaattgaccgtcaactagaacatcctgcactggctcatttctctggttctcaaaaagcccatctccgtaagcatttaaagagggctaaggatttacgtaattacagggaattaactaaagtatttactgatatggctattaagccaatgttcaaaacctttgctaaattggggattactaaaggtatttccctatttcattatcaatatggtgttgaactgtggcgtaataatattgttaatagtgtccgtagaatacactcattaaacttcatgacttatagttctaagaagtgccgtgtatttgttaccccacgtattaccaatattgaagatagtctggctgggtatccagagtttgataatctttctactgagacactggtaaaatataactcaatcattgtcaaagttggaaccaagaaaggtgaagcagaggctatgactaatctgctcactaaagcaggatacgaagtcattaatatggctgaatatcatgagtgggattgtatagctcgcagacgtaaagaggaacaagaggctaaattagccatttccaaattacaagctaagaaggctactaataagaaaaaggttagtcctaatcgtcttattagtatgaatatccttgaaataccaaaagagcatcgtagctattcaagtgaggtatgtggttctcactacgcttctcgttctcatgaccgaatggttgatgtagatactccccagtattacatcatgcaggaagatattaataactacacaggaaggcttggtgttctttctatgtggcaattaacccctgctaccattaaagctgtaactgttgtttgtcgtaataaaattgaacgtaataaagctattaagcgaggtgctgttcatttggatgaatggactgctccgtatattgcttcagttcttacatccaaacaattcattaagtatgtcactaaagaacgtcagaaaacgttaagtgatattggtatttactccaaacacctcagattactgagagaactggatattacatatgccccattgaaaggtctgcgttatgacccagaactggagaatgcttatctcttcttacaaagtagtagctatcctaagctacgtgcattgttagggaagggtctgattactgaagaagagtatcacttcctcagtgatgttgatgtgcattgcaagactttcaacagtcgtaacctcaccttatggcaaccagatggttctactatggtcatcccccaaggggatgcccgtgtaccacgtattgttgctgaagcaaaagaaaagaatcttaccccaggtaagattatcgaagtggatgtcactatcgaagctcagattcgtcaggagtttctggacgctgaacgtgatacaggtggctttgttaaattcttccgtattaccaagaagaagctacaagagttcttcttaggagaagaggaagaacaagtccctcatgtatcacctgtagagttaggtgctaaacccactgctttcaatgcttttattgctaatgctgggggcaaaactcttgctgtacaacatgcatcattaaaagcacctgaaccagaaatgacagttactcatgagcgtttttacggtaactatgctgtatggattacagatgtagacccacggaatcatcgtattgaggttattcatgttatccgtgaaatctcaggaagaaccagtgaatatgtcaataacctgctggctcaaccaaccccattcaaagtatttgattggctcacagagacgcaggctaaagagtttgtaagacgtctgaataacactcagggtgttatctctgtctataacaaactggaagacggtattcctgttaaggttgctgtaaaggccacagagccaaccaataaggaaaagctggaagctgcatcaactaagctgaaagctatgggtgctgtcgctactgatgcttatgagtttcatactgacttgaatgagaatgaagagactattgtagctgtagtgaatgataaggtggttcctgacgttcagaacctacaccgtcacatccgtcaatctgcaaacctgaaagactataaaggctttactaagttccttgaacgtctgtctactgtaattgataaacgtcgccactctgttgaagacctgatgaagtttatggaaaaaggtgacctgcccattgcagatgatggctccattgttatcttcaaacgtctggaaagcaaagacaatcctgaacatctcaaagacgtaatggatgatgtatttgttgattgccattctaagaagattgagcaatgcgttggtatgcgtgtaatggttaaagaaaaccttgtagaccagaaccgtcgtaaagactgttctcatggtctgcacgtagcttctctgcaatacattcgtaatttctcaggcaacgtaaccattattggtaaagttgctccagaggatgtatttgcagtaccagaatacgatgttactaagatgcgtgtatctgcttatcacatcattaccaagctacctgatgctattcgtgaccatgttaataatggcaatccaatctccaccattgagggtggtacggaaatcctgaacatggttctcagtggtaatcaccctgaaccttcccgtcaggtactagttggtggtcattatggaaccaatctgacttattcagaactcactcgtaattatctggatgatgatgaagacagcgttattccagatgaaccagtaattaagaaaactgccttgaatatggaagagagctttacggcaactaatcctaaagctgaaccagtgaaggcaacggatgttaaacctattaagaagactaagatggaaattcttaaagacctttggaaccagttcctgaaagcagagacttctaatgaagctattacactggctgatgaaatcattgctgctaagggcaaatgtaagaaatcatgggcttctttaggcttcagtggtgacatggttcagaaactgattgatgctcgtgctaataaacctaagccagaaaaagcagtcaaacaggataaaaccgttgcacctaagaaaactacagtcactcgtagtcggaatgctgatgttattcgtagttatctaaatgacaaaggtatgtctgattactgtaaagctcatgccattcacgatgtgaaacgtgctgctaagaaatcttatgctgcactgggtctgactcctgaagaatgcagccaaattgataaactgaagcatcacctgaagatacatactatggccaaagtttatcgtgctaaccgtaaagcccatgatgacgatattattcgtatgaatgcagtcggtttatcattgggaaccattgctaaaacactgggtgttcaccccactacagttaccttacgattacgctctcttggtattgaaccagccgacacacgtcgaacatttatggagaacgtactagcaccattacctactcacgtagctgattggttatcagaacaagtaggaccaaaatatgagattcgacaatacgttcgagacttattactggaagcctacaataatcgtcataatcataaggaaactgctcatgaacgattcctcaaaagatacgttgaagtagttgagatgctggaagaattggctccaaattctgaagaagcatacgatacacttcataatgccattgcagctttaactgaattgtcagaattaatgaagtcctctgataaagaagtttatgcacctaacagcaatcgcttagctattctggatgcactggcagaccagattgttacagcaactggcatcggtactttcttgggtatgaacgtacccggagcactcactgaagtgaaccgttctaattattcaaaatttgaagacggtgagcctgttttcaatgagaataagaaagtaatgaaagaggcagcggcagaaggtttcttcgactttctgctcgaccccaatgcttctgaacttcgtattagtggacctggtggtacaggcaagacatttacaatggctcatatgattgacgagattatgcctcgttatcatgagacatgtagtctgatgggaatccctgctctctataacgaagttattatgactgctactactaataaggcagcagaagtattagcccgtgcaacaggacgtcctacgtctacctatcattcctttcaaggtctgacagtacggaataacctgaagactggggaagcagacctgattccatctaagtccttcagtatcaaaaagaataaggtcatttttattgatgaagcatcaatgattgaccgtaaactgaagaagtttattaacgaaggtactcaccaaagtaagattgtttacttaggcgataaatgccaattgttacctgtaaaggaaacttcttcccctgtctacaatgacagtagcattaaagagtttatgctgacccaacagatgcgtactgatgtccctgaactccatgcactgcatgaacagcttcgtggaaccattgaaggtaagcacggattcctgcctattaaagcagttccaggtattatcgactggattaaagatggtgatgaaatgagaaaagaagtcgaaggtcatttcatgactaagactgacactcgtattgttgcctataccaaccaacaggttgttaactataacaccttcattcgagccatgaatggattccacggagagttctgtattggtgaagagttagtaagtaactctgctattcagattggtgctggtgaccgccttagtattgaacaggaatgccagattgttgaccaggattctgctactcgtaagattctgattgattcctctggcatcgaattagaagtacgtgattgcaccctggatactggttatggtggtgtctttgaaggtatccctattccgaaagaaccattccctgaacttcgagcattacatgcttctactgtgcataagtctcaaggttctacctacgacaccatctttattgatgctactgatttatctacttgccgtcagcctgatgtagtagcacgtctgctttacgtagcagtatctcgtgctcgtcatcgggttgtgttctatggctctttggcagagaaatttgggggggagttctattcgagttcccgttcatcacaacaacctccttctggtcatcgtctggctctagctaatcacctactggatgatatgcgggagtatctggaacaagcaggtaaacttctgctagaagtccatatggtgaatcagatggtctttcgtctggttcagggctgtaagacttatcaagacgttcgtgatgcattgccagaatgcctcattgctatggataaacaaggtcatctgaaatccttacagagaaccagaaaggcagcatttactctggataatgatgctatggctctccgtcatatgagaaaatcttgccgattatcgaatactatgcgggaacccatcttatcttttgaggtctgtatgcgttacattacattcaacaatgagggtatctaccctattgctatccttactacaacgttacgtaaggatgatattgtcaaagcatacatggaaccctgggatgtagataaagattcagtaatgattcttgaacttcatacagccccagggaaaaagaaaactcctgctaaagagatgcaggagtttattacccaagaattagtgccagcattcgaagcagcacaaactcagtatatcatctgtggtgattctgaatattacaaacagctaaccaaacaaggtaaagctgatgccaatattggctatgtaatggattgtgcttatgggaaccagaaagttatttacgttcccaattacagacaaatcttttatgacccagataagataaagactaagattgctttatccatgcaggctctgattgattatgtctctggttcttatgttgagccaggaactaagattatccattatgctgattacccattaactccagaagctatatctaagtggttagataagttactggagatggatgttccattagcagtagatatagaaaccttcagtctgaagcattatgactgtggtataggcactattacattctgctggaacaagcacgaagggattgcattccctgtggattatgaaccaattgagggggctactgaagctccttatggtagacaagttcacaacatgcttgttcgttctatgctcagggacttttttattaagtatctgaacaggcagatgtatcacaatattgcctttgacgtatacgcactcatttaccagttatttatgacagaccttctggatacggaagggttgttgcatggcatgagtatcatgctaagaaactgggattgcactaagttaattacctatctggctactaactcttgtgccggtaataagctaagtcttaaagaccaggctcaggaatatgctggtaactatgctcaagaagaaatcaatgacattaccagaatcccattagcagagttgttggaatacaacttagtggatggattatgtacctggtatgtctatgaaaagcattgggatactctggttaatgaccaacagttagatgtttatacaaacatctttaaacctgcatgtgaagatattattcaaatgcagttaactggtatgcctatcaatatgaggacagtattggaggtagaagaggcattaacccaagactataacaatgcgttaaaaacaattgctgacagtaaagtaatcaaagattttacccgtcttcttaatgaagaatgggtagaaaaacagaaccagattctgaagaagaaacgagtgactttagctgatgctaaagagcagtttaatccaaactcaggtattcaattacagaagctactttttgagtttctggggttacctgtactgggtctgactgcaagtaaactacctgctactggtagtggcatactcaagtctttgaagaaccatactcaagataccagtattctggaaattcttgatgctctgattgattacaaagctgtagataaaattctgacagcatttattccagcattaaaaaatgccagacaaggaccagatggttggcattatctctttggtaatctgaacttaggtgggactgtatcaggccgtctatccagtagtgaaccaaacctacagaacctaccttctggttccagatatgccaagatgattaaaaaatgttttgaggctcctcctggatggatattttgtgggctagactttgcttctctcgaagaccgtatatctgctttaacaaccaaagaccctaataaactaaaggtgtataccgatggttacgacgggcatagtctacgtgcatatgcttacttcggtgagatgatgcctgacattgaagatacggtagagtctgttaattctattcaggagaagtacaaagcatatcgtcaggattctaaagcacctacctttgctcttacctatcagggcacgtacatcactttgatgaagaactgtggtttccctgaacagaaagctcgaatggttgaggaacgttatcacacactttataaggtaagtgatgactgggttcaggctaaactagaccaagctgcaaaagatggttatgtaaccgtagcatttggcctgagagtcagaacccccttacttcaacaagttatccgtggaaccagtaaaactccttatgaagctgaagctgaaggacgtactgctggtaatgcattaggccaaagttggtgtcttctgaataaccgtgctggttcagagttcatgcgtaaggtacggaatagtaagcatcgtcttgatattcgtccaagtacccatatccatgatgctcagtatttccttatccgtgatgatatggatgttgtgatatataccaatactcatttggtgaaagcagtacaatggcaagaccatcctgatattgctcatccagatgttcatttggatggtcaggaaggtgctgttattgttcagaacactatgctgcttactgaagagaaacaggtaactttccgtgacctgggacgtgctcagtctgctctgtttcagaatctgaatgaccgttttggtcaagtggtagatgtacgggatattgtattcctgaacgtcagctacttgggtcatatgagccagcctgactttcagcaaaatctggtaaccaaccctcaacgtatggaacagcctccatatcaggccgagtgtgaggatattatccaagcactgaatatgacctttgatgaagggtgtctgttcaaggcattgtggcgtaatgctgctgctcgtttaggtaatggtaaaccaggtaacaatgccgtttatgatgcagagaagatggttcattatgctaaccgcatttttattaaagaatccggtgggcagaaaaaagaagcagaagaaccagtttctgcggctctgaagaagggtgaagagattcatatgtctctgtctgaattattcaccctgttaactggtgaagcagcagaaggtgaagtaatgagccttgccggttggcatactcacgtaccaaaccgtttgggtgttatgcctattgctgttgcaatgagcaaagcagaacaagttgatgtagtacgtgccgatggaacgactattactcatgtatttcctcatgagattgactggtctgataagattgccccctttgctcgaatcactgcatggcgtttcactgtctggcttttgcatgacgagtatgattatgtgaaggataaaaagtatctttctgtgactaccctgcttaagccaattaagcacattgtcatgaagcatcgtgtagacctttctgtagaaagtatggacatcatggatttggtgtccacttctatgggtacaggcttacatgattctattgagaaggcatggcataacggacaccacaatgcattacgcaagttagggtatcctgagcgtgtcgttcagaatgttgtcatcaaccctacccctgagcagattgcatcaaatccaaacttaattcctgtatggatagaacaacgagcaactaaaaagattgctggttggactattgggggcaagttcgacattgttactgaaggtcttcttcaggatgtaaaatccacctccacttacacatgggtaaagggtggacgtgatgaagaacatagacttcaggggtcaatgtatcgttggttacatgacgacaagattaccgaagatgtgattcgtattaactacatcttcactgactggatgaaagcattagctacatctcaagaaaactatccaaagcatcgtgtgctgcataaagacattccattgatgtcttatgaagcgactgaagaatggattaaagccaagctggctctcattgataagtactgggatgctcctgaaagcgagattccagaatgtactgatgaagagttatggcgttctgacccagtgtttaaatactttgctgacccagagaaggcaaagcaacctggtgctcgttctaccaaaaacttccctactctctttgaggctcggaagttcatggcagagaaaggcaaaggcactattcttcatgttcctgagatatttcccatgattgacctgaccggagtctcacatcatccggcgattgaagaaatcgttgatgtgttatgtaacaagacgcaaaacactgaccgtggttttttccgtgtagaagtggcctatttccttgcgaaaatggcttcatgtatgggtgcaactatcatcactaaagaccgtggtgaaattccagtaaacatctatgcagtggctcttgctacttcaggcttcggtaaaggccattcggtcaacattgttgaagacggttttatggctggctttaagaagcggtttatggaagacaccatgcctgctttagcagaagaccgtctgtggaaaattgctaacgaacgttctgctcgtaatgctactgaccagaaggaagagtttgacaaggtggaagctgaatacagacgtactggtgcttatccatttacgtttgactcaggtacacctcctgctgtgaaacagttacgtcataaactcttattagctggatgtggtgctattaacttacagattgatgagattggttcaaaccttctcgctaatgctgatgtattaactgtgttccttgagttgtacgaccaaggcaagattaaacagaaacttactaagaatactgctgaaagtattcgtagtgaggaagttgatggtaaaactccagctaacctttttctgtttggtacaccgagcaaacttctcaatgggagccagactgaggaacttttctatgacttccttgatactggctattctcgtcgttgtctgtttgctgtaggtcaggcagataaacgtgcatatctgagccagagtgctgaagaaatctatcgtaatctgattaagcaggataacaatgctgttgtgaataagtgggctaaccactttcatagccttgcagatgcatccaagtttggttggaaaatgacagttgaagatgatgttggtattgcactaatcgactacaagattcagtgtgaaaaacaagcagcagctttagctgaccacgaagagattcgtaaagcagaactggaacatcgctattttaaggcactgaaattggcaggtgcatttgcatttgttgataacagtatcatggtagagatggaacatctgaagcaagcaattcttctggtggaagagtctggtgttgcattccagactatcctcaatcgtgaaaaagcctacgttaaattagccaagtatattgcatctgttggtactgaagttactcatgcagatttgcttgaagctttaccattctataagagtgggaatgctgcacagaaagttccatttgaccagttacatgtactgacccagcaagcaggttatcactgggctaaccaccatttccgtcgagggcatcgtgctgaagagaatgctattgctggcttcaatatgattgtcattgatgtggatgtccttttcttggttgaagaggactgtcagttaaaagaggaaactatgtcagaagaatttgaacatggcgaaatgaatgaccagctaatcctgattgtaggattttctgctgctggtaaatcggcctcacttcgtaacatccgtaaccaggaacgttgggtatatctgaatacagaagctggtaaacgtctgccatttaaaaataacttcaatggtgttcgtattactgacccataccaaatcctggaatactttgaccaatgcattgaacatcgtgatgacgtggacggaatcattgtagattccctgactttcatgatggatatgctggaaactcagtatgtactcactgctgcaaacactcagaaggcttggggtgaatttgcacagttcttcaaaattctccttcaggagaaagtagttaaatttgccaagccagttatcttcactgctcacgtcaaagacgaagtagatgaacgtgcaatggaactgaagactttcgttccagtaaaaggttctctgaagaacaatggcattgaagcatacttctctactgttgtatcagcagaacgtatcgaccttaaagaacttgaaaagtattccaatggaatgttggaaattactgaggatgagcaagagttggggtacaaacacgtattccagactcgacctactaagaaaacagtaggtaaacgtattcgttctcctatgggtatgttcagtaagcaagagacttatatggacaatgatgcccaaaaacttctcgaccatctggcagagtattactctaccggtcaggcagctaaagcagagaaagcaacggataacctgggtggtggatttggtgcaaaagaatctgatatttatctggctaatctgaaagtagcttatgcaggtaaagcagcttctggtgctaacttcattcagattattgcagacctgactgaccttgatggacacagtgctggtgaatatcgtgagcaactgtacatcacttctggtactgaaaaaggctgcaagtgtacttatgaaaagaatggtaaggaatacttcctgccaggctacactgtaatcaatgacatcctggtaatgacttctggtgagactattcctgaagcagtcttcgaagagaaagtcgttaacgtatatgacttcgatgagaagaaagaagttgccaaatctgtcatggttccagtcaatgctatcggtggtaagtttgctgtagctattctgaaatctgaagaagataagcagactaaagatggctccggtaactatgtgtctactggtgaaactcgtttcactaataccatcgaaaaagtattccaccctgacctgcatctgactgttgttgaagcaaaagaactgactgaacgtggtaaagaactgaccgttgaagaagcagtcttttgggacacaatggctggaaaaaacaaaggcgttacccgtgacaaaacactaaaggcg

SEQ ID NO: 23287 - DNA, 6789 bp, Homo sapiens
  SIMILAR (6601)..(6786): 831254mologous to Homo sapiens unnamed protein product,accession number AK022519,Smith-Waterman Score=269.
atgggcaaaactgctgcattctttggttcactgttatgttctctgaagttccgttgggtaaaagatggctgtgatacagcacaaaccgatggtgagcatctcgaatggaatcctgattggtttgaaagtctattacctgaatctcgtgtaacagtacttatgcatgaactatggcatgttggcttactgcattctgttcgtatgggttctcgtgacccagaagtatggaattatgcctgcgatatttatatcaacaatcagcttattcaggatggctacagctttataggaatcgaaaattgctggaaagaccctaagtatgctggttgggctgaagaacaaatctatgatgacctcatgagcaaacagatacgtcctcctaaagcatcaggtgcttttgggactggctcaggtggtgacatgaaaccttccacttcgaaggctagtcaggtgaatattgtcaataatgtagtaagagccatgcaccaacagaaactatctggtggctctttgcctggggtattacctggaaaaatggaagaagttattactcaattcctgaaaccagtagtaccgtggcaggttttacttgaacgcttcttcaatgacctgcaagaaacttactactcatggcaacggcctaatcgtagataccctgatatgtacctaccatctcctatggatgatgacggtagactggaacatctggcttatttcctcgatacatctggctccattaaacctaaagatgctttacgctttagctctgaagtggcctatgtaaaagagaaatatcagcctcagaagatgactctagttcagttcactacagagattgtagatgaacaagtcattgaagatggtgataagtttactgatgtcactatcaaagacggggtggtactagtctggttcctgtacggcatggttaacagtaaactcagttcaggtgagactacatttggactgggagaagctggttatgacatccgtattaaacaggatgttaccttctaccgatttcttggtttgattccctgcatcaagattaaagatgaaggaaagaccaagtggaagtttggcactttcacattagcttctgcaatggaacgtttcaatgtacctgctggcctagtagtatggaaaaaatcttgccgattatcgaatactatgcgggaacccatcttatcttttgaggtctgtatgcgttacattacattcaacaatgagggtatctaccctattgctatccttactacaacgttacgtaaggatgatattgtcaaagcatacatggaaccctgggatgtagataaagattcagtaatgattcttgaacttaatccagccccagggaaaaagaaaactcctgctaaagagatgcaggagtttattacccaagaattagtgccagcattcgaagcagcacaaactcagtatatcatctgtggtgattctgaatattacaaacagctaaccaaacaaggtaaagctgatgccaatattggctatgtaatggattgtgcttatgggaaccagaaagttatttacgttcccaattacagacaaatcttttatgacccagataagataaagactaagattgctttatccatgcaggctctgattgattatgtctctggttcttatgttgagccaggaactaagattatccattatgctgattacccattaactccagaagctatatctaagtggttagataagttactggagatggatgttccattagcagtagatatagaaaccttcagtctgaagcattatgactgtggtataggcactattacattctgctggaacaagcacgaagggattgcattccctgtggattatgaaccaattgagggggctactgaagctccttatggtagacaagttcacaacatgcttgttcgttctatgctcagggacttttttattaagtatctgaacaggcagatgtatcacaatattgcctttgacgtatacgcactcatttaccagttatttatgacagaccttctggatacggaagggttgttgcatggcatgagtatcatgctaagaaactgggattgcactaagttaattacctatctggctactaactcttgtgccggtaataagctaagtcttaaagaccaggctcaggaatatgctggtaactatgctcaagaagaaatcaatgacattaccagaatcccattagcagagttgttggaatacaacttagtggatggattatgtacctggtatgtctatgaaaagcattgggatactctggttaatgaccaacagttagatgtttatacaaacatctttaaacctgcatgtgaagatattattcaaatgcagttaactgactataacaatgcgttaaaaacaattgctgacagtaaagtaatcaaagattttacccgtcttcttaatgaagaatgggtagaaaaacagaaccagattctgaagaagaaacgagtgactttagctgatgctaaagagcagtttaatccaaactcaggtattcaattacagaagctactttttgagtttctggggttacctgtactgggtctgactgcaagtaaactacctgctactggtagtggcatactcaagtctttgaagaaccatactcaagataccagtattctggaaattcttgatgctctgattgattacaaagctgtagataaaattctgacagcatttattccagcattaaaaaatgccagacaaggaccagatggttggcattatctctttggtaatctgaacttagtgtttgggcatctacctagcttgggtaaagtagaaggaatgatttatgtatctgactctatggataacggtgttaagtctgcccgtaagaacattgagtttcgatacaacaattcaccattcctgcaacaatggattcctaaagctaccttcacagataactaccttgagtttgtaaatgctgaaggtcaccgtcttggtgtgaagatgtttggtgctaagacaggtcttcgtggtactaagattttggaattgatgttacgtatcagctctgaagatgaacgtctgattcaagattcagagattaaatggtattcccgtacgcagctattacgtctacgttcttgttataacttctatatcaccactgactttgctaccagcgagaagcaggtatctgactactctgtaatatcagtatgggcatatggttctaacggtgactggttctgggtagatggtattgcttgccgtcaaactatggataagaactttgatgacttattccgtctggttcaggaataccaaccacaacaagttggtgtagaaactactggacagcaaggtggttttatttctcttcttcagaaggaaatgcttaaccgtaatgtgttctttaactttgcatccagtcgtggaggccaaccgggtattcatcctgtaaccagtaagctatcaaggtttaacctcgtggttccctggttcaaagctggtaagatgtattttcctgctgaaatgaaagatagcccaatcatgacactctttatggggcaaattcgtttagccactatcaatggtcttaaaggtaaggatgactgtattgataccatttcaatgcttggctacctgaacccgtggaaaccacaagcaggtatcgttacagatgacaaaggtgacattgaagatgatagtaagcctttcattatcgtagctgctaatgaggcactgactcgtctgcatggtcgcttcaacatgcgtaacaacaacgtggttgttgagatgcaagaaggtagaaccaactacccattactagctaagtatgctgttcagtcttatgacccaaatgaagtgaagtgtcccttcattatggacttagcaggtgagaagtttgctgaggatgttattcgtattctggaagtgtatgacgataagggtcgtagacgtccgttgaatgaccgaaataatcctcacagtttgttcaccccaaggccaaacgttctacagaacaatgctccaaaagcatgggaagtattgaacgtaatgtatcaggctaaacatcctaaactgtctacagcagaggatggctataatgagatagacattcctgatacccttgacccagctttggatgcctacattgcttaccgttattacacttctctgaataccccagagagttcagcaaaggcagcagagtatctgtccttttatgacagcatctgttattgctgcgaaacacttaatgacccaatcgttgataagatgattggtaatgcttactacgttgttaagttcgtagcattacgaatgacctttattaaaaatgtcagtgataatatgactcagctacttgctatccataacaagttaactgagctatctgctatctacactaagctagatgaactacaacttattcataataatctggataagttacaggaactctacaatcaattatctaaactgactggtctatatgacaatcttcaggcattgctgagggtctatgacaacctgactccaatcaatactgtagcttctaacattgacgcagttaatacagtagcaactgatattgctaaagtaattattgtttctgctcaaattgataaagtaattactgttgctaatagcattaccaacgtgaataccgttgctggttccattgatgctgttaatacagtaagtactaatatcaatgcgattaagaatgtgaataccaatatggcagcactgcttgatttggataatcacatgactgaactattagctgtacatgccagattaggtgacttagttaccattgcagagcagctagacacaatcattgctgaccatgaaaagtatgctactgctgaaggtgcaggtctgattggctttaatcaggcacagacttatgcagctaatacagtaggtgcaatgctccgtcaggttattactatggataatgacaaaggtggttatgctgtagcaggtaaactgacctctactggtggagtatggtcgttagctactggttccatcaacatgaatgcccctactgctggtgcagtagctaacctggttcttaattataaagccggtaaagttagtggtttgttggtagcacctagtcaacaaatggcattggatggcctgattatgggtgcatctactactgacaatacagctactgtatctgttactgccccactccgttttaaagcagacctaactgctaaagcaatctccggtgtgaatacccgtatcatgccttccagtgcagtgactctgaatgtagatgcatatggtggcatcactcttggatatccacctagccttcagactgtagaaccagtgatgactttcattacccctacaggcaaggctccactgaccccacgattctccagtgttacggcaggggctgctgtactggttatggttggtgaagcagaagcacaactgaaatattcaggtggtggttgggctgctgtatctgattgggattcgggtacttattgtgcattcgatacagtatctggtgagttaacggtatatcacagtactcttatcaaagattctactgttacatttagcttactgttacctaccgatggtactcagcttacggcacaactgaagagtcatactgatagttccttcgtattgaagattgctaaaccagatggttctttacttgatgccccattggaaggtatgggtatcatgtactctcgtggtatgcacggaatctataaagtaccttatggttctctaatcgtagatgtcggtcgtgttcaggttaaattcagtgaatttaacaccacggaaggccgggaaaccggccttattactggagcagttatgtccattgaagattacctcaaaggcaagaattgcctagcttctcctaattatgacccggatgaccagcactcttcttggagagaagacctccctcaatttaagaaagacagggaacatctgacgttggtcaacactcgtcgtaatcggacttataacactaaactaaatcgtttcgaccctgagtattgggtagttgattacaatgccttaatggtagccaccatcattccgtatggttctaagtcttttaaagttccttttactattcagactcctgaaaaagcatatacgtatcgtctggctccatatggattcaataataaaacccgtcgatgggagtgtttggatacaaagtatggaaccaagagaacgtatcaggctgacatctttgtagctactgatgaagatattcctgaatctgaaatgacagaagtctatggcactaaggactatatcttcattctggactttgctgatttacgtacaggtgtggcatttaatggggtaactattaaccctcgtaatatcacaatgatttctttcgactgtactgaagcacatcatggtctagggaaagatgcttacattgccgccatgtataacaatgacgatggtgctactttccagatggaaattgggggtattcatactaatgctgctttagctgctggggataaactccaatgcatctggagatacttggatgttaatggtaatgctcaagcagcagagaatgagttcgaagtaagcaaactattcatggaaggatttagaagcctaaaagaaggagaaccagtggaattcacatttaaaaaatcttccaaaggccttgagtcaatacgggtaacaggacctggtgggagcccctgtttaggaagtgaaagaagacccaaagggaagacactacagaaaagaaaaccaaagggagataggtaa

SEQ ID NO: 23288 - DNA, 2859 bp, Homo sapiens
atggaaattgaccgtcaactagaacatcctgcactggctcatttctctggttctcaaaaagcccatctccgtaagcatttaaagagggctaaggatttacgtaattacagggaattaactaaagtatttactgatatggctattaagccaatgttcaaaacctttgctaaattggggattactaaaggtatttccctatttcattatcaatatggtgttgaactgtggcgtaataatattgttaatagtgtccgtagaatacactcattaaacttcatgacttatagttctaagaagtgccgtgtatttgttaccccacgtattaccaatattgaagatagtctggctgggtatccagagtttgataatctttctactgagacactggtaaaatataactcaatcattgtcaaagttggaaccaagaaaggtgaagcagaggctatgactaatctgctcactaaagcaggatacgaagtcattaatatggctgaatatcatgagtgggattgtatagctcgcagacgtaaagaggaacaagaggctaaattagccatttccaaattacaagctaagaaggctactaataagaaaaaggttagtcctaatcgtcttattagtatgaatatccttgaaataccaaaagagcatcgtagctattcaagtgaggtatgtggttctcactacgcttctcgttctcatgaccgaatggttgatgtagatactccccagtattacatcatgcaggaagatattaataactacacaggaaggcttggtgttctttctatgtggcaattaacccctgctaccattaaagctgtaactgttgtttgtcgtaataaaattgaacgtaataaagctattaagcgaggtgctgttcatttggatgaatggactgctccgtatattgcttcagttcttacatccaaacaattcattaagtatgtcactaaagaacgtcagaaaacgttaagtgatattgtatcaggtactcaagaagcaaatggttatgtatatgctgacttcactgtagaagactggattcctgtaatgatggaagcggttggttctcctaatccgtgggagttcatgaagtggcgagtagtttgtctgtatcaggaaagagaaattccttcagcaccttggtcagataacattcctttggataatgcagggcttgttaagaagaccattctggtaggtattaaccagtttggtggtggacactttactgatatgtctgacccaactgctaccacagctaatggtgcaattggtcgtaaagacaaggtatctgcttctacgttacgtctgacttttgcagagaaagctggattacgtcctatcagtgcaggtatgacggtaggtactcacaaatggtggaatacttccagtaattccccaggtgatgcactactggctattaacgatatggttaaaggtttgggtgttaaacctgattacttcattgaagctaatccgtgggaaaccatgtatatgaaggatgttaattcttctacatggcctgctttaatgactgcttttgaatcgtctaacaaagcaatgcttgcatggatgagaaccaactggggcaaccctaatctggagatttggttccagggggctactactgtttggtttggtgttgctccacctaatgaccttaactctgaagctactgttactgtacgtgataaacagattcagatggctacagctaatataggctttaaactgggttcctttgttcctggttctaacctgtacactgcgtaccgtaatgtggaatccagttggatttactacacggtagaagcattccatgccacagccattgagctaggtgaagcactggctcttaatgttaaccgtgctactaatccacctgattggtcttacttgcgcccaccagcaaatctgcaaggtcgggtagtccagaatggttcctatatgcagactcctactcaactgaaagctgctaaacagcttaatggtgacattatcttcacttgggtaggacgtccttcatggcaacacttctgggtagtgaataccagtgttaatgattctaagactgttatcttctctaaagaatggtctagtgaatctctaacatggactgttgcagaacagaacgagttctacggcctggaagaaggtggtgctactcatgtcatcttcatggtatctgagtatgacccaagtaacggattagtatctattggtgctcaagttactggtcaaacagagcagccatctaatccaatgaatcctgttgctggattgtatgcagtgttcaccggtgacccaggtaactctaatattaagattatgtgggataaaccttctgttggtggacgtgatgttcgtattcgaaatatgcatgtaacgtccagtgcaactattagtgaccagtttgtatctgataacaatcttgtgttcacacgagaagaacaggtagctgcttatggctttactgcttcaagcgtatctgttcgtgctcaagaacatgatattgaatcaggtgcattgggtcttactactgagtatgttgctgcactggaaacagcaggaacagttggacagggctttgctaagaaagactctgtaggtaactgtactatgtcatgggaagtaggtgatgctgtccaatggcaggttgagattatcaatgctgagaactctactgttgttaaaacagagattgttgtagcacctacaatcacttggacggctgaagaaattacagccgagtatggttacctgactgaccatatggtttggcgagtaagaccttatcgtgcagatggggcatctaacgtagctaaacaatttgatatgacagccactctttaa

SEQ ID NO: 23289 - DNA, 7197 bp, Homo sapiens
  SIMILAR (2650)..(3408): 991254mologous to Bacteriophage N4 single-stranded DNA- binding protein,accession number U29728,Smith-Waterman Score=1298.
atgtatcgttggttacatgacgacaagattaccgaagatgtgattcgtattaactacatcttaactgactggatgaaagcattagctacatctcaagaaaactatccaaagcatcgtgtgctgcataaagacattccattgatgacttatgaagcgactgaagaatggattaaagccaagctggctctcattgataagtactgggatgctcctgaaagcgagattccagaatgtactgatgaagagttatggcgttctgacccagtgtttaaatactttgctgacccagagaaggcaaagcaacctggtgctcgttctaccaaaaacttacctactctgtttgaggctcggaagttcatggcagagaaaggcaaaggcactattcttcatgttcctgagatatttcccatgattgacctgaccggagtctcacatcatccggcgattgaagaaatcgttgatgtgttatgtaacaagacgcaaaacactgaccgtggttttttccgtgtagaagtggcctatttccttgcgaaaatggcttcatgtatgggtgcaactatcatcactaaagaccgtggtgaaattccagtaaacatctatgcagtggctcttgctacttcaggcttcggtaaaggccattcggtcaacattgttgaagacggttttatggctggctttaagaagcggtttatggaagacaccatgcctgctttagcagaagaccgtctgtggaaaattgctaacgaacgttctgctcgtaatgctactgaccagaaggaagagtttgacaaggtggaagctgaatacagacgtactggtgcttatccatttacgtttgactcaggtacacctcctgctgtgaaacagttacgtcataaactcttattagctggatgtggtgctattaacttacagattgatgagattggttcaaaccttctcgctaatgctgatgtattaactgtgttccttgagttcaactttctcaatgggagccagactgaggaactcttctatgactttcttgaaactggctattctcgtcgttgtctgtttgctgtaggtcaggcagataaacgtgcatatctgagccagagtgctgaagaaatctatcgtaatctgattaagcaggataacaatgctgttgtgaataagtgggctaaccactttcatagccttgcagatgcatccaagtttggttggaaaatgacagttgaagatgatgttggtattgcactaatcgactacaagattcagtgtgaaaaacaagcagcagctttagctgaccacgaagagattcgtaaagcagaactggaacatcgctattttaaggcactgaaattggcaggtgcatttgcatttgttgataacagtatcatggtagagatggaacatctgaagcaagcaattcttctggtggaagagtctggtgttgcattccagactatcctcaatcgtgaaaaagcctacgttaaattagccaagtatattgcatctgttggtactgaagttactcatgcagatttgcttgaagctttaccattctataagagtgggaatgctgcacgtaatgagatgatgactttagctactgcatggggctataagcagcatatcatcattaagaagacatacaacgaaggtattgagttcttccgtggtgaaacactgaaagagactgatactaacgaaatgattgtttcttatggtgagaactttgcttatgactatattgcagagaaagttccatttgaccagttacatgtactgacccagcaagcaggttatcactgggctaaccaccatttccgtcgagggcatcgtgctgaagagatgctattgctggcttcatatgatgtcattgatgtggatggtacgtgtaggttggacgtgtgccatgaattgatgaaagaataccgattcatgacatatacaaccaaacgccatactgatgaagaaaaccgtttccggttaattatcccaatgaactatcagcttgaacttgatggtgctgaatataaagagttcatggataacgttatggcatggctcccatttaaaacggacgagtctgctaatcaacgagccaagaaatgggaatcatgtgctaagggtacgtattactacaatatggatgctcccctgctagacgtaagagatttcattcctagaaccagtaagaatgaggcattccagcaagggatgcagaaggttcaaaatctggataatctcgaacgttggtttgcccaacgaattgctacaggcaatcgtaataaccacatgattaagtatgccctggctctggtagatagtggtataggcttcaatgaagttaaacaacgtgtgcatgagttcaataagaaactcagcaatcccctatctgctgatgaactggattccactgtaatgattactgtggctaaacacgaagtagatgaacgtgcaatggaactgaagactttcgttccagtaaaaggttctctgaagaacaatggcattgaagcatacttctctactgttgtatcagcagaacgtatcgaccttaaagaacttgaaaagtattccaatggaatgttggaaattactgaggatgagcaagagttggggtacaaacacgtattccagactcgacctactaagaaaacagtaggtcaggcagctaaagcagagaaagcaacggataacctgggtggtggatttggtgcaaaagaatctgatatttatctggctaatctgaaagtagcttatgcaggtaaagcagcttctggtgctaacttcattcagattattgcagacctgactgaccttgatggacacagtgctggtgaatatcgtgagcaactgtacatcacttctggtactgaaaaaggctgcaagtgtacttatgaaaagaatggtaaggaatacttcctgccaggctacactgtaatcaatgacatcctggtaatgacttctggtgagactattcctgaagcagtcttcgaagagaaagtcgttaacgtatatgacttcgatgagaagaaagaagttgccaaatctgtcatggttccagtcaatgctatcggtggtaagtttgctgtagctattctgaaatctgaagaagataagcagactaaagatggctccggtaactatgtgtctactggtgaaactcgtttcactaataccatcgaaaaagtattccaccctgacctgcatctgactgttgttgaagcagaagaactgactgaacgtggtaaagaactgaccgttgaagaagcagtcttttgggacaaatggctggagaaaaacaaaggcgttacccgtgacaaaaccactaaaggcggtgcttccggtaaagctggtcagccaccaaaaccaggtgctactaatactggtgcgggtgcttctgctgcaaaatctctgttcgaaataatgcagatacctgtgcttggagttgaccccagttttcgtaactggggactagcacggggaatgctcgacttagagacgggaatactctctggattagacctgaagctggtagaaaccaaacctgatggaaccaagcaagtaaggcagaacagcaaagatatgcaagctgctgaggacattactactggtgtcatcgactggttcaaagaagcaaaggtcatctttgtagaggttcccgttggctcacaaagtgccaatggaatgaaatcctatggtgtttgtgtaggcatcttaggagcactcagggcactaggacatgagattattgaagttactcctatcgagaacaaagtagctctgtccggtattaagactgcttctaaagatgtgatgattagagcagctacaggattttatccagaggccaactggctcaaggataccaaagaagttactattcgtgatgctgttgaagcaactgatgctactccggaacagaaagttgcagcacaccagtatgtttctgacttaatgaatgctactcgttttaatcctgaaaattatcaggaagcaccagagcatattcgtaatgctgtagctggttctactgaccaagtacaggttattcaaaagttagcagacctagttaacacattagatgaatctaatcctcaagcactgatggaagctgcatcttatatgtatgatgctgtttcagagtttgagcaattcattaaccgtgaccctgctgcactggatagtattcctaaagattctccggctattgagttactcaatcgttatacaaatctgacagctaatattcagaacacaccaaaagtaattggtgcactgaatgttattaatcgaatgattaatgaatctgcccagaatggttctttggatgtgactgaagaatccagtccacaggaaatgcagaacgtagcattagctgctgaagtagctcctgaaaagctcaatccagaatctgtaaatgttgttcttaaacatgctgctgatggtcgtattaaactgaataatcgccaaattgctgcccttcagaatgctgctgcaatcctgaagggggcacgggaatatgatgcagaagctgcccgtcttggattacgtcctcaagacattgtgagtaaacagattaaaacggatgagagcagaactcaggaaggacaatactctgcgttgcaacatgcgaataggattcggtctgcgtataactctggtaatttcgagttggcctccgcttacctgaacgactttatgcagttcgcccagcacatgcagaataaggttggagcgttgaatgagcatcttgttacggggaatgcggataagaataagtctgtccactaccaagctcttactgctgacagagaatgggttcgtagccgtaccggattgggggtcaatccctatgacactaagtcggttaaatttgcccagcaagttgctcttgaagcgaaaacggtagcggatattgctaatgccctcgcttcggcttacccggaactgaaggtcagtcatataaaagttactccattggattcacgtcttaacgcccctgctgctgaggtggtcaaggcattccgtcaaggcaatcgagacgttgctttttctcaacagaaagctgactccgtgaatcaggttaaagaaactcctgttacaaaacaggaaccagttacatctactgtacagactaagactcctgttagtgaacctgttaaaacagaacctactactaaagagtctagaccacaggctataaaagaacctgtgagccagtctgaaaaacgggatgttaaccttactaatgaggacaccatcaagcaacctactgaatctgttaaagaaactgaaacttctgcaaaagaaagcacagttacagaagaattaagagaaggtatcgatgctgtttacccctcattggtaggtactgctgattctaaagcagagggtattaagaactatttcaaattgtcctttaccttaccggaagaacagaaatcccgtactgttggttcagaagcacctctaaaagaggtgtataccgatggttacgacgggcatagtctacgtgcatatgcttacttcggtgagatgatgcctgacattgaagatacggtagagtctgttaattctattcaggagaagtacaaagcatatcgtcaggattctaaagcacctacctttgctcttacctatcagggcacgtacatcactttgatgaagaactgtggtttccctgaacagaaagctcgaatggttgaggaacgttatcacacactttataaggtaagtgatgactgggttcaggctaaactagaccaagctgcaaaagatggttatgtaaccgtagcatttggcctgagagtcagaacccccttacttcaacaagttatccgtggaaccagtaaaactccttatgaagctgaagctgaaggacgtactgctggtaatgcattaggccaaagttggtgtcttctgaataaccgtgctggttcagaggtcatgcgtaagaaaccggagatattgatgacaagaataccatttttaaaacctagaaaacgaacaccaaagctgtatcaaaagacttcagaagacggtttagccttgaaccagaaagctattaaggctgttagtgccctggttcaaggtaaacaggatgctgttgctttacgtcttgttgttgagcaaatcttagttgctctgacactggctcaagtagctaaacaagaaggtaaacaagaaacctgtaaaacagcattaggtgctttgtactggttgtataaagaccttgctgacaactttgaaatgtctatggataagtggcagggcatttcttgtgtacttgctcttagagaagggcaggaattactgtctactctaccaaaagcagaatttaaactagcctacactggagcacataagattgttcttggttccataaggacatctttaaccacctcaagctattcaaggctttctatgattaatgcaaaaatcctcgctgatagtattactctttctggtgaccgcctggtaacaatggaactggtttatccgcgtttcattcattcagaatttatgactcaccgagcacttaatcgtaatgcttccagtagtcgtgctattcctacccaacgccttattgagcaagttcgcaatgaaccagtaatgccagtacattggggtaagaaccagaaaggaatgcaggcaagtgaagaactcactcctatggagattaaggatgctgagttcatttgggaaaatgctgcctctgctgctgctgtatatgctgaacaacttcgtcgcggacaagtacataagcagattgttaatcgtattctggaaccattcacgcatatccgtgtagtagtgacagctactcaatggaataacttctttggtttacgcattcatcccgatgctcaaccagagatttgtgaattggctactaagatgaaggaacagtatgaccaatcaaaaccccgtaccctgttggctggggaatggcatttgccgtacattactaatagtgattacctcgatgcttacgattattgcaaacatcaacgaattactcgtgatgaaccaagtagtgatgagattaattgcctgttagtaaaaatctctgctgctcgttgtgcccgtgcttcctataacaactttaaaggtactccttctactatcgaagaagacttgcgtttgttctctaaattggttgaaaagcagaaagcaggctttacaagtggcccaaggaaaagataa

SEQ ID NO: 23290 - DNA, 7731 bp, Homo sapiens
  SIMILAR (792)..(4): 901254mologous to Homo sapiens putative p150,accession number U93569,Smith-Waterman Score=1271.
ttattctagggtttttctggttttaggtccaacattgaagtctttaatccatcttgaattaatttttgtataaggtgtaaggaggggatccagtttcagctttctacatatggctagccagttttcccagcaccatttattaaatagagaatcctttccccatttcttgtttttgtcaggtttgtcaaagatcagatactggtagatatgtggcattatttctgagggctctgttctgttccactgttctatatctctgttttggtaccagtaccatgctgttttggttactgtagccttgtagtatactttgcagtcaggtagcatgatgcctccagctttgttcatttggcttaggattgacttggaaatgcaggctcttttttggttccatatgaactttaaagtagttttttccaactctgtgaagaaagtcattggtagcttgatgggcaaggcattgaatctataaattaccttgggcagtatggccattttcacgatattggttcttcctacacatgagcagggaatgttcttccatttgtttgtatcctctattatttcattgagcagtggtttgtagttctccttgaagaggtccttcacatcccttgtaagttggattcctaggtatttgattctctttgaagcaattgtgaatgggagttcactcatgatttggctctctgtttgtctgttattggtgtataggaatgcttgtgatttttgcacactgattttgtatcctgagactatgctgaagttccttatcagcttaaggagattttgaggtttcaagtcagcaatctctgcaagaatattcaaagtgatttgctggtctacgtttggaccaatagtctgaagcataaagcctaagtcttgggacttttggttgtctacttcagcagtagaaatatctacttcaaggtcaaagttacctttcaggtcttcacgtttaatagtgacaaattcttcattggtaatacgtactacttcatgctctgccaagaacacagcattcatagcaataatcttattaccaatttcagacatgcctttagctaaacgacgaaggatagccatctcacgtttagaagcagcatctaatacaccacgaataccagcagctacatcaccataagactcaccagttaccccaccagcaaatgctttaacaccagtaagagattctgcttcctggttctgaagggtagccatagtcagtgctgattgtggcaattcacggaacttatgctcaataatcatttgagcagggttttgtgtaggattgtattcataatcctcaccttccctgtaacgacgactattcagggcatcaagcatacctttaggcataccacgttgaccattggcactacgtccaagtaagtcaatcatcccacgcattacagcaccaagtactgcttggttatcacctaataactctgcatctggttcgccatacatatcccgtttaacaggcatatacggaattaatacaaatgggagtttgccgtcaggataaggattcttctctaaacgaataagggtagaaccaatccaagtagcaacgataggctctaatacaccattcccttcaatatcccagaatccccaatattcataagcaactacacgcttacgcatagggtcactaatctgaaattcttgaggagtagtggttgcatggtctggttcattaacgggagcagagctttgccaatcaatcttatttagattgtgataacggtctttctctttaagcaggtctgccttacaagtttcaaaagagacaatggcaaacattgccttattaatatcaccctgacatgaagggtcgataataatgttctctgggtttagcatttccaccgtaggatggtttgctaaaggaacttcaacttcagttgtagttgtcccagtttgtactgcatacgttgcttgtcccgtttcatcaaagaaacgtactgattccttaatagcttcatctacattctcttcataaccgcgagggttatctgtacgaagttgtagagcctgttgtaaagcatcagcttgttcttgtgtttgaatagggaacaaactaaatacaggaacttcttgcttctctttacgaatttccctgttccaaccaacacgaacaataccagtaccatcatcaacaactgaacgaacatagttatcaatgaaacttacacgatttagtttggtacggaattggtagttaagaaccagttcattctggcgtgcaccttgtacatcttcccaagttacaggagtaactttgaataacttattagaaccaaggaaaggttcagttaaagcagaataacgccattcagcttgacgacgtacaagtttaggctgtacctgtgaacgtcctttgactttaggtggcttggctttgccttcaatacgcataaggtcattccattctttgaccttaatcatcatggcagtatgagatggctttgctgcatccaagtctgctttaagtgcttgcaaggaaggttcattcttccagctagttaacttagtagcttggcttgggtctggcaatggaaccatagaatcagtgttttgttccatagtaattcctaacgtctcatagaattgaaccattggagtgtgtacatagaactctgtagcctgttctgctttcaatgcagccttctgttctggagtattacgaacagcagggttacgaagctgagtattagctacaggaggaatgtcatcaccaaagaacatcttctctgtaggatttactaaaacagcttcttcaatagcagtagggaagctattaattgggtcgaaggaatccagttcagtaatggtgtacagaccaatcgtcttcttattatctgggtcaatttctgacatatccacgatgttctctacaacatcagtagactctacaaatgcagccagaatttcagcagccattgctgtagggatacctttggtataacccaatggagcatttggattacgagataatccccagtaagactcaattttctgagccagggaactaactgcttcagtgagtgtcataccagtatcaaattgctctactaaaccttctggcagcagggcttggtcaataccagtaatagcagcaacatcttttgcatctttgatagcagtattgctggtagcagtaagtctccactgaagacccgctaatacagcagtctgtagcaattgctcattgtacttaaaggtatccccatcctgttcaacgatgttaagtaacttaccgcctacccaacggttggcttctgtaccctgagcaaaacgtttaccaacatccttagtgttaaggaacttagccagacgggaacgaagaatatcagcaataccttccccatgttccatgagttctttatatcgcttaataacttccccattaaaagcaggattagcaacttctttctcagtaaagagttcataacgagcacgagaagacagagcttgagctacctcttttagaggtgcttctgaaccaacagtacgggatttctgttcttccggtaaggtaaaggacaatttgaaatagttcttaataccctctgctttagaatcagcagtacctaccaatgaggggtaaacagcatcgataccttctcttaattcttctgtaactgtgctttcttttgcagaagtttcagtttctttaacagattcagtaggttgcttgatggtgtcctcattagtaaggttaacatcccgtttttcagactggctcacaggttcttttatagcctgtggtctagactctttagtagtaggttctgttttaacaggttcactaacaggagtcttagtctgtacagtagatgtaactggttcctgttttgtaacaggagtttctttaacctgattcacggagtcagctttctgttgagaaaaagcaacgtctcgattgccttgacggaatgccttgaccacctcagcagcaggggcgttaagacgtgaatccaatggagtaacttttatatgactgaccttcagttccgggtaagccgaagcgagggcattagcaatatccgctaccgttttcgcttcaagagcaacttgctgggcaaatttaaccgacttagtgtcatagggattgacccccaatccggtacggctacgaacccattctctgtcagcagtaagagcttggtagtggacagacttattcttatccgcattccccgtaacaagatgctcattcaacgctccaaccttattctgcatgtgctgggcgaactgcataaagtcgttcaggtaagcggaggccaactcgaaattaccagagttatacgcagaccgaatcctattcgcatgttgcaacgcagagtattgtccttcctgagttctgctctcatccgttttaatctgtttactcacaatgtcttgaggacgtaatccaagacgggcagcttctgcatcatattcccgtgcccccttcaggattgcagcagcattctgaagggcagcaatttggcgattattcagtttaatacgaccatcagcagcatgtttaagaacaacatttacagattctggattgagcttttcaggagctacttcagcagctaatgctacgttctgcatttcctgtgcactggattcttcagtcacatccaaagaaccattctgggacgtgctcagtctgctctgtttcagaatctgaatgaccgttttggtcaagtggtagatgtacgggatattgtattcctgaacgtcagctacttgggtcatatgagccagcctgactttcagcaaaatctggtaactaaagatactgctgcgaagaaagctaaactgaaagcaccaaagaccacctgcatcggatgattgggtagggtcaaatacttcagaatcaggattaactgcacatgcacggtctacagcagtagaaccagttgtcccattaatagggcgtacacctgcatagttaatgccccaagtttcagtcatgtacttctggaatacatcatagccacggtcagggtatgcaccagacatgaagtgaatagcaacctgacgctcaggagtaagggtatagccatcatcaaagcctgaagtcatgcccatacccatcactacttgtggatatttacgttgacccagttgcttacgaccggaaccagatacagtaaggttagtaaaccatttaacagagtctgggagcatacctttgcatttaccagagaagttagaagtaccaaagccttcatagcttactacttcgaactcattctctgctgcttgagcattaccattaacatccaagtatctccagatgcattggagtttatccccagcagctaaagcagcattagtatgaatacccccaatttccatctggaaagtagcaccatcgtcattgttatacatggcggcaatgtaagcatctttccctagaccatgatgtgcttcagtacagtcgaaagaaatcattgtgatattacgagggttaatagttaccccattaaatgccacacctgtacgtaaatcagcaaagtccagaatgaagatatagtccttagtgccatagacttctgtcatttcagattcaggaatatcttcatcagtagctacaaagatgtcagcctgatacgttctcttggttccatactttgtatccaaacactcccatcgacgggttttattattgaatccatatggagccagacgatacgtatatgctttttcaggagtctgaatagtaactgtgaatttatctggttcatcagggttatgacgaaaagccagaatcagacctaagtaattagggtctgtttcataacgatacagatgatggtcaaaggtatcctccgtcatccaacggacacctaagaagtctttgttagtacgccactgacaaggaactttaaaagacttagaaccatacggaatgatggtggctaccattaaggcattgtaatcaactacccaatactcagggtcgaaacgatttagtttagtgttataagtccgattacgacgagtgttgaccaacgtcagatgttccctgtctttcttaaattgagggaggtcttctctccaagaagagtgctggtcatccgggtcataattaggagaagctaggcaattcttgcctttgaggtaatcttcaatggacatacgtgccctgataggaggagcaaaggtagggggtgtggaatcctgacaatatgctttgtacttctcctgaatagaattaacagactctaccgtatcttcaatgtcaggcatcatctcaccgaagtaagcatatgcacgtagactatgcccgtcgtaaccatcggtatacacctttagtttattagggtctttggttgttaaagcagatatacggtcttcgagagaagcaaagtctagcccacaaaatatccatccaggaggagcctcaaaacattttttaatcatcttggcatatctggaaccagaaggtaggttctgtaggtttggttcactactggatagacggcctgatacagtcccacctaagttcagattaccaaagagataatgccaaccatctggtccttgtctggcattttttaatgctggaataaatgctgtcagaattttatctacagctttgtaatcaatcagagcatcaagaatttccagaatactggtatcttgagtatggttcttcaaagacttgagtatgccactaccagtagcaggtagtttacttgcagtcagacccagtacaggtaaccccagaaactcaaaaagtagcttctgtaattgaatacctgagtttggattaaactgctctttagcatcagctaaagtcactcgtttcttcttcagaatctggttctgtttttctacccattcttcattaagaagacgggtaaaatctttgattactttactgtcagcaattgtttttaacgcattgttatagtcttgggttaatgcctcttctacctccaatactgtcctcatattgataggcataccagttaactgcatttgaataatatcttcacatgcaggtttaaagatgtttgtataaacatctaactgttggtcattaaccagagtatcccaatgcttttcatagacataccaggtacataatccatccactaagttgtattccaacaactctgctaatgggattctggtaatgtcattgatttcttcttgagcatagttaccagcatattcctgagcctggtctttaagacttagcttattaccggcacaagagttagtagccagataggtaattaacttagtgcaatcccagtttcttagcatgatactcatgccatgcaacaacccttccgtatccagaaggtctgtcataaataactggtaaatgagtgcgtatacgtcaaaggcaatattgtgatacatctgcctgttcagatacttaataaaaaagtccctgagcatagaacgaacaagcatgttgtgaacttgtctaccataaggagcttcagtagccccctcaattggttcataatccacagggaatgcaatcccttcgtgcttgttccagcagaatgtaatagtgcctataccacagtcataatgcttcagactgaaggtttctatatctactgctaatggaacatccatctccagtaacttatctaaccacttagatatagcttctggagctaatgtgtaatcagcatactggatgatcttagttcctggctcaacataaggaccagagacataagcactcagagcctgcat

SEQ ID NO: 23291 - DNA, 2703 bp, Homo sapiens
  SIMILAR (453)..(73): 1001254mologous to Homo sapiens SMAP-2b,accession number AB014737,Smith-Waterman Score=716.
ttagaaatctctgggatgagcatccacagtgaagatggacgcatagtcatgttcagaccacagagaggaaattcccgggcaccggggcgtcttgtgggccacggcagtgccgctgatgggcctcccgttgggcgtgacgcaccagcagtatcccgtgtagctgtgacactggacctgactgtaggtgccgtcgtcattgcactcaggaatgaacacttgctgaaactccttccgggcttgctcctgggtatacttcctttcggccacacacctggacacgtctttgcagtttcctcgatatgcaatctctagctggggatctttgcacttggcacgttgaaattcacaacgggaaaggaaggtccttccgtcagatgcgcagagaggtttctggggcgaacccgcacagtccaagctacaatccttgtctttatcttgatccactctcaaaaacagaaatccaggcggggtcctcagagctcctgacaggtacttgaggatctcagcagcctcgttctcgcagcacacagctggctggggcagcacagctttgcactcctcggggggtagagaagcttgtgcacccacatggccttggagtccagcagtgtctggccagagctgcagctcagtgaagagtgttgtcttcagagccacattcgcgtagccacccggggtccggagatgggctttttgagaaccagagaaatgagccagtgcaggatgttctagttgacggtcaatttccatatttccccatttcttacacagatgagcatattgcttactgaataaagtagaggacatataacgactgacaataacatcaggcactaaattggtgtaaggcaaataactatttacttcaaaacggtgaggactatattctttaatagccttcccaatatattcaatagcatttggaagacgagctttaatatctgcttccattttatctactaaagctacagccaaatttacgataccgtcttcggtcattttttgagatgacagtgtttcacggctaggtgctacagcatgtaatacaatggctcgaatatatgaatcaatttctaaaatatcttctgactgaagctgaattttaacttcaagcccggattcttcaagtagtacgcgtgcagcattcccactcttatagaatggtaaagcttcaagcaaatctgcatgagtaacttcagtaccaacagatgcaatatacttggctaatttaacgtaggctttttcacgattgaggatagtctggaatgcaacaccagactcttccaccagaagaattgcttgcttcagatgttccatctctaccatgatactgttatcaacaaatgcaaatgcacctgccaatttcagtgccttaaaatagcgatgttccagttctgctttacgaatctcttcgtggtcagctaaagctgctgcttgtttttcacactgaatcttgtagtcgattagtgcaataccaacatcatcttcaactgtcattttccaaccaaacttggatgcatctgcaaggctatgaaagtggttagcccacttattcacaacagcattgttatcctgcttaatcagattacgatagatttcttcagcactctggctcagatatgcacgtttatctgcctgacctacagcaaacagacaacgacgagaatagccagtatcaaggaagtcatagaagagttcctcagtctggctcccattgagaagtttgctcggtgtaccaaacagaagaaggttagctggagttttaccatcaacttcctcactacgaatactttcagcagtattcttagtaagtttctgtttaatcttgccttggtcgtacaactcaaggaacacagttaatacatcagcattagcgagaaggtttgaaccaatctcatcaatctgtaagttaatagcaccacatccagctaataagagtttatgacgtaactgtttcacagcaggaggtgtacctgagtcaaacgtaaatggataagcaccagtacgtctgtattcagcttccaccttgtcaaactcttccttctggtcagtagcattacgagcagaacgttcgttagcaattttccacagacggtcttctgctaaagcaggcatggtgtcttccataaaccgcttcttaaagccagccataaaaccgtcttcaacaatgttgaccgaatggcctttaccgaagcctgaagtagcaagagccactgcatagatgtttactggaatttcaccacggtctttagtgatgatagttgcacccatacatgaagccattttcgcaaggaaataggccacttcaggaacatgaagaatagtgcctttgcctttctctgccatgaacttccgagcctcaaagagagtagggaagtttttggtagaacgagcaccaggttgctttgccttctctgggtcagcaaagtatttaaacactgggtcagaacgccataactcttcatcagtacattctggaatctcgctttcaggagcatcccagtacttatcaatgagagccagcttggctttaatccattcttcagtcgcttcataagacatcaatggaatgtctttatgcagcacacgatgctttggatagttttcttgagatgtagctaatgctttcatccagtcagtgaagatgtagttaatacgaatcccatcttcggtaatcttgtcgtcatgtaaccaacgatacat

SEQ ID NO: 23292 - DNA, 2271 bp, Homo sapiens
  SIMILAR (1)..(276): 641254mologous to Yersinia pestis putative lipoprotein,accession number AL117211,Smith-Waterman Score=327.
atggaaccagtggggattgatattattgctatctcctggattggtgctcctgaataccctgataacgttaaacgtgccattaatgccaaagtagaagctactcagaaaactctgcaacgtgagcaagagattcagcaacgtgtggctgaagctaatatggaacgtgaacaagctaagggtgtagcagatgctattcgtttacgtggtgaagcactcaccgagaacccaaatgtaatgcaactggaagccattaataagtggaatggattggttccatttatcacttcatctcctggtatgggtaaatctgcaattgttcgtcagattgcagaagattttggcctgaaactgattgaccatcgtctgtctacttcagcaccagaagacctgtcaggtctgcctcgttttaaagaaaatggtcgtgctgaatttgctccatttgatgagctattcccattggaaggggatgctgtacctgaaggatttaatggctggcttctctttctcgatgagtttaactccgctcgtaaagagattcaggctgctgcttataaattggtactcgaccgtatgactggtcagaagaagctacatccttatgtagctatcgtatgtgctggtaacaaagcaactgaccgtgccattactaataacctgtctacagctatgcaatcacgtcttattcatctggaaatggagactgattttgatgtcttcatggaagatgtagccatccctaataagtgggatgagcgtgtaattgcattcttgaatgctaacccaaataaactgaatgattttgaaccagaccatcaagagaagactttctgttgttctcgtacatgggagttcgttaacaagattgtttccattctcccaccaggaccaattaatagtgaaatgactctactgttagcaggcactatcacttctggtgtagcaacatcattcgtccagtttactcaggtctatagcaacatggtgtctttgaatgagattttggataatcctaagaaagctcgtatgcctgaagacaataacctgttgtgggctgtagtcacttcactgattaacaatactgacgaagataatcattcgaaaatctttgattacgttgaacgtatgccatttacgttcaaggttttgtactaccgttccaggaaaactgatatgtccatgacagatgctcaattaacccgtgaatatgacagatgtcaggctaaagcctttatgggcaaaactgctgcattctttggttcactgttatgttctctgaagttccgttgggtaaaagatggctgtgatacagcacaaaccgatggtgagcatctcgaatggaatcctgattggtttgaaagtctattacctgaatctcgtgtaacagtacttatgcatgaactatggcatgttggcttactgcattctgttcgtatgggttctcgtgacccagaagtatggaattatgcctgcgatatttatatcaacaatcagcttattcaggatggctacagctttataggaatcgaaaattgctggaaagaccctaagtatgctggttgggctgaagaacaaatctatcatgacctcatgagcaaacacccacgtcctcctaaagcatcaggtgcttttgggactggctcaggtggtgacatgaaaccttccacttcgaaggctagtctgaaactatctggtggctctttgcctggggtattacctggaaaaatggaagaagttattactcaattcctgaaaccagtagtaccgtggcaggttttacttgaacgcttcttcaatgacctgcaagaaacttactactcatggcaacggcctaatcgtagataccctgatatgtacctaccatcttctatggatgatgactgtagactggaacatctggcttattttctcgatacatctggcttcattaaacctaaagatgctttacgctttagctctgaagtggcctatgtaaaagagaaatatcagcctcagaagatgactctagttcagttcactacagagattgtagatgaacaagtcattgaagatggtgataagtttactgatgtcactatcaaaggacggggtggtactagtctggttcctgtacgtgagtggattattaagcataagcctactgctgccattatctttactgacttagaagtcagaccgatggagccattgccatttgacattcctgtcatatgggtagttattcgtaaccctggtgcacaagttccatttgggaaagttattaacattacatga

SEQ ID NO: 23293 - DNA, 4890 bp, Homo sapiens
  SIMILAR (2451)..(1615): 231254mologous to Staphylococcus simulans lysostaphin,accession number U66883,Smith-Waterman Score=141.
tcatgtgcaggcaatgttgagaacagggttagatctgctgccaggacctgcaataccacgagcaccagaaccatagatggtaatagtcagcgggttcttagcaataccacgtttaagttctaaagcaccattctcaccaagattaatatccggtaggaacaaatccatcagagaaagaagactgtctatctgggactgaataggcatattagaagcatagttactacgtaacttacccaacgattccatcaaagcattagtggatgcttgatataaatcattattgtcagcagtagaacgatgctcattcatggtcttatttggagaaccaatgaacaagccccctttggcaatattacgaatccagtcaggagtaaacaggccacctgtcattagcatcatggcattgattggaccattagtaacaccatctgcttctacatacagtggggttacaaatgcagatttatcctctgctactaagtaacgggaatactccataagagccatcaatgctacgaatgacttcctatctcctaatgctgtattcagaacatcaactgcattttctggtaaggaaccagtggtattaaactcaaccatcatatcaatggctggtttcagattaccttccagtaatttagtcaactcgtcagacataacctcacgagtcatagtatggactttaatgtccaatgcctgagccagacctaactggaatgcagagaagtcttcattgttctggttcgataaatccaaagtagctttagtaggtaggatagcctcacgaaccagtttggctgattgaggattgtatttacctaacatctgcatacgaccaacacgggtcatattgtatgcatagtgaataggcacagtagagatgtcttcactctgtgctcttacctgctcaatgacggagaacagttggttgtaagagtcctctactgaacggttcttaccttccagagatttagcatgattatcattaagtaactctttattcagagtaccagcacccatcagttcgagaatacggtctttacctaacgtctcatagaattgaaccattggagtgtgtacatagaactctgtagcctgttctgctttcaatgcagccttctgttctggagtattacgaacagcagggttacgaagctgagtattagctacaggaggaatgtcatcaccaaagaacatcttctctgtaggatttactaaaacagcttcaatcgtcttcttattatctgggtcaatttctgacatatccccgatgttctctacaacatcagtagactctacaaatgcagccagaatttcagcagccattgctgtagggatacatttggtataacccaatggagcatttggattacgagataatccccagtaagactcaattttctgagccagggaactaactgcttcagtgagtgtcataccagtatcaaattgctctactaaaccttctggcagcagggcttggtcaataccagtaatagcagcaacatcttttgcatctttgatagcagtattgctggtagcagtaagtctccactgaagacccgctaatacagcagtctgtagcaattgctcattgtacttaaaggtatccccatcctgttcaacgatgttaagtaacttaccgcctacccaacggttggcttctgtaccctgagcaaaacgtttaccaacatccttagtgttaaggaacttagccagacgggaacgaagaatatcagcaataccttccccatgttccatgagttctttatatcgcttaataacttccccattaaaagcaggattagcaacttctttctcagtaaagagttcataacgagcacgagaagacagagcttgagctacctcttttagaggtgcttctgaaccaacagtacgggatttctgttcttccggtaaggtaaaggacaatttgaaatagttcttaataccctctgctttagaatcagcagtacctaccaatgaggggtaaacagcatcgataccttctcttaattcttctgtaactgtgctttcttttgcagaagtttcagtttctttaacagattcagtaggttgcttgatggtgtcctcattagtaaggttaacatcccgtttttcagactggctcacaggttcttttatagcctgtggtctagactctttagtagtaggttctgttttaacaggttcactaacaggagtcttagtctgtacagtagatgtaactggttcctgttttgtaacaggagtttctttaacctgattcacggagtcagctttctgttgagaaaaagcaacgtctcgattgccttgacggaatgccttgaccacctcagcagcaggggcgttaagacgtgaatccaatggagtaacttttatatgactgaccttcagttccgggtaagccgaagcgagggcattagcaatatccgctaccgttttcgcttcaagagcaacttgctgggcaaatttaaccgacttagtgtcatagggattgacccccaatccggtacggctacgaacccattctctgtcagcagtaagagcttggtagtggacagacttattcttatccgcattccccgtaacaagatgctcattcaacgctccaaccttattctgcatgtgcttggcgaactgggacgtgctcagtctgctctgtttcagaatctgaatgaccgttttggtcaagtggtagatgtacgggatattgtattcctgaacgtcagctacttgggtcatatgagccagcctgactttcagcaaaatctggtaacttaagatactgctgcgaagaaagctcaactgataggtaccaaaccgtttgggtgttatgcctattgctgatgcaatgagcaaagcagaacaagttgatgtagtacgtgccgatggaacgagtgcagcattcccactcttatagaatggtaaagcttcaagcaaatctgcatgagtaacttcagtaccaacagatgcaatatacttggctaatttaacgtaggctttttcacgattgaggatagtctggaatgcaacaccagactcttccaccagaagaattgcttgcttcagatgttccatctctaccatgatactgttatcaacaaatgcaaatgcacctgccaatttcagtgccttaaaatagcgatgttccagttctgctttacgaatctcttcgtggtcagctaaagctgctgcttgtttttcacactgaatcttgtagtcgattagtgcaataccaacatcatcttcaactgtcattttccaaccaaacttggatgcatctgcaaggctatgaaagtggttagcccacttattcacaacagcattgttatcctgcttaatcagattacgatagatttcttcagcactctggctcagatatgcacgtttatctgcctgacctacagcaaacagacaacgacgagaatagccagtatcaaggaagtcatagaagagttcctcagtctggctcccattgagaagtttgctcggtgtaccaaacagaagaaggttagctggagttttaccatcaacttcctcactacgaatactttcagcagtattcttagtaagtttctgtttaatcttgccttggtcgtacaactcaaggaacacagttaatacatcagcattagcgagaaggtttgaaccaatctcatcaatctgtaagttaatagcaccacatccagctaataagagtttatgacgtaactgtttcacagcaggaggtgtacctgagtcaaacgtaaatggataagcaccagtacgtctgtattcagcttccaccttgtcaaactcttccttctggtcagtagcattacgagcagaacgttcgttagcaattttccacagacggtcttctgctaaagcaggcatggtgtcttccataaaccgcttcttaaagccagccataaaaccgtcttcaacaatgttgaccgaatggcctttaccgaagcctgaagtagcaagagccactgcatagatgtttactggaatttcaccacggtctttagtgatgatagttgcacccatacatgaagccattttcgcaaggaaataggccacttctacacggaaaaaaccacggtcagtgttttgcgtcttgttacataacacatcaacgatttcttcaatcgccggatgatgtgagactccggtcaggtcaatcatgggaaatatctcaggaacatgaagaatagtgcctttgcctttctctgccatgaacttccgagcctcaaagagagtagggaagtttttggtagaacgagcaccaggttgctttgccttctctgggtcagcaaagtatttaaacactgggtcagaacgccataactcttcatcagtacattctggaatctcgctttcaggagcatcccagtacttatcaatgagagccagcttggctttaatccattcttcagtcgcttcataagacatcaatggaatgtctttatgcagcacacgatgctttggatagttttcttgagatgtagctaatgctttcatccagtcagtgaagatgtagttaatacgaatcacatcttcggtaatcttgtcgtcatgtaaccaacgatacattgacccctgaagtctatgttcttcatcacgtccaccctttacccatgtgtaagtggaggtggattttacatcctgaagaagaccttcagtaacaatgtcgaacttgcccccaatagtccaaccagcaatctttttagttgctcgttgttctatccatacaggaattaagtttggatttgatgcaatctgctcaggggtagggttgatgacaacattctgaacgacacgctcaggataccccatagaagtggacaccaaatccatgatgtccatactttctacagaaaggtccacacgatgcttcat

SEQ ID NO: 23294 - DNA, 9630 bp, Homo sapiens
  SIMILAR (4366)..(4830): 261254mologous to coliphage T4 rIIB,accession number X04376,Smith-Waterman Score=156.
  misc_feature (1)...(9630): n = a,t,c or g
atgttgaactataacgctcctattgacggtcagaaatctagtattgatggtgctaactctgaccagatgcaaaccttcttctggctgaagaaagcaatcatcactgcccgtaaagagcagtacttcatgccactggcctctgtaactaacatgccgaagcattacggtaagaccatcaaggtatatgaatatgttcctctgctggatgaccgtaacatcaatgaccagggtattgatgcaagtggtgctactattgttaacggtaacctgtatggttccagcaaagacatcggtaacattacttccaaactgcctctactgactgaaaacggtggtcgagttaaccgtgttggttttactcgtattgctcgtgaaggttctattcacaagtttggcttcttctatgagttcactcaggaatctattgacttcgattctgatgatggcctgatggaacacctgtcccgtgaactgatgaatggtgctactcagattactgaagctgtactgcaaaaagacctgctggctgctgctggtactgttctgtatgctggtgctgctacttctgatgccaccatcactggtgaaggttctactccgtctatcgtttcttataagaacctgatgcgtcttgaccagattctgacagagaaccgtactcctactcagactaccattatcactggttcccgtatgattgatactaaagtcatcggtgctactcgtgttatgtatgtaggttctgaactggttccagaactgaaagcaatgaaagacctgttctgtaataaagcctttatcgaaactcagcactatgctgatgcacgtactatcatgaatggtgaagtcggttctattgataagttccgtatcattcaggttccagaaatgctgcactgggcaggtgctggtgcacaggctactgtagctaaccctggttaccgtacctctatggtatctggccaagagcactatgacgtttacccaatgctggtagtaggtgatgattcctttacctccattggcttccagactgacggatatatacacatgagcattaacgataaaccgaccgctgatttaactcagggcaacgatgacaccgttgatgaagttaaggttgatgaactttctctgctgaaacaacgagctaatatgatgggtatttcatactcaaataatattagtgctgaaactcttcgtaagaagattgaagcagctcaggaaccagtagaacctcagcctaatcctctggctctgtctacaggtacagtaactacggcaacttctttacgtcaccagcaacgcttagaacaattaaagctggttcgagtacgtattcagaaccttgaccctaagaagaaagacctgcctggtgagattattacagtagctaacgaatatattggtactgttcgtaaattcgttccatttggtgaagctactgatgagggctatcacatcccttactgtatttataacttcctcaaagaacgtaagttcctgaacattcgagttaccaaaggtaagaatggtcagcctaatattacgtctgcatgggtacgtgagtttgccattgaagttctgcctccactgactaaggaagaattacaaactctggctgctgctcagattgctgctggtgaggattttacgcttcctgacatcgacatgtctggcagtgagtatgatattcctggtggcattaatagccctatctatgcagagatagagaagataaccacagaacaactaactactcgtgaggttgggggttctggtgtatttgacgctttaatgcaatcagcaagcaatcatctactggcagaatttaagaataaccgaattactggtggtgattacgttaaggcatacattgctactatggaagcataccaggcttattggaatgctgttactgctcaggtagctgcaattactgctcgtgctaatcttggtattatcaaagctaactttgttacagctaagattcaggctctggctactaaagctgaatatgcccttactaagctgaagctgtctaatgagtcagtaacttactgtactgctcaatacaatctatcctctatgcttcctcaacaattactgatgttgaagaaccagaccactcaggttgctgaacagactaagttaactactgaacaaatcaatatgacgaaagagcagaaggaagcacaacgtgctcagacttctgatactcgtactgatggtactcgtgtagctggttctgtaggtaaacagaaagaactctatgaccaacagattacgtcttataaacgtgatgctgaagttaaagctgccaaactgtttactgatgcatgggtcactcagaaaaccattgatgagggtctgtctcctcctaatggcttcactaacaccagtctggatagcattcttactgcattgaagaataacaacgcattgggattccctggttgggctgcaactaactatgacccttcaattggtattgcttatgggaacttgtcaatactgtctcagatagaccctgaagtagttaaatggcaagttcctcaaaaagcaggttatgaggtacaggttcagagcagtaggattggatttggtgattttgaggaatgggctgataaattcctctatgagaattatccagaccgtattactggagagtttgaaatagacatcatggatgatgacaggattgtactcactgctactgatggtaaaggtgaagcagaggctatgactaatctgctcactaaagcaggatacgaagtcattaatatggctgaatatcatgagtgggattgtatagctcgcagacgtaaagaggaacaagaggctaaattagccatttccaaattacaagctaagaaggctactaataagaaaaaggttagtcctaatcgtcttattagtatgaatatccttgaaataccaaaagagcatcgtagctattcaagtgaggtatgtggttctcactacgcttctcgttctcatgaccgaatggttgatgtagatactccccagtattacatcatgcaggaagatattaataactacacaggaaggcttggtgttctttctatgtggcaattaacccctgctaccattaaagctgtaactgttgtttgtcgtaataaaattgaacgtaataaagctattaagcgaggtgctgttcatttggatgaatggactgctccgtatattgcttcagttcttacatccaaacaattcattaagtatgtcactaaagaacgtcagaaaacgttaagtgatattggtatttactccaaacacctcagattactgagagaactggatattacatatgccccattgaaaggtctgcgttatgacccagaactggagaatgcttatctcttcttacaaagtagtagctatcctaagctacgtgcattgttagggaagggtctgattactgaagaagagtatcacttcctcagtgatgttgatgtgcattgcaagactttcaacagtcgtaacctcaccttatggcaaccagatgggtctactatggtcatcccccaaggggatgcccgtgtaccacgtattgttgctgaagcaaaagaaaagaatcttaccccaggtaagattatcgaagtggatgtcactatcgaagctcagattcgtcaggagtttctggacgctgaacgtgatacaggtggctttgttaaattcttccgtattaccaagaagaagctacaagagttcttcttaggagaagaggaagaacaagtccctcatgtatcacctgtagagttaggtgctaaacccactgctttcaatgcttttattgctaatgctgtgggcaaaactcttgctgtacaacatgcatcattaaaagcacctgaaccagaaatgacagttactcatgagcgtttttacggtaactatgctgtatggattacagatgtagacccacggaatcatcgtattgaggttattcatgttatccgtgaaatctcaggaagaaccagtgaatatgtcaataacctgctggctcaaccaaccccattcaaagtatttgattggctcacagagacgcaggctaaagagtttgtaagacgtctgaataacactcagggtgttatctctgtctataacaaactggaagacggtattcctgttaaggttgctgtaaaggccacagagccaaccaataaggaaaagctggaagctgcatcaactaagctgaaagctatgggtgctgtcgctactgatgcttatgagtttcatactgacttgaatgagaatgaagagactattgtagctgtagtgaatgataaggtggttcctgacgttcagaacctacaccgtcacatccgtcaatctgcaaacctgaaagactataaaggctttactaagttccttgaacgtctgtctactgtaattgataaacgtcgccactctgttgaagacctgatgaagtttatggaaaaaggtgacctgcccattgcagatgatggctccattgttatcttcaaacgtctggaaagcaaagacaatcctgaacatctcaaagacgtaatggatgatgtatttgttgattgccattctaagaagattgagcaatgcgttggtatgcgtgtaatggttaaagaaaaccttgtagaccagaaccgtcgtaaagactgttctcatggtctgcacgtagcttctctgcaatacattcgtaatttctcaggcaacgtaaccattattggtaaagttgctccagaggatgtatttgcagtaccagaatacgatgttactaagatgcgtgtatctgcttatcacatcattaccaagctacctgatgctattcgtgaccatgttaatantggcaatccaatctccaccattgagggtggtacggaaatcctgaacatggttctcagtggtattcaccctgaaccttcccgtcaggtactagttggtggtcattatggaaccaatctgacttattcagaactcactcgtaattatctggatgatgatgaagacagcgttattccagatgaaccagtaattaagaaaactgccttgaatatggaagagagctttacggcaactaatcctaaagctgaaccagtgaaggcaacggatgttaaacctattaagaagactaagatggaaattcttaaagacctttggaaccagttcctgaaagcagagacttctaatgaagctattacactggctgatgaaatcattgctgctaagggcaaatgtaagaaatcatgggcttctttaggcttcagtggtgacatggatcagaaactgattgatgctcgtgctaataaacctaagccagaaaaagcagtcaaacaggataaaaccgttgcacctaagaaaactacagtcactcgtagtcggaatgctgatgttattcgtagttatctaaatgacaaaggtatgtctgattactgtaaagctcatgccattcacgatgtgaaacgtgctgctaagaaatcttatgctgcactgggtctgactcctgaagaatgcagccaaattgataaactgaagcatcacctgaagatacatactatggccaaagtttatcgtgctaaccgtaaagcccatgatgacgatattattcgtatgaatgcagtcggtttatcattgggaaccattgctaaaacactgggtgttcaccccactacagttaccttacgattacgctctcttggtattgaaccagccgacacacgtcgaacatttatggagaacgtactagcaccattacctactcacgtagctgattggttatcagaacaagtaggaccaaaatatgagattcgacaatacgttcgagacttattactggaagcctacaataatcgtcataatcataaggaaactgctcatgaacgattcctcaaaagatacgttgaagtagttgagatgctggaagaattggctccaaattctgaagaagcatacgatacacttcataatgccattgcagctttaactgaattgtcagaattaatgaagtcctctgataaagaagtttatgcacctaacagcaatcgcttagctattctggatgcactggcagaccagattgttacagcaactggcatcggtactttcttgggtatgaacgtacccggagcactcactgaagtgaaccgttctaattattcaaaatttgaagacggtgagcctgttttcaatgagaataagaaagtaatgaaaggtgctgtaggtatgaaccttgcccgtgaaacagtggaagaaggtgttcagggtgctacaggccaactggctcagaatattgcacagcaacaaaacattgataagaaccaagacctgcttaaaggtgtcggtacacaagctggtttaggtgctctttatggctttggttctgctggtgttgtacaggctccggctggtgctgctcgtttagcaggtgctgcaactgctcctgtattgcgtaccacaatggctggtgttaaagctgctggtagtgtagcaggtaaggttgtttcccctattaagaacactttggtagctcgtggtgagcgggttatgaagcagaatgaagaagcatctcctgttgctgatgactatgttgcacaggcagcacaagaagctatggctcaagcaccagaagcagaagttactattcgtgatgctgttgaagcaactgatgctactccggaacagaaagttgcagcacaccagtatgtttctgacttaatgaatgctactcgttttaatcctgaaaattatcaggaagcaccagagcatattcgtaatgctgtagctggttctactgaccaagtacaggttattcaaaagttagcagacctagttaacacattagatgaatctaatcctcaagcactgatggaagctgcatcttatatgtatgatgctgtttcagagtttgagcaattcattaaccgtgaccctgctgcactggatagtattcctaaagattctccggctattgagttactcaatcgttatacaaatctgacagctaatattcagaacacaccaaaagtaattggtgcactgaatgttattaatcgaatgattaatgaatctgcccagaatggttctttggatgtgactgaagaatccagtccacaggaaatgcagaacgtagcattagctgctgaagtagctcctgaaaagctcaatccagaatctgtaaatgttcgtcttaaacatgctgctgatggccatagcattgaacggttatctgaaactgttattgagaaggcagataaggtaattgctaatccttctaatgtagctgctaaaggtgttgctcatctggctaaactgactgctgctattgcatctgaaaaacaaggtgaaatagtggctcagggtgttatgactgctatgaaccagggtaaagtatggcaacctttccatgacttagttaatgacattgttggccgtactaagactaatgccaatgtctatgacttaatcaaattggttaagagccagatttctcaagaccgtcaacaattccgtgagcatttacctacagtcattgctggtaagttttcccgtaaactgactgataccgagtggtctgcaatgcatactggtttaggtaaaacagatttagctgttctacgtgaaactatgagcatggctgaaattagagatttactctcttcacctaagaaagtgaaagatgaaatctctactctggaaaaagagattcagaaccaagcaggtagaaactggaatctggttcagaagaaatctaagcaactggctcaatacatgattacaggggaggtaggtaataacctccttcgtaatgcccatgctattagtcgtttattaggtgaacgtattactaatggtcctgtggcagatgtagctgctattgataagctcattactttgtactctctggaattgatgaataagtctgaccgtggccttttgtcagaattggctcaatcagaagtggagggtatggagttctccattgcttatatggtgggtcaacgtactgaagagatgcgtaaagctaaaggtgataaccgtactttgctgaatcactttaagggctatatccctgtagagaaccagcaaggtgtgaatttgattattgctgacgataaagagtttgctaagttaaatagccaatcttttactcgtattggtacttatcagggaagcactggtttacgtactggttctaaaggttattacttcagcccagtagctgcccgtgccccatactctcaaggtattcttcagaacgttcgtaatactgctggtggtgtggatattggtacaggctttacgttaggtactatggttgctggtcgtattactgacaaaccaaccgtagagcgtattaccaaagctctggctaaaggtgaacgtggacgtgaaccgctgatgccaatttataacagcaaaggtcaggtagttgcttatgagcaatccgtcgaccctaatatgttgaagcatctaaaccaagacaatcactttgctaagatggtgggtgtatggcgtggtcgtcaggtggaagaggctaaagcacaacgttttaatgacattctcattgagcaattacatgctatgtatgagaaagacattaaagactccagtgctaataaatctcaatatgtaaacctgttaggtaaaattgatgacccagtactggctgatgcaattaacctgatgaacattgagactcgccataaggccgaagaactctttggtaaagatgagttatgggttcgtagggatatgctgaatgatgcacttggctatcgtgctgcatctattggtgatgtatggactggtaactctcgttggtcacctagcacccttgatactgttaagaagatgttcctcggtgcatttggtaataaggcatatcatgtagtaatgaatgctgaaaataccattcagaacttggtgaaggatgctaagacagtaattgttgttaaatctgttgtagtaccggcagttaacttccttgctaacatctaccagatgattggacgtggtgttcctgttaaggatattgctgtgaatattcctcgtgagttctcttctattgctgatgctggtattagtcgtgatgacctgttagtagctgaatgtaagattcatgagtacatggaaaaacttgctaataaacttccagaaaaagtacttaatgctggccgttatgctcttattgctaaggacactgctctgctccagggtatccagaaaacagtagagtattcggacttcattgctaaagccatcatctatgatgatttagtgaaacgtaagaagaaatcctcttctgaagcattaggtcaagtaactgaagagtttgttaactatgacagattgcctggtcgtttccgtggttatatggaaagcatgggtctgatgtggttctacaactttaagattcgttccattcaagttgctatgagcatgattagaaacaacccagtacattctctgattgctacagtagtacctgctcctgccatgtttggtaatgtaggtctgccaattcaggacaacatgttaaccatgctggctgaaggaagactggattattcattaggcttcggacaaggactaagagcaccaaccctcaatccttggttcaaccttacccactaa

SEQ ID NO: 23295 - DNA, 6819 bp, Homo sapiens
  SIMILAR (2347)..(2871): 331254mologous to coliphage T4 rIIA,accession number X52686,Smith-Waterman Score=228.
atggatgatgacaggattgtactcactgctactgatggtagtgagttatccttttatccagagaattacagtcaggatgcaatgtatctgtatgtgaactattactacatacagcctactagtgttgcagacccagtggttcatcctgctgtatctgtaccatctgctgatgacttaccttctacttctgaatggactcaggtatctcagaaccatactcctaagtcagctaccctgaagacagttactcatattaagagtgtattctctgatggcagacctgatgaggaaagtaccaatactgaagaagaacaggttagttggactaacttctcagatgtttacgagaaagaatttcgtgaaccaagtgaagtaggcttaatcattattcgtaagactacaatgacccaggtacagactggtactgtatctactggttccactacaaacactgaagttattgatttaggtggtggggttactgaaaccagaactactacagtaactacagatactttaggttatacatggtcttatcagaatacagatgtagttactactatgtctgctggtggtatgcctcaattgtttatttataaacagaacagtggtaatgccatccttgatgctctgtttattaataagacgaccaataacagattctattcattcatccctatccgtagtgataagaactggatttctggttctacatatactctttgtaagaaagcctttaagaaggctacaggggaaggctttgctcaggctaacagagactttgatgcttatcaggaatggtgggaatctcgcagtggtaatagggatattcccatagggaagcctcctaaaagacccgtatatccaacaataccttctaaatccattaatattcgttctaacggtggataccgttacaacatgactattagttggaacttcattgaagaatcagttagttcaggtaaagcattctctggagccaagaaagggcagctcaagtttgcttatgaaggtactgtagtccttatgcagaaagccgttatgtactctgaaaagggtaatgacaaagttgggtttactatctacaggctagataagataacaatgtattggcagaatggggataattcatggaggaagatttctgtctatggcctgaaccataacaataatgtttacaagaataaatctgtaagcatttctggtgtagatgcactaaatgatgatgaagagtccggatttatcatccctcttcataacaacatttatcgtagtatgtctttggtaaatggtactcagttatctactgcatgttgttatctggttcttaactcatataagaaagttaagaagaaatggtatcagtctggcatttttaaagtagtagtggttgttgttgcagtagtagtgtctgtgttctttactcctgctgctggtgctggggtaatgggtactgctgcttctattggtgctgcattaggttttgcagggttagctgctattatcgttggggctgtggctaatgccattgcagctatgattctgatgtccattattcaaacagtctctgttagtctgcttggggataagattggaatcattgttgctactattgcctctatggtagccatgaatgtcggcacagctttatccactggttcatccatgtctacgatgctgggtgaaatgatgaaagcagacaacatcattaaactcacttcatctgtaggaaatggcataagtgattacatcaatgcttctgctatggaaactgtcaaaaagacagagaaattatggcagagtactccttctactatcgaagaagacttgcgtttgttctctaaattggttgaaagtaagcctgttcacgcaagtcctactgaacatcaagcaactcctcagcatgtaatgagtaaaggcttaaatgagcctactgacccatctacatgggaaaatggcattagccacatggacagaaatttacgtttatactcaggaggccatatggctaaaccacgtaaattccgtattaaggataagcctgtaatgggtagtgctgctggtcagtcacatgagaaaggagacattgtttatgaatgccttcagtatgattacggcgttgctcatgatgacactcgtgctactgagctatctaaagaacgccaactatggctatctcctaataaaacaatgattcaggcagatctggcagaagtacaacgtatgctggatgaatggtctgaagaccaaatgttcattgatggcaatgcagaagcaataaccgatgacatggcctctgatatggctgtgtttgtattacaagcaatggctgaaaagcctgactctactgaactgaccacatcagcaacgttaggtgctcaagatgctatggccttcggtatttctgaagacccagcattcttccaaatactcagtgctaacctctattctaatcagaaactggcaatggtacgtgagacattgtgcaatagctgggatgctcatattgaggggaataaaacagatattcctatccatgtaaccattgataaagatggtttccttatcttccgtgactatggttctggtattcctaaagataagattcaagaggtctatggggtatatggtgcatctaccaagaaagctaatactgcttccactggtggctttggcttaggatgtaaatcccctatggcctatacagacagttttactgtcacatctatgtgtgacggaaccaagactgtctatcacattgctaaatcttctgttgagactaacggtaaaccagggattattcctattgttagcgtacctactgaagaatccgggcttgaagttaaaattcagcttcagtcagaagatattttagaaattgattcatatattcgagccattgtattacatggtgagattaaatgtatttactgcaatcagtatacaggaccaaatacagtagaattactgcctgtactgggtatgtcttttgaaccaggtagctataacctagaccatagcacatggcataaatattacatgggcagtcattcaatatttatccgttatggtaatgttatgtaccctgctttggatacccctgctacacatgaagcattaaaactggttaaacagtttatgcaggttattaactgtagccgtatcgttgttcaagctgccccatcatcactagctgtagcacctagccgtgaaacactgtcatctcaaaaaatgaccgaagacggtatcgtaaatttggctgtagctttagtagataaaatggaagcagatattaaagctcgtcttccaaatgctattgaatatattgggaaggctattaaagaatatagtcctcaccgttttgaagtaaatactatgcaatcacgtcttattcatctggaaatggagactgattttgatgtcttcatggaagatgtagccatccctaataagtgggatgagcgtgtaattgcattcctgaatgctaacccaaataaactgaatgattttgaaccagaccatcaagagaagactttctgttgttctcgtacatgggagttcgttaacaagattgtttccattctcccaccaggaccaattaatagtgaaatgactctactgttagcaggcactatcacttctggtgtagcaacatcattcgtccagtttactcaggtctatagcaacatggtgtctttgaatgagattttggataatcctaagaaagctcgtatgcctgaagacaataacctgttgtgggctgtagtcacttcactgattaacaatactgacgaagataatcattcgaaaatctttgattacgttgaacgtatgccatttacgttcaaggttttgtactaccgttccaggaaaactgatatgtccatgacagatgctcaattaacccgtgaatatgacagatgtcaggctaaagcctttatgggcaaaactgctgcattctttggttcactgttatgttctctgaagttccgttgggtaaaagatggctgtgatacagcacaaaccgatggtgagcatctcgaatggaatcctgattggtttgaaagtctattacctgaatctcgtgtaacagtacttatgcatgaactatggcatgttggcttactgcattctgttcgtatgggttctcgtgacccagaagtatggaattatgcctgcgatatttatatcaacaatcagcttattcaggatggctacagctttataggaatcgaaaattgctggaaagaccctaagtatgctggttgggctgaagaacaaatctatgatgacctcatgagcaaacagatacgtcctcctaaagcatcaggtgcttttgggactggttcaggtggtgacatgaaaccttccacttcgaaggctagtcaggtgaatattgtcaataatgtagtaagagccatgcaccaacagaaactatctggtggctctttgcctggggtattacctggaaaaatggaagaagttattactcaattcctgaaaccagtagtaccgtggcaggttttacttgaacgcttcttcaatgacctgcaagaaacttactactcatggcaacggcctaatcgtagataccctgatatgtacctaccatctcctatggatgatgacggtagactggaacatctggcttatttcctcgatacatctggctccattaaacctaaagatgctttacgctttagctctgaagtggcctatgtaaaagagaaatatcagcctcagaagatgactctagttcagttcactacagagattgtagatgaacaagtcattgaagatggtgataagtttactgatgtcactatcaaaggacggggtggtactagtctggttcctgtacgtgagtggattattaagcataagcctactgctgccattatctttactgacttagaagtcagaccgatggagccattgccatttgacattcctgtcatatgggtagttattcgtaaccctggtgcacaagttccatttgggaaaataatttgtaggaagactatgagcacactactgactaagaaagacattgtttctgcattgcctccccagtttaaaagcagtgttactgaccaactggtaaacatgattaacaatgtgacccaagaccagacagcagcagagcaaattagaaataactttgtgacttatgctggggtgatgaaggatggaaagtttaagacccaggattatcttaatgctgttcaatatgttacttacaaacacatggggtatagcaacaaagatgcttacttcaaaacattccccaacagacaagctgaattagtagcaaggggaaccagtgagaaggacatctctgcttatgtatctgcttaccataggggtaagttagtaaacctcattatggaacaatcactgattccagtatggattgtaaatcaggatttgtttcaggaagcattgaaccatcaggcatggctcatgaagaatgctaccagtgagaaggtacagtgtgatgctgccaactctatccttactcacctccagaaaccgaaggatgctgttactaatatcaatctggatttgagagaaaactctggattgactgaactcaagaacacactaacccagttggctgaagctcagaaagcagctattgaagctggtacacctactaaagagttggatgaatggctagaccaagtggactattccgttctgaatacccctacgtatataccaaccgaatttgcactgacctttgctaactttattaagctggttaatggtaaggagggggaatcaaacaaaacccctcctgttcacttaaagatgctggataagataaccagtaagaatcagtacattgctaacttatgtttccgtggtgcagcaaagacaactctgttcatggaatactttactttgttcttagcagtgtttgggcatctacctagcttgggtaaagtagaaggaatgatttatgtatctgactctatggataacggtgttaagtctgcccgtaagaacattgagtttcgatacaacaattcaccattcctgcaacaatggattcctaaagctaccttcacagataactaccttgagtttgtaaatgctgaaggtcaccgtcttggtgtgaagatgtttggtgctaagacaggtcttcgtggtactaagatttttggtaaacgtcctgttctttgtgtactggatgacttagttagtgatgatgatgctcgctcacgtacatcaatggaagccattaaagacacggtatataagggtgtgaaccatgctcttgacccaacaagacgtaaggttgaatctggtgcttgggatgtcaacgtatggcctgtatgtgagaaattcccatgtacgcgagaagaatttcaaggtgcttgggaagaccgtttctcctatgactacatcaatgaccaataccagatggcattgaagacagccagctgcaaattcctctctctcttttgcttcaatgcctgccagcgaggttcagatgattacctggcagcagaattcagccacctgcccatctttggctttggtgagcagagcgctgtacagctagtgagtctacctggcaccatgctagtactgggggtttctgctcagtcctgtgatatgaaccatctatgggtctctcaaccacggataccagtgcctgttccattggaggcggcagaaggtgcaatgaactccatgagggttcttagttttggtgatttaatgctctatttttgtgctggttggcctcctgccaagatgtggcgctttccagagagcatcagcagtagcagtgcagagggatcagca

SEQ ID NO: 23296 - DNA, 4446 bp, Homo sapiens
  SIMILAR (1347)..(925): 1001254mologous to Homo sapiens 3',5'-Cyclic nucleotide phosphodiesterase,accession number AB020593,Smith-Waterman Score= 743.
tcaaacttgaacggatgaggtgcttcttatgaatgagccaagaaagtttcttgagatgacatctacttctggtgaagatgctgtgaacatggttgaaatgtcagcaaaggatttagaatattccataaacttgtttgacaaagcaggggcagggtctgagaggactgactctaatgttgaaggaagttctactgcaggtgaaatgctatcaaacagcgtcataagctgcagagaaattttctgtgaaaggaagagtccattgatgtgacagacttcactctcgtcatattttaagaaactatgtgattgattattaaggtttagtgatccggtctggtacatctcttccaactgcttcctgtttccaaagtataaagcaaggtctgtggcaatgatggctttgcggatgatctcaagcacctgctcatattcactggagctcagagtggagaagatattgtgcccttccaactggaggatggacacagtctgggagaagtggtgctgctccatggtggaagtggagtagagagcggccagagggtggtcgaacttctgcaggtagctgttactgaagcccctgtggtccaggtcatgacacagacacgcaatcagcagtcctttgcgggcctggagataggcctttgctagagaaatgaaactgtcagtgcccatgtggcgtttaaggccacatgactggctgagctcaccaaggttgtagtttgaggttggaggagggtcaaggtctaagctctcaagtactcccaattccttggatctcgcaaggtgtgggtcactggtgacctggagcagggcattttctggggtgttaaggtcagaagcttgatcagagttgttttcagaaagaatgcgaggagaggattttgaaagagtcaatagggtaatgcttacatggggtttaaattcaatttctttgcagagacgcacgggaagggtgaattgcatgagaccttgccactcttctgaagtacaaatgctatggtaggacagcttttccatcgttacccggtaaatgcactctgagtggcgaattctatgatacatattagcacagtgtaaggctaaagcacaaaagacggcaaacattttgaagttgttttcatctgttttagagaaggcactgccactgattttgttgaccatctgcaccacacctatcacgctgcctcggctgacgatgggcatgcacaggatgttccgcgtggtgtagcctgtgtacaagtctacttctctgttaaagcgtgggtctgcataggcatctggaatgttcaggacttcccctgttcttgctacttggccagcaattcctttctcaattgaaaatctacctgggagcactagaaagtttttccaacatgatttccaaaaggaccgcctccggaagacggcatttccaggagtgacgctaaggcttcctaggcgcggtttctcgggcactgcctgcaatgtcattcccagaagtactaccttcaggaggcgggtccttatctctttggtcttcttgaagacaggttttccttccttttcctctccaatatcaaaaaggtctgaatataactccttgttcttatggtccacctggaaaagcgcacaacgatcggcattcaccaggttttttgcatatattgctgtgctggagggaagcatatcagtcgtgtattctgacaccaactgacacttctgttttagttggtaagcagctgctggcctaacttcccagtgcccttctgccatccaaggccctcttccagaacctctcaggccttccctggtgcctagatctgagcctctgtcagcactacgaccaccactcattctgattagttgaagttttgatacgtcgagtaggaagtcattcaattctgtctgtttggcaaggcctctgcatacctgcacctgatgtattgctactgaagcccaggcaagatttgctgttgcaacctcctggtgactaagacagaaggcttctttgccccagtgccgatacagctcgagaataccaatcaagtcaccaattgcagtgacaattggtaagcaaagaacagactggatacgagtccctgattccagtccagtacctcttggaaatcgttcatccttaaaagtggtgagacggaccaaggacggtcctgccaagggcttaccacacttaagactaatttcgggaagggatccgataccgccaagattcgctaaaaaaccaggtaccattccagaagggaagacgcgggccgtgtctttaaagacagcgataagttcgacgccaacgatccgatcctgaaagatcagacgcaagaatggtccggatctgcaacctttacatctgacggtaaaatccgtacattctacactgactattccggtaaacacttcatgtaatacaatggctcgaatatatgaatcaatttctaaaatatcttctggctgaagctgaattttaacttcgagcccggattcttcagtaggtacgctaacaataggaataatccctggtttaccgttagtctcaacagaagatttagcaatgtgatagacagtcttggttccgtcacacatagatgtgacagtaaaactgtctgtataggccataggggatttacatcctaagccaaagccaccagtggaagcagtattagctttcttggtagatgcaccatataccccatagacctcttgaatcttatccttaggaataccagaaccatagtcacggaagataaggaaaccatctttatcaatggttacatggataggaatatctgttttattcccctcaatatgagcatcccagctattgcacaatgtctcacgtaccattgccagtttctgattagaatagaggttagcactgagtatttggaagaatgctgggtcttcagaaataccgaaggccatagcatcttgagcacctaacgttgctgatgtggtcagttcagtagagtcaggcttttcagccattgcttgtaatacaaacacagccatatcagaggccatgtcatcggttattgcttctgcattgccatcaatgaacatttggtcttcagaccattcatcccgcatacgttgtacttctgccagatctgcctgaatcattgttttattaggagatagccctagttggcgttctttagatagctctgagtataaacgtaaatttctgtccatgtggctaatgccattttcccatgtagatgggtcagtaggctcatttaagcctttactcattacatgctgaggagttgcttgatgttcagtaggacttgcgtgaacaggcttactatcattctgctccagggctgcttttgtggctgtcacgagcatcctcagctcttccctggcgagatccatgtccgccgtcttcaccggcctctgccccagcgccttgagttgagccagaagagccttaacttttttcaagagatcaccaaatatcaaagaactgttacaaatatcttcaaagacttttccaaagacgtgcagtctgttgaactgctgggggctgcacgtgcaaattttctggagctccagttcccagaaggcgccctccttcatttcacccaaactgtccccattgaaggtgctaatgctctcggcacctggtacagtgctgcatcctgcctgctgcagctttctctcgtggcccgcggccgccttgctcccagtgaagtcattcttcaggagatcttgcttggcgagcacttccttctggaaacgcaggaacatcctgtacctgtctgcgctggtggctccggccaggtaggagctgacatagtggtgccggtccctggtgcctctggacccggcctcctggtagcacagcaccttcaagtcgggcagccggagttcttccctcctgcgccatccaggagggccccgtccaggagggcctcctttcttttcttccttcccctctctgacagcctccactggaaggaaatcctcctctgaagtgtgggaaagagaggcctgggggttcaggtacctgaacagcggggtgtcctgggcctcactggggaccagggccgtgtggatggtgaagtgggccagggcctccttcatcctcgccaccttccctgcgggcggctctcccacctcagaggcgcgctcccccttgggccggtgggcattgggccagtgctgtaagatcgtctccggaggctggtagagcttgttggggttcaggtgtccagagatgtagaggtagacgtcctcccggtggtctttctgaagccgattcagaagtttcttcagattacacagggtcttcactcctggcgtctcgcagtgcttcagattacacagggtcttcacgcctggcgtctcgcagtgcttccacttcaggtacactcttcctgcagcatccctacagagccaacccccagggcttttgaaccacagttgcctcctctgcaacatcagagtcat

SEQ ID NO: 23297 - DNA, 2189 bp, Homo sapiens
  SIMILAR (1223)..(1909): 301254mologous to Thermotoga maritima DNA-directed DNA polymerase I,accession number AE001805,Smith-Waterman Score=255.
tatgagaaaatcttgccgattatcgaatactatgcgggaacccatcttatcttttgaggtctgtatgcgttacattacattcaacaatgagggtatctaccctattgctatccttactacaacgttacgtaaggatgatattgtcaaagcatacatggaaccctgggatgtagataaagattcagtaatgattcttgaacttcatacagccccagggaaaaagaaaactcctgctaaagagatgcaggagtttattacccaagaattagtgccagcattcgaagcagcacaaactcagtatatcatctgtggtgattctgaatattacaaacagctaaccaaacaaggtaaagctgatgccaatattggctatgtaatggattgtgcttatgggaaccagaaagttatttacgttcccaattacagacaaatcttttatgacccagataagataaagactaagattgctttatccatgcaggctctgattgattatgtctctggttcttatgttgagccaggaactaagattatccattatgctgattacccattaactccagaagctatatctaagtggttagataagttactggagatggatgttccattagcagtagatatagaaaccttcagtctgaagcattatgactgtggtataggcactattacattctgctggaacaagcacgaagggattgcattccctgtggattatgaaccaattgagggggctactgaagctccttatggtagacaagttcacaacatgcttgttcgttctatgctcagggacttttttattaagtatctgaacaggcagatgtatcacaatattgcctttgacgtatacgcactcatttaccagttatttatgacagaccttctggatacggaagggttgttgcatggcatgagtatcatgctaagaaactgggattgcactaagttaattacctatctggctactaactcttgtgccggtaataagctaagtcttaaagaccaggctcaggaatatgctggtaactatgctcaagaagaaatcaatgacattaccagaatcccattagcagagttgttggaatacaacttagtggatggattatgtacctggtatgtctatgaaaagcattgggatactctggttaatgaccaacagttagatgttatacaaacatctttagacctgcataaccatactcaagataccagtattctggaaattcttgatgctctgattgattacaaagctgtagataaaattctgacagcatttattccagcattaaaaaatgccagacaaggaccagatggttggcattatctctttggtaatctgaacttaggtgggactgtatcaggccgtctatccagtagtgaaccaaacctacagaacctaccttctggttccagatatgccaagatgattaaaaaatgttttgaggctcctcctggatggatattttgtgggctagactttgcttctctcgaagaccgtatatctgctttaacaaccaaagaccctaataaactaaaggtgtataccgatggttacgacgggcatagtctacgtgcatatgcttacttcggtgagatgatgcctgacattgaagatacggtagagtctgttaattctattcaggagaagtacaaagcatatcgtcaggattctaaagcacctacctttgctcttacctatcagggcacgtacatcactttgatgaagaactgtggtttccctgaacagaaagctcgaatggttgaggaacgttatcacacactttataaggtaagtgatgactgggttcaggctaaactagaccaagctgcaaaagatggttatgtaaccgtagcatttggcctgagagtcagaacccccttacttcaacaagttatccgtggaaccagtaaaactccttatgaagctgaagctgaaggacgtactgctggtaatgcattaggccaaagttggtgtcttctgaataaccgtgctggttcagagttcatgcgtaaggtacggaatagtaagcatcgtcttgatattcgtccaagtacccatatccatgatgctcagtatttccttatccgtgatgatatggatgttgtgatatataccaatactcatttggtgaaagcagtacaatggcaagaccatcctgatattgctcatccagatgttcatttgg

SEQ ID NO: 23298 - DNA, 1585 bp, Homo sapiens
  SIMILAR (1534)..(1406): 481254mologous to Homo sapiens Human secreted protein, SEQ ID NO: 4574,accession number G00493,Smith-Waterman Score=90.
taagactaaaatctacgtagcatcctctgtctacaatttggcaggggatatacataaacgtccaaattatttaaagactacggtgattggtaacatcgtcagtaaatctgactttagtatgggtgataccatcactaactcttatttaaatggacctggtattcgtttacgtagattccctggttgggctgcaactaactatgacccttcaattggtattgcttatgggaacttgtcaatactgtctcagatagaccctgaagtagttaaatggcaagttcctcaaaaagcaggttatgaggtacaggttcagagcagtaggattggatttggtgattttgaggaatgggctgataaattcctctatgagaattatccagaccgtattactgaagagtttgaaatagacatcatggatgatgacaggattgtactcactgctactgatggtagtgagttatccttttatccagagaattacagtcaggatgcaatgtatctgtatgtgaactattactacatacagcctactagtgttgcagacccagtggttcatcctgctgtatctgtaccatctgctgatgacttaccttctacttctgaatggactcaggtatctcagaaccatactcctaagtcagctaccctgaagacagttactcatattaagagtgtattctctgatggcagacctgatgaggaaagtaccaatactgaagaagaacaggttagttggactaacttctcagatgtttacgagaaagaatttcgtgaaccaagtgaagtaggcttaatcattattcgtaagactacaatgacccaggtacagactggtactgtatctactggttccactacaaacactgaagttattgatttaggtggtggggttactgaaaccagaactactacagtaactacagatactttaggttatacatggtcttatcagaatacagatgtagttactactatgtctgctggtggtatgcctcaattgtttatttataaacagaacagtggtaatgccatccttgatgctctgtttattaataagacgaccaataacagattctattcattcatccctatccgtagtgataagaactggatttctggttctacatatactctttgtaagaaagcctttaagaaggctacagggggtaagatttctgacattatggatgacctgaagaagaacaaagatattggtgatattcagtatatctatgctgtatttggttgttctcttaatagtcctgaaaatacagctaaagagtacatatacagattcttccagttagtgaatcagtcaatgcctgctgacccaaactacccaactatggatgctttggtagaaggctttgctcaggctaacagagactttgatgcttatcaggaatggtgggaatctcgcagtgaagaagtagttgaagtagaaactactactgaaactgttgatgaaactgttgaagtagctgaagaagctgctgctcaggaagaagaaaaagaagtacaggaagaagaggctaaagaaccagtacaagccaaaccttctctgtttgcaggtctgaaacgttaa

SEQ ID NO: 23299 - DNA, 2888 bp, Homo sapiens
  SIMILAR (2359)..(1829): 231254mologous to Escherichia coli DNA polymerase I,accession number J01663,Smith-Waterman Score=105.
ccaatcgacgtccggcatctctgcctaaacttctccggtttgcctcgctctcttcctgtttaatattttgtaggctcttaatatccaaattctgagggtcagcagctacagcactacgagcaccatcaagaagacgtttagcagtgttaactcgctcctgatagcgaggtagtacacttctaaggttttcctgaccggtctgaatacgacgctgtacttcacgtaaatcagcaagtgcagtatctaacgtattctgtgctgcatagatgtttgattgaatttgtgcagtaagctgattacgagcattctgttcaatagcagtaccagtagttgcaagttttgcatttgcttctacggctgctttatccagttggtaatcaccacccaaatcaataacatcagtatcaaaggcatttcgaataccactaaaccatccctctggtttaccggtgatactacgttgaatgattgctcctgccatagcgggagaaatagcattctgttttgctacctcattgatttgtcgaaccagtgcaccttggttaatgcctttcagttcattgctatcaataatacgtttagccacctgaccagtcgtagaagggtcaacagtagcagcttggtattctggcagcagagtattaccaatattctgcatattacgagtaccaacagtattaccagcaacagaagtgaatgcttgttcctgtaatggattaatagaattacctgtttctgcttgagcaatgtaatccttcatttcatcccatgacaagttcttataagcaccaggagtatcatccggtaaagcagcccatgtactcttcagattgccattcttacgggcattaaaaatagcttcacccagtttgtcttggttctccggagacataggaatgttctgccaatcttcaccaaatacctttggagcaaagtctttaagagtatcttggttaatctggtatgcaccaacaggagaagcacctagtgtcttcttcatagtgtcttgatgctgaaccacctcacctaagttcatctgagtaataggtacatcagttggtgtgaacttataggtagtgtcatatgcagaaccattccgagtaccctgagtaccaggaggagatagggatgcagaaccagttcccggagtatatgcacctggatatgctctatctaactgagatagtgcacgacttactgctcctggtgacatttggtcgaacgtaccctctgcaagcatacgagcatcgtcagcactgtatgcaccacgacgaatattattcagtaactgcatagcagcctgagtatccgcatcgttacgtatatcaacacctaagttgaataagctgcgacgttgaccaataccagcagtaccctgtccttgaaggttgttcatgtagtccataacaacaccagcaggaagggtttttaatacatccccatactgagcctgtgctgcctgaacctttcttgggtcaccagattgataagcagatcgtttcttcttcagaatctggttctgtttttctacccattcttcattaagaagacgggtaaaatctttgattactttactgtcagcaattgtttttaacgcattgttatagtcttgggttaatgcctcttctacctccaatactgtcctcatattgataggcataccagttaactgcatttgaataatatcttcacatgcaggtttaaagatgtttgtataaacatctaactgttggtcattaaccagagtatcccaatgcttttcatagacataccaggtacataatccatccactaagttgtattccaacaactctgctaatgggattctggtaatgtcattgatttcttcttgagcatagttaccagcatattcctgagcctggtctttaagacttagcttattaccggcacaagagttagtagccagataggtaattaacttagtgcaatcccagtttcttagcatgatactcatgccatgcaacaacccttccgtatccagaaggtctgtcataaataactggtaaatgagtgcgtatacgtcaaaggcaatattgtgatacatctgcctgttcagatacttaataaaaaagtccctgagcatagaacgaacaagcatgttgtgaacttgtctaccataaggagcttcagtagccccctcaattggttcataatccacagggaatgcaatcccttcgtgcttgttccagcagaatgtaatagtgcctataccacagtcataatgcttcagactgaaggtttctatatctactgctaatggaacatccatctccagtaacttatctaaccacttagatatagcttctggagttaatgggtaatcagcataatggataatcttagttcctggctcaacataagaaccagagacataatcaatcagagcctgcatggataaagcaatcttagtctttatcttatctgggtcataaaagatttgtctgtaattgggaacgtaaataactttctggttcccataagcacaatccattacatagccaatattggcatcagctttaccttgtttggttagctgtttgtaatattcagaatcaccacagatgatatactgagtttgtgctgcttcgaatgctggcactaattcttgggtaataaactcctgcatctctttagcaggagttttctttttccctggggctgtatgaagttcaagaatcattactgaatctttatctacatcccagggttccatgtatgctttgacaatatcatccttacgtaacgttgtagtaaggatagcaatagggtagataccctcattgttgaatgtaatgtaacgcatacagacctcaaaagataagatgggttcccgcatagtattcgataatcggcaagattttctcata

SEQ ID NO: 23300 - DNA, 1188 bp, Homo sapiens
  SIMILAR (60)..(800): 271254mologous to Bacteriophage T4 DNA helicase,accession number M93048,Smith-Waterman Score=171.
aggcagcggcagaaggtttcttcgactttctgctcgaccccaatgcttctgaacttcgtattagtggacctggtggtacaggcaagacatttacaatggctcatatgattgacgagattatgcctcgttatcatgagacatgtagtctgatgggaatccctgctctctataacgaagttattatgactgctactactaataaggcagcagaagtattagcccgtgcaacaggacgtcctacgtctacctatcattcctttcaaggtctgacagtacggaataacctgaagactggggaagcagacctgattccatctaagtccttcagtatcaaaaagaataaggtcatttttattgatgaagcatcaatgattgaccgtaaactgaagaagtttattaacgaaggtactcaccaaagtaagattgtttacttaggcgataaatgccaattgttacctgtaaaggaaacttcttcccctgtctacaatgacagtagcattaaagagtttatgctgacccaacagatgcgtactgatgtccctgaactccatgcactgcatgaacagcttcgtggaaccattgaaggtaagcacggattcctgcctattaaagcagttccaggtattatcgactggattaaagatggtgatgaaatgagaaaagaagtcgaaggtcatttcatgactaagactgacactcgtattgttgcctataccaaccaacaggttgttaactataacaccttcattcgagccatgaatggattccacggagagttctgtattggtgaagagttagtaagtaactctgctattcagattggtgctggtgaccgccttagtattgaacaggaatgccagattgttgaccaggattctgctactcgtaagattctgattgattcctctggcatcgaattagaagtacgtgattgcaccctggatactggttatggtggtgtctttgaaggtatccctattccgaaagaaccattccctgaacttcgagcattacatgcttctactgtgcataagtctcaaggttctacctacgacaccatctttattgatgctactgatttatctacttgccgtcagcctgatgtagtagcacgtctgctttacgtagcagtatctcgtgctcgtcatcgggttgtgttctatggctctttggcagagaaatttgggg

SEQ ID NO: 23301 - DNA, 1422 bp, Homo sapiens
catccacatcaatgacaatcatattgaagccagcaatagcattctcttcagcacgatgccctcgacggaaatggtggttagcccagtgataacctgcttgctgggtcagtacatgtaactggtcaaatggaactttctgtgcagcattcccactcttatagaatggtaaagcttcaagcaaatctgcatgagtaacttcagtaccaacagatgcaatatacttggctaatttaacgtaggctttttcacgattgaggatagtctggaatgcaacaccagactcttccaccagaagaattgcttgcttcagatgttccatctctaccatgatactgttatcaacaaatgcaaatgcacctgccaatttcagtgccttaaaatagcgatgttccagttctgctttacgaatctcttcgtggtcagctaaagctgctgcttgtttttcacactgaatcttgtagtcgattagtgcaataccaacatcatcttcaactgtcattttccaaccaaacttggatgcatctgcaaggctatgaaagtggttagcccacttattcacaacagcattgttatcctgcttaatcagattacgatagatttcttcagcactctggctcagatatgcacgtttatctgcctgacctacagcaaacagacaacgacgagaatagccagtatcaaggaagtcatagaaaagttcctcagtctggctcccattgagaagtttgctcggtgtaccaaacagaaaaaggttagctggagttttaccatcaacttcctcactacgaatactttcagcagtattcttagtaagtttctgtttaatcttgccttggtcgtacaactcaaggaacacagttaatacatcagcattagcgagaaggtttgaaccaatctcatcaatctgtaagttaatagcaccacatccagctaataagagtttatgacgtaactgtttcacagcaggaggtgtacctgagtcaaacgtaaatggataagcaccagtacgtctgtattcagcttccaccttgtcaaactcttccttctggtcagtagcattacgagcagaacgttcgttagcaattttccacagacggtcttctgctaaagcaggcatggtgtcttccataaaccgcttcttaaagccagccataaaaccgtcttcaacaatgttgaccgaatggcctttaccgaagcctgaagtagcaagagccactgcatagatgtttactggaatttcaccacggtctttagtgatgatagttgcacccatacatgaagccattttcgcaaggaaataggccacttctacacggaaaaaaccacggtcagtgttttgcgtcttgttacataacacatcaacgatttcttcaatcgccggatgatgtgagactccggtcaggtcaatcatgggaaatatct

SEQ ID NO: 23302 - DNA, 1352 bp, Homo sapiens
  SIMILAR (1248)..(1036): 301254mologous to Vibrio cholerae rfb T1,accession number X59779,Smith-Waterman Score=65.
atggaaattgaccgtcaactagaacatcctgcactggctcatttctctggttctcaaaaagcccatctccgtaagcatttaaagagggctaaggatttacgtaattacagggaattaactaaagtatttactgatatggctattaagccaatgttcaaaacctttgctaaattggggattactaaaggtatttccctatttcattatcaatatggtgttgaactgtggcgtaataatattgttaatagtgtccgtagaatacactcattaaacttcatgacttatagttctaagaagtgccgtgtatttgttaccccacgtattaccaatattgaagatagtctggctgggtatccagagtttgataatctttctactgagacactggtaaaatataactcaatcattgtcaaagttggaaccaagaaaggtgaagcagaggctatgactaatctgctcactaaagcaggatacgaagtcattaatatggctgaatatcatgagtgggattgtatagctcgcagacgtaaagaggaacaagaggctaaattagccatttccaaattacaagctaagaaggctactaataagaaaaaggttagtcctaatcgtcttattagtatgaatatccttgaaataccaaaagagcatcgtagctattcaagtgaggtatgtggttctcactacgcttctcgttctcatgaccgaatggttgatgtagatactccccagtattacatcatgcaggaagatattaataactacacaggaaggcttggtgttctttctatgtggcaattaacccctgctaccattaaagctgtaactgttgtttgtcgtaataaaattgaacgtaataaagctattaagcgaggtgctgttcatttggatgaatggactgctccgtatattgcttcagttcttacatccaaacaattcattaagtatgtcactaaagaacgtcagaaaacgttaagtgatattgtatcaggtactcaagaagcaaatggttatgtatatgctgacttcactgtagaagactggattcctgtaatgatggaagcggttggttctcctaatccgtgggagttcatgaagtggcgagtagtttgtctgtatcaggaaagagaaattccttcagcaccttggtcagataacattcctttggataatgcagggcttgttaagaagaccattctggtaggtattaaccagtttggtggtggacactttactgatatgtctgacccaactgctaccacagctaatggtgcaattggtcgtaaagacaaggtatctgcttctacgttacgtctgacttttgcagagaaagctggattacgtcctatcag

SEQ ID NO: 23303 - DNA, 2228 bp, Homo sapiens
  SIMILAR (758)..(1594): 231254mologous to Staphylococcus simulans lysostaphin,accession number U66883,Smith-Waterman Score=141.
ctttcagtttagctttcttcgcagcagtatctttagttaccagattttgctgaaagtcaggctggctcatatgacccaagtagctgacgttcaggaatacaatatcccgtacatctaccacttgaccaaaacggtcattcagattctgaaacagagcagactgagcacgtcccagaatggttctttggatgtgactgaagaatccagtgcacaggaaatgcagaacgtagcattagctgctgaagtagctcctgaaaagctcaatccagaatctgtaaatgttgttcttaaacatgctgctgatggtcgtattaaactgaataatcgccaaattgctgcccttcagaatgctgctgcaatcctgaagggggcacgggaatatgatgcagaagctgcccgtcttggattacgtcctcaagacattgtgagtaaacagattaaaacggatgagagcagaactcaggaaggacaatactctgcgttgcaacatgcgaataggattcggtctgcgtataactctggtaatttcgagttggcctccgcttacctgaacgactttatgcagttcgcccagcacatgcagaataaggttggagcgttgaatgagcatcttgttacggggaatgcggataagaataagtctgtccactaccaagctcttactgctgacagagaatgggttcgtagccgtaccggattgggggtcaatccctatgacactaagtcggttaaatttgcccagcaagttgctcttgaagcgaaaacggtagcggatattgctaatgccctcgcttcggcttacccggaactgaaggtcagtcatataaaagttactccattggattcacgtcttaacgcccctgctgctgaggtggtcaaggcattccgtcaaggcaatcgagacgttgctttttctcaacagaaagctgactccgtgaatcaggttaaagaaactcctgttacaaaacaggaaccagttacatctactgtacagactaagactcctgttagtgaacctgttaaaacagaacctactactaaagagtctagaccacaggctataaaagaacctgtgagccagtctgaaaaacgggatgttaaccttactaatgaggacaccatcaagcaacctactgaatctgttaaagaaactgaaacttctgcaaaagaaagcacagttacagaagaattaagagaaggtatcgatgctgtttacccctcattggtaggtactgctgattctaaagcagagggtattaagaactatttcaaattgtcctttaccttaccggaagaacagaaatcccgtactgttggttcagaagcacctctaaaagaggtagctcaagctctgtcttctcgtgctcgttatgaactctttactgagaaagaagttgctaatcctgcttttaatggggaagttattaagcgatataaagaactcatggaacatggggaaggtattgctgatattcttcgttcccgtctggctaagttccttaacactaaggatgttggtaaacgttttgctcagggtacagaagccaaccgttgggtaggcggtaagttacttaacatcgttgaacaggatggggatacctttaagtacaatgagcaattgctacagactgctgtattagcgggtcttcagtggagacttactgctaccagcaatactgctatcaaagatgcaaaagatgttgctgctattactggtattgaccaagccctgctgccagaaggtttagtagagcaatttgatactggtatgacactcactgaagcagttagttccctggctcagaaaattgagtcttactggggattatctcgtaatccaaatgctccattgggttataccaaaggtatccctacagcaatggctgctgaaattctggctgcatttgtagagtctactgatgttgtagagaacatcgtggatatgtcagaaattgacccagataataagaagacgattggtctgtacaccattactgaactggattccttcgacccaattaatagcttccctactgctattgaagaagctgttttagtaaatcctacagagaagatgttctttggtgatgacattcctcctgtagctaatactcagcttcgtaaccctgctgttcgtaatactccagaacagaaggctgcattgaaagcagaacaggctacagagttctatgtacacactccaatggttcaattctatgagacgttag

SEQ ID NO: 23304 - DNA, 1589 bp, Homo sapiens
  SIMILAR (368)..(1204): 231254mologous to Staphylococcus simulans lysostaphin,accession number U66883,Smith-Waterman Score=141.
ctatcagttgagctttcttcgcagcagtatcttaagttaccagattttgctgaaagtcaggctggctcatatgacccaagtagctgacgttcaggaatacaatatcccgtacatctaccacttgaccaaaacggtcattcagattctgaaacagagcagactgagcacgtcccagttcgccaagcacatgcagaataaggttggagcgttgaatgagcatcttgttacggggaatgcggataagaataagtctgtccactaccaagctcttactgctgacagagaatgggttcgtagccgtaccggattgggggtcaatccctatgacactaagtcggttaaatttgcccagcaagttgctcttgaagcgaaaacggtagcggatattgctaatgccctcgcttcggcttacccggaactgaaggtcagtcatataaaagttactccattggattcacgtcttaacgcccctgctgctgaggtggtcaaggcattccgtcaaggcaatcgagacgttgctttttctcaacagaaagctgactccgtgaatcaggttaaagaaactcctgttacaaaacaggaaccagttacatctactgtacagactaagactcctgttagtgaacctgttaaaacagaacctactactaaagagtctagaccacaggctataaaagaacctgtgagccagtctgaaaaacgggatgttaaccttactaatgaggacaccatcaagcaacctactgaatctgttaaagaaactgaaacttctgcaaaagaaagcacagttacagaagaattaagagaaggtatcgatgctgtttacccctcattggtaggtactgctgattctaaagcagagggtattaagaactatttcaaattgtcctttaccttaccggaagaacagaaatcccgtactgttggttcagaagcacctctaaaagaggtagctcaagctctgtcttctcgtgctcgttatgaactctttactgagaaagaagttgctaatcctgcttttaatggggaagttattaagcgatataaagaactcatggaacatggggaaggtattgctgatattcttcgttcccgtctggctaagttccttaacactaaggatgttggtaaacgttttgctcagggtacagaagccaaccgttgggtaggcggtaagttacttaacatcgttgaacaggatggggatacctttaagtacaatgagcaattgctacagactgctgtattagcgggtcttcagtggagacttactgctaccagcaatactgctatcaaagatgcaaaagatgttgctgctattactggtattgaccaagccctgctgccagaaggtttagtagagcaatttgatactggtatgacactcactgaagcagttagttccctggctcagaaaattgagtcttactggggattatctcgtaatccaaatgctccattgggttataccaaatgtatccctacagcaatggctgctgaaattctggctgcatttgtagagtctactgatgttgtagagaacatcggggatatgtcagaaattgacccagataataagaagacgattg

SEQ ID NO: 23305 - DNA, 1245 bp, Homo sapiens
  SIMILAR (632)..(820): 311254mologous to Eimeria maxima unnamed protein product,accession number A49225,Smith-Waterman Score=92.
aaggctttgctcaggctaacagagactttgatgcttatcaggaatggtgggaatctcgcagtggtaatagggatattcccatagggaagcctcctaaaagacccgtatatccaacaataccttctaaatccattaatattcgttctaacggtggataccgttacaacatgactattagttggaacttcattgaagaatcagttagttcaggtaaagcattctctggagccaagaaagggcagctcaagtttgcttatgaaggtactgtagtccttatgcagaaagccgttatgtactctgaaaagggtaatgacaaagttgggtttactatctacaggctagataagataacaatgtattggcagaatggggataattcatggaggaagatttctgtctatggcctgaaccataacaataatgtttacaagaataaatctgtaagcatttctggtgtagatgcactaaatgatgatgaagagtccggatttatcatccctcttcataacaacatttatcgtagtatgtctttggtaaatggtactcagttatctactgcatgttgttatctggttcttaactcatataagaaagttaagaagaaatggtatcagtctggcatttttaaagtagtagtggttgttgttgcagtagtagtgtctgtgttctttactcctgctgctggtgctggggtaatgggtactgctgcttctattggtgctgcattaggttttgcagggttagctgctattatcgttggggctgtggctaatgccattgcagctatgattctgatgtccattattcaaacagtctctgttagtctgcttggggataagattggaatcattgttgctactattgcctctatggtagccatgaatgtcggcacagctttatccactggttcatccatgtctacgatgctgggtgaaatgatgaaagcagacaacatcattaaactcacttcatctgtaggaaatggcataagtgattacatcaatgcttctgctatggaaactgtcaaaaagacagagaaattatggcagagtactccttctactatcgaagaagacttgcgtttgttctctaaattggttgaaagtaagcctgttcacgcaagtcctactgaacatcaagcaactcctcagcatgtaatgagtaaaggcttaaatgagcctactgacccatctacatgggaaaatggcattagccacatggacagaaatttacgtttatactcag

SEQ ID NO: 23306 - DNA, 1529 bp, Homo sapiens
  SIMILAR (6)..(530): 331254mologous to coliphage T4 rIIA,accession number X52686,Smith-Waterman Score=228.
ctgactctactgaactgaccacatcagcaacgttaggtgctcaagatgctatggccttcggtatttctgaagacccagcattcttccaaatactcagtgctaacctctattctaatcagaaactggcaatggtacgtgagacattgtgcaatagctgggatgctcatattgaggggaataaaacagatattcctatccatgtaaccattgataaagatggtttccttatcttccgtgactatggttctggtattcctaaagataagattcaagaggtctatggggtatatggtgcatctaccaagaaagctaatactgcttccactggtggctttggcttaggatgtaaatcccctatggcctatacagacagttttactgtcacatctatgtgtgacggaaccaagactgtctatcacattgctaaatcttctgttgagactaacggtaaaccagggattattcctattgttagcgtacctactgaagaatccgggcttgaagttaaaattcagcttcagtcagaagatattttagaaattgattcatatattcgagccattgtattacatggtgagattaaatgtatttactgcaatcagtatacaggaccaaatacagtagaattactgcctgtactgggtatgtcttttgaaccaggtagctataacctagaccatagcacatggcataaatattacatgggcagtcattcaatatttatccgttatggtaatgttatgtaccctgctttggatacccctgctacacatgaagcattaaaactggttaaacagtttatgcaggttattaactgtagccgtatcgttgttcaagctgccccatcatcactagctgtagcacctagccgtgaaacactgtcatctcaaaaaatgaccgaagacggtatcgtaaatttggctgtagctttagtagataaaatggaagcagatattaaagctcgtcttccaaatgctattgaatatattgggaaggctattaaagaatatagtcctcaccgttttgaagtaaatactatgcaatcacgtcttattcatctggaaatggagactgattttgatgtcttcatggaagatgtagccatccctaataagtgggatgagcgtgtaattgcattcctgaatgctaacccaaataaactgaatgattttgaaccagaccatcaagagaagactttctgttgttctcgtacatgggagttcgttaacaagattgtttccattctcccaccaggaccaattaatagtgaaatgactctactgttagcaggcactatcacttctggtgtagcaacatcattcgtccagtttactcaggtctatagcaacatggtgtctttgaatgagattttggataatcctaagaaagctcgtatgcctgaagacaataacctgttgtgggctgtagtcacttcactgattaacaatactgacgaagataatcattcgaaaatctttgattacgttgaacgtatgccatttacgttcaaggttttgtactaccgttcc

SEQ ID NO: 23307 - DNA, 1794 bp, Homo sapiens
  SIMILAR (19)..(1143): 281254mologous to Deinococcus radiodurans conserved hypothetical protein,accession number AE001966,Smith-Waterman Score =240.
aggaaaactgatatgtccatgacagatgctcaattaacccgtgaatatgacagatgtcaggctaaagcctttatgggcaaaactgctgcattctttggttcactgttatgttctctgaagttccgttgggtaaaagatggctgtgatacagcacaaaccgatggtgagcatctcgaatggaatcctgattggtttgaaagtctattacctgaatctcgtgtaacagtacttatgcatgaactatggcatgttggcttactgcattctgttcgtatgggttctcgtgacccagaagtatggaattatgcctgcgatatttatatcaacaatcagcttattcaggatggctacagctttataggaatcgaaaattgctggaaagaccctaagtatgctggttgggctgaagaacaaatctatgatgacctcatgagcaaacagatacgtcctcctaaagcatcaggtgcttttgggactggttcaggtggtgacatgaaaccttccacttcgaaggctagtcaggtgaatattgtcaataatgtagtaagagccatgcaccaacagaaactatctggtggctctttgcctggggtattacctggaaaaatggaagaagttattactcaattcctgaaaccagtagtaccgtggcaggttttacttgaacgcttcttcaatgacctgcaagaaacttactactcatggcaacggcctaatcgtagataccctgatatgtacctaccatctcctatggatgatgacggtagactggaacatctggcttatttcctcgatacatctggctccattaaacctaaagatgctttacgctttagctctgaagtggcctatgtaaaagagaaatatcagcctcagaagatgactctagttcagttcactacagagattgtagatgaacaagtcattgaagatggtgataagtttactgatgtcactatcaaaggacggggtggtactagtctggttcctgtacgtgagtggattattaagcataagcctactgctgccattatctttactgacttagaagtcagaccgatggagccattgccatttgacattcctgtcatatgggtagttattcgtaaccctggtgcacaagttccatttgggaaaataatttgtaggaagactatgagcacactactgactaagaaagacattgtttctgcattgcctccccagtttaaaagcagtgttactgaccaactggtaaacatgattaacaatgtgacccaagaccagacagcagcagagcaaattagaaataactttgtgacttatgctggggtgatgaaggatggaaagtttaagacccaggattatcttaatgctgttcaatatgttacttacaaacacatggggtatagcaacaaagatgcttacttcaaaacattccccaacagacaagctgaattagtagcaaggggaaccagtgagaaggacatctctgcttatgtatctgcttaccataggggtaagttagtaaacctcattatggaacaatcactgattccagtatggattgtaaatcaggatttgtttcaggaagcattgaaccatcaggcatggctcatgaagaatgctaccagtgagaaggtacagtgtgatgctgccaactctatccttactcacctccagaaaccgaaggatgctgttactaatatcaatctggatttgagagaaaactctggattgactgaactcaagaacacactaacccagttggctgaagctcagaaagcagctattgaagctggtacacctactaaa

SEQ ID NO: 23308 - DNA, 1974 bp, Homo sapiens
  SIMILAR (757)..(1497): 271254mologous to Bacteriophage T4 DNA helicase,accession number M93048,Smith-Waterman Score=161.
atggccaaagtttatcgtgctaaccgtaaagcccatgatgacgatattattcgtatgaatgcagtcggtttatcattgggaaccattgctaaaacactgggtgttcaccccactacagttaccttacgattacgctctcttggtattgaaccagccgacacacgtcgaacatttatggagaacgtactagcaccattacctactcacgtagctgattggttatcagaacaagtaggaccaaaatatgagattcgacaatacgttcgagacttattactggaagcctacaataatcgtcataatcataaggaaactgctcatgaacgattcctcaaaagatacgttgaagtagttgagatgctggaagaattggctccaaattctgaagaagcatacgatacacttcataatgccattgcagctttaactgaattgtcagaattaatgaagtcctctgataaagaagtttatgcacctaacagcaatcgcttagctattctggatgcactggcagaccagattgttacagcaactggcatcggtactttcttgggtatgaacgtacccggagcactcactgaagtgaaccgttctaattattcaaaattgaagacgagccgcccatatagggcggtttttgtatctggagaactcatgtataaaagtactactaagctgccactaaatcctggtcaagaggcagcggcagaaggtttcttcgactttctgctcgaccccaatgcttctgaacttcgtattagtggacttggtggtacaggcaagacatttacaatggctcatatgattgacgagattatgcctcgttatcatgagacatgtagtctgatgggaatccctgctctctataacgaagttattatgactgctactactaataaggcagcagaagtattagcccgtgcaacaggacgtcctacgtctacctatcattcctttcaaggtctgacagtacggaataacctgaagactggggaagcagacctgattccatctaagtccttcagtatcaaaaagaataaggtcatttttattgatgaagcatcaatgattgaccgtaaactgaagaagtttattaacgaaggtactcaccaaagtaagattgtttacttaggcgataaatgccaattgttacctgtaaaggaaacttcttcccctgtctacaatgacagtagcattaaagagtttatgctgacccaacagatgcgtactgatgtccctgaactccatgcactgcatgaacagcttcgtggaaccattgaaggtaagcacggattcctgcctattaaagcagttccaggtattatcgactggattaaagatggtgatgaaatgagaaaagaagtcgaaggtcatttcatgactaagactgacactcgtattgttgcctataccaaccaacaggttgttaactataacaccttcattcgagccatgaatggattccacggagagttctgtattggtgaagagttagtaagtaactctgctattcagattggtgctggtgaccgccttagtattgaacaggaatgccagattgttgaccaggattctgctactcgtaagattctgattgattcctctggcatcgaattagaagtacgtgattgcaccctggatactggttatggtggtgtctttgaaggtatccctattccggtagatatggattatttcattcgtttgcaaaagtactatgcacaccaaaagaactgggaacgtcacttctatttgaaagaaacattccctgaacttcgagcattacatgcttctactgtgcataagtctcaaggttctacctacgacaccatctttattgatgctactgatttatctacttgccgtcagcctgatgtagtagcacgtctgctttacgtagcagtatctcgtgctcgtcatcgtgttgtgttctatggctctttggcagagaaatttggtggtctggttcgctaa

SEQ ID NO: 23309 - DNA, 8781 bp, Homo sapiens
  SIMILAR (7929)..(7282): 321254mologous to Thermotoga maritima DNA-directed DNA polymerase I,accession number AE001805,Smith-Waterman Score=240.
  misc_feature (1)...(8781): n = a,t,c or g
tcagacccatgctttccatatagccacggaaacgaccaggcaatctgtcatagttacaaactcttcagttacttgacataatgcttcagaagaggatttcttcttacgtttcactaaatcatcatagatgatggctttagcaatgaagtccgaatactctactgttttctggataccctggaacagagcagtgtccttagcaataagagcataacggccagcattacgtactttttctggaagtttattagcaagtttttccatgtactcatgaatcttaccttcagctactaacaggtcatcacgactaataccagcatcagcaatagaagagaactcacctgcttcaatcaaaggccagatgctcatacgacgatggctatcagtaatagattgaatctcggttttaagtttacgaaccagattaggattgccttcagcagcacgtaattctgcttctgcatcaatctgacgtaagcgagatttaatgtactgattaatctctgacgtcttacgaggaatattcacagcaatatccttaacaggaacaccacgtccaatcatctggtagatgttagcaaggaagttaactgccgccactacaacagatttaacaacaattactgtcttagcatccttcaccaagttctgaatggtattttcagcattcattactacatgatatgacttattaccaaatgcaccgaggaacatcttcttaacagtatcaagggtgctaggtgaccaacgagagttaccagtccatacatcaccaatagatgcagcacgatagccaagtgcatcattcagcatatccctacgaacccataactcatctttaccaaagagttcttcggccttatggagagtctcaatgttcatcaggttaattgcatcagccagtactgggtcatcaattttacataacaggtttacatattgagatttattagcactggagtctttaatgtctttctcatacatagcatgtaattgctcaatgagaatgtcattaaaacgttgtgctttagcctcttccacctgacgaccacgccatacacccaccatcttagcaaagtgattgtcttggtttagatgcttcaacatattagggtcgacggattgctcataagcaactacctgacctttgctagatataatgggcatcagcggttcacgtccacgttcacctttagccagagctttggtaatacgctctacggttggtttgtcagtaatacgaccagcaaccatagtacctaacgtaaagcctgtaccaatatccacaccaccagcagtattacgaacgttctgaagaataccttgagagtatggggcacgggcagctactgggctgaagtaataacctttagaaccagtacgtaaaccagtgcttccctgataagtaccaatacgagtaaaagattggctatttaacttagcaaactctttatcgtcagcaataatcaaattcacaccttgctggttctctacagggatatagcccttaaagtgattcagcaaagtacgggtatcacctttagctttacgcatctcttcagtacgttgacccaccatataagcaatggagaactccataccctccacttctgattgagccaattctgacaaaaggccacggtcagacttattcatcaattccagagagtacaaagtaatgagcttatcaatagcagctacatctgccacaggaccattagtaatacgttcacctaataaacgactaatagcatgggcattacgaaggaggttattacctacctcccctgtaatcatgtattgagccaggtgcttagatttcttctgaaccagattccagtttctacctgcttggttctgaatctctttttccagagtagagatttcatctttcactttcttaggtgaagagagggaatctctaatttcagccatgctcatagtttcacgtagaacagctaaatctgttttacctaaaccagtatgcattgcagaccactcggtatcagtcagtttacgggaaaacttaccagcaatgactgtaggtaaatgctcacggaattgttgacggtcttgagaaatctggctcttaaccaatttgattaagtcatagacattggcattagtcttagtacggccaacaatgtcattaactaagtcatggaaaggttgccatactttaccctggttcatagcagtcataacaccctgagccactatttcaccttgtttttcagatgcaatagcagcagtcagtttagccagatgagcaacacctttagcagctacattagaaggattagcaattaccttatctgccttctcaataacagtttcagataaccgttcaatgctatctgttacgtactgattagcacggtcaatgaaattaccggtaggggttgctacagcatcatagaaggactctcgtttcagagcagcagccatgattgtttctgacagagcatcaatactgtcctgaacattagtagctttctggtcaccagccatacgacggttcagagattccattacctgagtgcctgcattggtaagcagagtatctacatcattccctaatttcttatctgctttaggtacaggcatttctttaatgattgaacgtagttcttcattaaccatagccagacccaggaatgtaggtaacagactggttctgcctttggcatctacttcaaccagattagcaccagagatagtgtcatatttctgttgagcgtagtaacggtcagcagggttagtactatcagggtcagccatgaaatgttctaccgtaaggtgtttcattacatgggtataaagttcctgagcacgagccatagcgtgtgggtcaattgcagcttcagttgctaatgcagcagtaaccatctggaatacagattgttcctgagcagtcatattgaagccacgagactgaacatcacgaactagtcgagtagcactcattaatgcattagccacattgccacgacgttctacttctgtaactgggtcagtacgaaggtaatcagttaccagtttatcgaaggtctgattcaactgagacagacgttcattgttaccatatgctttgctatggaacagtgtgccatctttagctactgcctgagttgtaggttggctacgcatcagaattgcagaattaaacagcagattagagaacatatcttctcccaatgcaggagcttgtttacgtccccaaatcaatttcttaatggcctgataaacatctttcaccatttgaaccagtgaagatgttctcttctgtttagcagccagagcacggttagctaacccccaagccataaactcattaagagcagcagctttagaaatagctgggtcaacaaagccattactcaaatgaccttcaatagttgcaatagcatcagcatatgcttctctcatttctggagaatctttggaaatatccagagaacggaactgttccatcagaccttcaaggttctcaatagcctgcttagaagtagggcttacttcattaccctgatagaaggaataaacttcctcgaaggtagaagcatgaaccagttcatgaatgagggtttccatagatgggctaaccagataaatggtcttatcgtcgaagttagtccagccataaatattacctgcctgagcttcttccatttcctgagaagtcaattcagtaacattcttctgacgagcatattctgcaacctgagtaggtgtaccgtagataatcttatagtctntagctgccagtgatttctgaatctctgcaagagtagctgcctgagtagatggcagattactaatcttagccaggttacgaatagcagtagcagacaggatacgaacaccggatgccttatgctcacggcctaccataccaaagtctggatgcactggttctttttcagaaacaatttcttctttgacttcagccttagccttagcgactttttggttacgggcttctaactcttcacggaaaagtttattcagttcatcagcctgttgttcaggagtcatattgctaaggtcaatcttaccgttgttctgataaggagcacctacagcagccatctggtcaatggacagatttaccttatccagtgccttatgacgaatatctacacccagagcaatattacgtaagttacgttcaatcaaagatgcagcattagcaatatcatctacagtagcattctcacgttggtcatattccagagcagatttaccaattgcttccaatgcttcaggggacaacttgctgaaatctacattcttcatgaacttagcatatgattcgtaaacattcttaatagggttaccctgaacacgaccgacatctacgattagagaaccataaggtactttatagattccgtgcataccacgagagtacatgatacccataccttccaatggggcatcaagtaaagaaccatctggtttagcaatcttcaatacgaaggaactatcagtatgactcttcagttgtgccgtaagctgagtaccatcggtaggtaacagtaagctaaatgtaacagtagaatctttgataagagtactgtgatataccgttaactcaccagatactgtatcgaatgcccaataagtacccgaatcccaatcagatacagcagcccaaccaccccccgtaaattttaaatgtgggtttgtgtttcccaacctataccgggcacagaacccggagaatgctttagcagttaggtctgctttaaaccggagtggggcagtaacagatacagtagctgtattgtcagtagtagatgcacccataatcaggccatccaatgccatttgttgactaggtgctaccaacaaaccactaactttaccggctttataattaagaaccaggttagctactgcaccagcagtaggggcattcatgttgatggaaccagtagctaacgaccatactccaccagtagaggtcagtttacctgctacagcataaccacctttgtcattatccatagtaataacctgacggagcattgcacctactgtattagctgcataagtctgtgcctgattaaagccaatcagacctgcaccttcagcagtagcatacttttcatggtcagcaatgattgtgtctagctgctctgcaatggtaactaagtcacctaatctggcatgtacagctaatagttcagtcatgtgattatccaaatcaagcagtgctgccatattggtattcacattcttaatcgcattgatattagtacttactgtattaacagcatcaatggaaccagcaacggtattcacgttggtaatgctattagcaacagtaattactttatcaatttgagcagaaacaataattactttagcaatatcagttgctactgtattaactgcgtcaatgttagaagctacagtattgattggagtcaggttgtcatagaccctcagcaatgcctgaagattgtcatatagaccagtcagtttagataattgattgtagagttcctgtaacttatccagattattatgaataagttgtagttcatctagcttagtgtagatagcagatagctcagttaacttgttatggatagcaagtagctgagtcatattatcactgacatttttaataaaggtcattcgtaatgctacgaacttaacaacgtagtaagcattaccaatcatcttatcaacgattgggtcattaagtgtttcgcagcaataaccaccaaaggacactgccatcggatgattggtagggtcaaatagttcagaatcaggattaactgcacatgcccggtctacagcagtagacccagttgtcccattaatagggcgtacacctgcatagttaatgccccaagtttcagtcatgtacttctggaatacatcatagccacggtcagggtatgcaccagacatgaagtgaatagcaacctgagattcaccagcaaatagaattgggtaatctaatacagtctgttctgtgattaactcacccgtttctttatcctgacgctcaggagtaaggttatagccatcatcaaagcctgaagtcatgcccatacccatcactacttgtggatatttacgttgacccagttgcttacgaccggaaccagatacagtaaggttagtaaaccatttaacagagtctacttgtttaataggaccatctgtctgtaagtatttaccatagaatgcatcacatcctatgaacttacctgggagcatacctttgcatttaccagagaagttagaagtaccaaagccttcatagcttactacttcgaactcattctctgctgcttgagcattaccattaacatccaagtatctccagatgcattggagtttatccccagcagctaaagcagcattagtatgaatacccccaatttccatctggaaagtagcaccatcgtcattgttatacatggcggcaatgtaagcatctttccctagaccatgatgtgcttcagtacagtcgaaagaaatcattgtgatattacgagggttaatagttaccccattaaatgccacacctgtacgtaaatcagcaaagtccagaatgaagatatagtccttagtgccatagacttctgtcatttcagattcaggaatatcttcatcagtagctacaaagatgtcagcctgatacgttctcttggttccatactttgtatccaaacactcccatcgacgggttttattattgaatccatatggagccagacgatacgtatatgctttttcaggagtctgaatagtaactgtgaatttatctggttcatcagggttatgacgaaaagccagaatcagacctaagtaattagggtctgtttcataacgatacagatgatggtcaaaggtatcctccgtcatccaacggacacctaagaagtctttgttagtacgccactgacaaggaactttaaaagacttagaaccatacggaatgatggtggctaccattaaggcattgtaatcaactacccaatactcagggtcgaaacgatttagtttagtgttataagtccgattacgacgagtgttgaccaacgtcagatgttccctgtctttcttaaattgagggaggtcttctctccaagaagagtgctggtcatccgggtcataattaggagaagctaggcaattcttgcctttgaggtaatcttcaatggacatacgtgccctgataggaggagcaaaggtagggggtgtggaatcctgacaatatgctttgtacttctcctgaatagaattaacagactctaccgtatcttcaatgtcaggcatcatctcaccgaagtaagcatatgcacgtagactatgcccgtcgtaaccatcggtatacacctttagtttattagggtctttggttgttaaagcagatatacggtcttcgagagaagcaaagtctagcccacaaaatatccatccaggaggagcctcaaaacattttttaatcatcttggcatatctggaaccagaaggtaggttctgtaggtttggttcactactggatagacggcctgatacagtcccacctaagttcagattaccaaagagataatgccaaccatctggtccttgtctggcattttttaatgctggaataaatgctgtcagaattttatctacagctttgtaatcaatcagagcatcaagaatttccagaatactggtatcttgagtatggttcttcaaagacttgagtatgccactaccagtagcaggtagtttacttgcagtcagacccagtacaggtaaccccagaaactcaaaaagtagcttctgtaattgaatacctgagtttggattaaactgctctttagcatcagctaaagtcactcgtttcttcttcagaatctggttctgtttttctacccattcttcattaagaagacgggtaaaatctttgattactttactgtcagcaattgtttttaacgcattgttatagtcttgggttaatgcctcttctacctccaatactgtcctcatattgataggcataccagttaactgcatttgaataatatcttcacatgcaggtttaaagatgtttgtataaacatctaactgttggtcattaaccagagtatcccaatgcttttcatagacataccaggtacataatccatccactaagttgtattccaacaactctgctaatgggattctggtaatgtcattgatttcttcttgagcatagttaccagcatattcctgagcctggtctttaagacttagcttattaccggcacaagagttagtagccagataggtaattaacttagtgcaatcccagtttcttagcatgatactcatgccatgcaacaacccttccgtatccagaaggtctgtcataaataactggtaaatgagtgcgtatacgtcaaaggcaatattgtgatacatctgcctgttcagatacttaataaaaaagtccctgagcatagaacgaacaagcatgttgtgaacttgtctaccataaggagcttcagtagccccctcaattggttcataatccacagggaatgcaatcccttcgtgcttgttccagcagaatgtaatagtgcctataccacagtcataatgcttcagactgaaggtttctatatctactgctaatggaacatccatctccagtaacttatctaaccacttagatatagcttctggagctaatgtgtaatcagcatactggatgatcttagttcctggctcaacataaggaccagagacataagcactcagagcctgcat

SEQ ID NO: 23310 - DNA, 1363 bp, Homo sapiens
  SIMILAR (210)..(55): 481254mologous to Corynebacterium glutamicum RXN03004,accession number AX064729,Smith-Waterman Score=117.
ctgagcaatacctgaaccagcagggatatgaagttttttacgaccgtgataaaccagttctaaagtcagatagcctgaccatcctggttcaataacggtattgaatacagataatgtacgccttgcccatgtagatttgtcatggacaatacctactaggccagcaggtacattgaaacgttccattgcagaagctaatgtgaaagtgccaaacttccacttggtctttccttcatctttaatcttgatgcagggaatcaaaccaagaaatcggtagaaggtaacatcctgtttaatacggatgtcataaccagcttctcccagtccaaatgtagtctcacctgaactgagtttactgttaaccatgccgtacaggaaccagactagtaccaccccgtcctttgatagtgacatcagtaaacttatcaccatcttcaatgacttgttcatctacaatctctgtagtgaactgaactagagtcatcttctgaggctgatatttctcttttacataggccacttcagagctaaagcgtaaagcatctttaggtttaatggagccagatgtatcgaggaaataagccagatgttccagtctaccgtcatcatccataggagatggtaggtacatatcagggtatctacgattaggccgttgccatgagtagtaagtttcttgcaggtcattgaagaagcgttcaagtaaaacctgccacggtactactggtttcaggaattgagtaataacttcttccatttttccaggtaataccccaggcaaagagccaccagatagtttctgttggtgcatggctcttactacattattgacaatattcacctgactagccttcgaagtggaaggtttcatgtcaccacctgagccagtcccaaaagcacctgatgctttaggaggacgtatctgtttgctcatgaggtcatcatagatttgttcttcagcccaaccagcatacttagggtctttccagcaattttcgattcctataaagctgtagccatcctgaataagctgattgttgatataaatatcgcaggcataattccatacttctgggtcacgagaacccatacgaacagaatgcagtaagccaacatgccatagttcatgcataagtactgttacacgagattcaggtaatagactttcaaaccaatcaggattccattcgagatgctcaccatcggtttgtgctgtatcacagccatcttttacccaacggaacttcagagaacataacagtgaaccaaagaatgcagcagttttgcccataaaggctttagcctgacatctgtcatattcacgggttaattgagcatctgtcatggacatatcagttttcct

SEQ ID NO: 23311 - DNA, 1861 bp, Homo sapiens
  SIMILAR (1345)..(1704): 261254mologous to Neisseria meningitidis Z2491 DNA polymerase I,accession number AL162753,Smith-Waterman Score=90.
ggcatggttaacagtaaactcagttcaggtgagactacatttggactgggagaagctggttatgacatccgtattaaacaggatgttaccttctaccgatttcttggtttgattccctgcatcaagattaaagatgaaggaaagaccaagtggaagtttggcactttcacattagcttctgcaatggaacgtttcaatgtacctgctggcctagtagtatggaaaaaatcttgccgattatcgaatactatgcgggaacccatcttatcttttgaggtctgtatgcgttacattacattcaacaatgagggtatctaccctattgctatccttactacaacgttacgtaaggatgatattgtcaaagcatacatggaaccctgggatgtagataaagattcagtaatgattcttgaacttaatccagccccagggaaaaagaaaactcctgctaaagagatgcaggagtttattacccaagaattagtgccagcattcgaagcagcacaaactcagtatatcatctgtggtgattctgaatattacaaacagctaaccaaacaaggtaaagctgatgccaatattggctatgtaatggattgtgcttatgggaaccagaaagttatttacgttcccaattacagacaaatcttttatgacccagataagataaagactaagattgctttatccatgcaggctctgattgattatgtctctggttcttatgttgagccaggaactaagattatccattatgctgattacccattaactccagaagctatatctaagtggttagataagttactggagatggatgttccattagcagtagatatagaaaccttcagtctgaagcattatgactgtggtataggcactattacattctgctggaacaagcacgaagggattgcattccctgtggattatgaaccaattgagggggctactgaagctccttatggtagacaagttcacaacatgcttgttcgttctatgctcagggacttttttattaagtatctgaacaggcagatgtatcacaatattgcctttgacgtatacgcactcatttaccagttatttatgacagaccttctggatacggaagggttgttgcatggcatgagtatcatgctaagaaactgggattgcactaagttaattacctatctggctactaactcttgtgccggtaataagctaagtcttaaagaccaggctcaggaatatgctggtaactatgctcaagaagaaatcaatgacattaccagaatcccattagcagagttgttggaatacaacttagtggatggattatgtacctggtatgtctatgaaaagcattgggatactctggttaatgaccaacagttagatgtttatacaaacatctttaaacctgcatgtgaagatattattcaaatgcagttaactgactataacaatgcgttaaaaacaattgctgacagtaaagtaatcaaagattttacccgtcttcttaatgaagaatgggtagaaaaacagaaccagattctgaagaagaaacgagtgactttagctgatgctaaagagcagtttaatccaaactcaggtattcaattacagaagctactttttgagtttctggggttacctgtactgggtctgactgcaagtaaactacctgctactggtagtggcatactcaagtctttgaagaaccatactcaagataccagtattctggaaattcttgatgctctgattgattacaaagctgtagataaaattctgacagcatttattccagcattaaaaaatgccagacaaggaccagatggttggcattatctctttggtaatctgaacttag

SEQ ID NO: 23312 - DNA, 2286 bp, Homo sapiens
  SIMILAR (1153)..(1941): 301254mologous to Streptomyces coelicolor A3(2) putative ATP/GTP binding protein,accession number AL031515,Smith-Waterman Score=283.
  misc_feature (1)...(2286): n = a,t,c or g
atgactaatagtagtgaactggttcaggaattattcttagccgagttacgtcggctagataaagtgctggatagtatcattacacgtaatggggaaacattcgctgtatacaactcaacagggttcctgtatttaggggagttctattcgagttcccgttcatcacaacaacctccttctggtcatcgtctggctctagctaatcacctactggatgatatgcgggagtatctggaacaagcaggtaaacttctgctagaagtccatatggtgaatcagatggtctttcgtctggttcagggctgtaagacttatcaagacgttcgtgatgcattgccagaatgcctcattgctatggataaacaaggtcatctgaaatccttacagagaaccagaaaggcagcatttactctggataatgatgctatggctctccgtcatatgagaaaatcttgccgattatcgaatactatgcgggaacccatcttatcttttgaggtctgtatgcgttacattacattcaacaatgagggtatctaccctattgctttccttactacaacgttacgtacggatgatattgtcaaagcatacatggaaccctgggatgtagataaagattcagtaatgattcttgaacttcatacagccccagggaaaaagaaaactcctgctaaagagatgcaggagtttattacccaagaattagtgccagcattcgaagcagcacaaactcagtatatcatctgtggtgattctgaatattacaaacagctaaccaaacaaggtaaagctgatgccaatattggctatgtaatggattgtgcttatgggaaccagaaagttatttacgttcccaattacagacaaatcttttatgacccagataagataaagactaagattgctttatccatgcaggctctgattgattatgtctctggttcttatgttgagccaggaactaagattatccattatgctgattacccattaactccagaagctatatctaagtggttagataagttactggagatggatgttccattaacagtagatatagaaaccttcagtctgaaccattatcactgccgcacaggcncggtacgtaaatttgttgaacactgtatccgttcaggattggttccatttatcacttcatctcctggtatgggtaaatctgcaattgttcgtcagattgcagaagattttggcctgaaactgattgaccatcgtctgtctacttcagcaccagaagacctgtcaggtctgcctcgttttaaagaaaatggtcgtgctgaatttgctccatttgatgagctattcccattggaaggggatgctgtacctgaaggatataatggctggcttctctttctctatgagtttaactccgctcgtaaagagattcaggctgctgcttataaattggtactcgaccgtatgactggtcagaagaagctacatccttatgtagctatcgtatgtgctggtaacaaagcaactgaccgtgccattactaataacctgtctacagctatgcaatcacgtcttattcatctggaaatggagactgattttgatgtcttcatggaagatgtagccatccctaataagtgggatgagcgtgtaattgcattcctgaatgctaacccaaataaactgaatgattttgaaccagaccatcaagagaagactttctgttgttctcgtacatgggagttcgttaacaagattgtttccattctcccaccaggaccaattaatagtgaaatgactctactgttagcaggcactatcacttctggtgtagcaacatcattcgtccagtttactcaggtctatagcaacatggtgtctttgaatgagattttggataatcctaagaaagctcgtatgcctgaagacaataacctgttgtgggctgtagtcacttcactgattaacaatactgacgaagataatcattcgaaaatctttgattacgttgaacgtatgccatttacgttcaaggttttgtactaccgttccgtagtctggttccagctttggttaaattaccgaactggcgtgttgctgcaatcacattatctaaatatgttcatggttccaattaacaagaagggagttacagacctcctgtatgttgctggctttaacggtgaagaaattaccgtatatgccccaagtctggctgctgctaaacaaaaggcagttgaatactttcgtccaaagaaacgtgtagcccatactatttgggttcatctcgcagaggaaaactga

SEQ ID NO: 23313 - DNA, 2256 bp, Homo sapiens
  SIMILAR (859)..(374): 251254mologous to Staphylococcus aureus Orf15,accession number AF217235,Smith-Waterman Score=98.
ctactgttttcttagtaggtcgagtctggaatacgtgtttgtaccccaactcttgctcatcctcagtaatttccaacattccattggaatacttttcaagttctttaaggtcgatacgttctgctgatacaacagtagagaagtatgcttcaatgccattgttcttcagagaaccttttactggaacgaaagtcttcagttccattgcacgttcatctacttcgtgtttagccacagtaatcattacagtggaatccagttcatcagcagataggggattgctgagtttcttattgaactcatgcacacgttgtttaacttcattgaagcctataccactatctaccagagccagggcatacttaatcatgtggttattacgattgcctgtagcaattcgttgggcaaaccaacgttcgagattatccagattttgaaccttctgcatcccttgctggaatgcctcattcttactggttctaggaatgaaatctcttacgtctagcaggggagcatccatattgtagtaatacgtacccttagcacatgattcccatttcttggctcgttgattagcagactcgtccgttttaaatgggagccatgccataacgttatccatgaactctttatattcagcaccatcaagttcaagctgatagttcattgggataattaaccggaaacggttttcttcatcagtatggcgtttggttgtatatgtcatgaatcggtattctttcatcaattcatggcacacgtccaaactacacgtaccatccacatcaatgacaatcatattgaagccagcaatagcattctcttcagcacgatgccctcgacggaaatggtggttagcccagtgataacctgcttgctgggtcagtacatgtaactggtcaaatggaactttctctgcaatatagtcataagcaaagttctcaccataagaaacaatcatttcgttagtatcagtctctttcagtgtttcaccacggaagaactcaataccttcgttgtatgtcttcttaatgatgatatgctgcttatagccccatgcagtagctaaagtcatcatctcattacgtgcagcattcccactcttatagaatggtaaagcttcaagcaaatctgcatgagtaacttcagtaccaacagatgcaatatacttggctaatttaacgtaggctttttcacgattgaggatagtctggaatgcaacaccagactcttccaccagaagaattgcttgcttcagatgttccatctctaccatgatactgttatcaacaaatgcaaatgcacctgccaatttcagtgccttaaaatagcgatgttccagttctgctttacgaatctcttcgtggtcagctaaagctgctgcttgtttttcacactgaatcttgtagtcgattagtgcaataccaacatcatcttcaactgtcattttccaaccaaacttggatgcatctgcaaggctatgaaagtggttagcccacttattcacaacagcattgttatcctgcttaatcagattacgatagatttcttcagcactctggctcagatatgcacgtttatctgcctgacctacagcaaacagacaacgacgagaatagccagtttcaagaaagtcatagaagagttcctcagtctggctcccattgagaaagttgaactcaaggaacacagttaatacatcagcattagcgagaaggtttgaaccaatctcatcaatctgtaagttaatagcaccacatccagctaataagagtttatgacgtaactgtttcacagcaggaggtgtacctgagtcaaacgtaaatggataagcaccagtacgtctgtattcagcttccaccttgtcaaactcttccttctggtcagtagcattacgagcagaacgttcgttagcaattttccacagacggtcttctgctaaagcaggcatggtgtcttccataaaccgcttcttaaagccagccataaaaccgtcttcaacaatgttgaccgaatggcctttaccgaagcctgaagtagcaagagccactgcatagatgtttactggaatttcaccacggtctttagtgatgatagttgcacccatacatgaagccattttcgcaaggaaataggccacttctacacggaaaaaaccacggtcagtgttttgcgtcttgttacataacacatcaacgatttcttcaatcgccggatgatgtgagactccggtcaggtcaatcatgggaaatatct

SEQ ID NO: 23314 - DNA, 6193 bp, Homo sapiens
  SIMILAR (16)..(540): 331254mologous to coliphage T4 rIIA,accession number X52686,Smith-Waterman Score=228.
atgcaagtagctgactctactgaactgaccacatcagcaacgttaggtgctcaagatgctatggccttcggtatttctgaagacccagcattcttccaaatactcagtgctaacctctattctaatcagaaactggcaatggtacgtgagacattgtgcaatagctgggatgctcatattgaggggaataaaacagatattcctatccatgtaaccattgataaagatggtttccttatcttccgtgactatggttctggtattcctaaagataagattcaagaggtctatggggtatatggtgcatctaccaagaaagctaatactgcttccactggtggctttggcttaggatgtaaatcccctatggcctatacagacagttttactgtcacatctatgtgtgacggaaccaagactgtctatcacattgctaaatcttctgttgagactaacggtaaaccagggattattcctattgttagcgtacctactgaagaatccgggcttgaagttaaaattcagcttcagtcagaagatattttagaaattgattcatatattcgagccattgtattacatggtgagattaaatgtatttactgcaatcagtatacaggaccaaatacagtagaattactgcctgtactgggtatgtcttttgaaccaggtagctataacctagaccatagcacatggcataaatattacatgggcagtcattcaatatttatccgttatggtaatgttatgtaccctgctttggatacccctgctacacatgaagcattaaaactggttaaacagtttatgcaggttattaactgtagccgtatcgttgttcaagctgccccatcatcactagctgtagcacctagccgtgaaacactgtcatctcaaaaaatgaccgaagacggtatcgtaaatttggctgtagctttagtagataaaatggaagcagatattaaagctcgtcttccaaatgctattgaatatattgggaaggctattaaagaatatagtcctcaccgttttgaagtaaatagttatttgccttacaccaatttagtgcctgatgttattgtcagtcgttatatgtcctctactttattcagtaagcaatatgctcatctgtgtaagaaatggggaaatatggaaattgaccgtcaactagaacatcctgcactggctcatttctctggttctcaaaaagcccatctccgtaagcatttaaagagggctaaggatttacgtaattacagggaattaactaaagtatttactgatatggctattaagccaatgttcaaaacctttgctaaattggggattactaaaggtatttccctatttcattatcaatatggtgttgaactgtggcgtaataatattgttaatagtgtccgtagaatacactcattaaacttcatgacttatagttctaagaagtgccgtgtatttgttaccccacgtattaccaatattgaagatagtctggctgggtatccagagtttgataatctttctactgagacactggtaaaatataactcaatcattgtcaaagttggaaccaagaaaggtgaagcagaggctatgactaatctgctcactaaagcaggatacgaagtcattaatatggctgaatatcatgagtgggattgtatagctcgcagacgtaaagaggaacaagaggctaaattagccatttccaaattacaagctaagaaggctactaataagaaaaaggttagtcctaatcgtcttattagtatgaatatccttgaaataccaaaagagcatcgtagctattcaagtgaggtatgtggttctcactacgcttctcgttctcatgaccgaatggttgatgtagatactccccagtattacatcatgcaggaagatattaataactacacaggaaggcttggtgttctttctatgtggcaattaacccctgctaccattaaagctgtaactgttgtttgtcgtaataaaattgaacgtaataaagctattaagcgaggtgctgttcatttggatgaatggactgctccgtatattgcttcagttcttacatccaaacaattcattaagtatgtcactaaagaacgtcagaaaacgttaagtgatattggtatttactccaaacacctcagattactgagagaactggatattacatatgccccattgaaaggtctgcgttatgacccagaactggagaatgcttatctcttcttacaaagtagtagctatcctaagctacgtgcattgttagggaagggtctgattactgaagaagagtatcacttcctcagtgatgttgatgtgcattgcaagactttcagtaagtactcggaacttcgtaggataccgaagatgttccttgatattgatgctgggggttatatgttggctgcatgtactgtagacacattgcttcgtgaaatcgaacaattccctgaatcaatccctgcaatcaaattgcttgtaaaagctgctcttaaacggaatacagactgatgaaacgaaattatctcgccattattgccctgtcagtagacagtcatggttctactatggtcatcccccaagggatgcccgtgtaccacgtattgttgctgaagcaaaagaaaagaatcttaccccaggtaagattatcgaagtggatgtcactatcgaagctcagattcgtcaggagtttctggacgctgaacgtgatacaggtggctttgttaaattcttccgtattaccaagaagaagctacaagagttcttcttaggagaagaggaagaacaagtccctcatgtatcacctgtagagttaggtgctaaacccactgctttcaatgcttttattgctaatgctgtgggcaaaactcttgctgtacaacatgcatcattaaaagcacctgaaccagaaatgacagttactcatgagcgtttttacggtaactatgctgtatggattacagatgtagacccacggaatcatcgtattgaggttattcatgttatccgtgaaatctcaggaagaaccagtgaatatgtcaataacctgctggctcaaccaaccccattcaaagtatttgattggctcacagagacgcaggctaaagagtttgtaagacgtctgaataacactcagggtgttatctctgtctataacaaactggaagacggtattcctgttaaggttgctgtaaaggccacagagccaaccaataaggaaaagctggaagctgcatcaactaagctgaaagctatgggtgctgtcgctactgatgcttatgagtttcatactgacttgaatgagaatgaagagactattgtagctgtagtgaatgataaggtggttcctgacgttcagaacctacaccgtcacatccgtcaatctgcaaacctgaaagactataaaggctttactaagttccttgaacgtctgtctactgtaattgataaacgtcgccactctgttgaagacctgatgaagtttatggaaaaaggtgacctgcccattgcagatgatggctccattgttatcttcaaacgtctggaaagcaaagacaatcctgaacatctcaaagacgtaatggatgatgtatttgttgattgccattctaagaagattgagcaatgcgttggtatgcgtgtaatggttaaagaaaaccttgtagaccagaaccgtcgtaaagactgttctcatggtctgcacgtagcttctctgcaatacattcgtaatttctcaggcaacgtaaccattattggtaaagttgctccagaggatgtatttgcagtaccagaatacgatgttactaagatgcgtgtatctgcttatcacatcattaccaagctacctgatgctattcgtgaccatgttaataatggcaatccaatctccaccattgagggtggtacggaaatcctgaacatggttctcagtggtaatcaccctgaaccttcccgtcaggtactagttggtggtcattatggaaccaatctgacttattcagaactcactcgtaattatctggatgatgatgaagacagcgttattccagatgaaccagtaattaagaaaactgccttgaatatggaagagagctttacggcaactaatcctaaagctgaaccagtgaaggcaacggatgttaaacctattaagaagactaagatggaaattcttaaagacctttggaaccagttcctgaaagcagagacttctaatgaagctattacactggctgatgaaatcattgctgctaagggcaaatgtaagaaatcatgggcttctttaggcttcagtggtgacatggttcagaaactgattgatgctcgtgctaataaacctaagccagaaaaagcagtcaaacaggataaaaccgttgcacctaagaaaactacagtcactcgtagtcggaatgctgatgttattcgtagttatctaaatgacaaaggtatgtctgattactgtaaagctcatgccattcacgatgtgaaacgtgctgctaagaaatcttatgctgcactgggtctgactcctgaagaatgcagccaaattgataaactgaagcatcacctgaaaggatccctagatgaagggcaactctcttatgctatcgatttagttaaagggaatcctgatgctattaagaagttggttaaagaatctggtattgatgttctggatattaatccagaagaggaagttaaataccaagctggtaatcaccgtgtgtcagatgctgaagcagcatttgcaaccgaactggaagatgctaaatccactccagaaggacaagctactcttcagttaatttcgactacgtgggatgaccacagcaaacaggcattgctggaaaatcgtggtctggttaataccatcgttgaacagaaagctaacggtatttacgaccgtattgtttctgaaattgaacgactcaaaatcttaggccaaatcccaatcggtacagcattcctggatgcttataatcaagtcggtaactaccttgctgctaatggtggttttaatgatttgattaagcagaaacctgttgaacaacctgaaccagtggttcagccagtagcaactcgtgttgcaacacctaagtctgaaatcactaatactcaacaggcagcagcggcatccccatcacggaaatctagtattgatggtgctaactctgaccagatgcaaaccttcttctggctgaagaaagcaatcatcactgcccgtaaagagcagtacttcatgccactggcctctgtaactaacatgccgaagcattacggtaagaccatcaaggtatatgaatatgttcctctgctggatgaccgtaacatcaatgaccagggtattgatgcaagtggtgctactattgttaacggtaacctgtatggttccagcaaagacatcggtaacattacttccaaactgcctctactgactgaaaacggtggtcgagttaaccgtgttggttttactcgtattgctcgtgaaggttctattcacaagtttggcttcttctatgagttcactcaggaatctattgacttcgattctgatgatggcctgatggaacacctgtcccgtgaactgatgaatggtgctactcagattactgaagctgtactgcaaaaagacctgctggctgctgctggtactgttctgtatgctggtgctgctacttctgatgccaccatcactggtgaaggttctactccgtctatcgtttcttataagaacctgatgcgtcttgaccagattctgacagagaaccgtactcctactcagactaccattatcactggttcccgtatgattgatactaaagtcatcggtgctactcgtgttatgtatgtaggttctgaactggttccagaactgaaagcaatgaaagacctgttcggtaataaagcctttatcgaaactcagcactatgctgatgcaggtactatcatgaatggtgaagtcggttctattgataagttccgtatcattcaggttccagaaatgctgcactgggcaggtgctggtgcacaggctactgtagctaaccctggttaccgtacctctatggtatctggccaagagcactatgacgtttacccaatgctggtagtaggtgatgattcctttacctccattggcttccagactgacggtaagcacttaaatttaccgttatga

SEQ ID NO: 23315 - DNA, 3199 bp, Homo sapiens
  SIMILAR (793)..(1257): 261254mologous to coliphage T4 rIIB,accession number X04376,Smith-Waterman Score=156.
atgcctttagctaaacgacgaaggatagccatctcacgtaagattatcgaagtggatgtcactatcgaagctcagattcgtcaggagtttctggacgctgaacgtgatacaggtggctttgttaaattcttccgtattaccaagaagaagctacaagagttcttcttaggagaagaggaagaacaagtccctcatgtatcacctgtagagttaggtgctaaacccactgctttcaatgcttttattgctaatgctgtgggcaaaactcttgctgtacaacatgcatcattaaaagcacctgaaccagaaatgacagttactcatgagcgtttttacggtaactatgctgtatggattacagatgtagacccacggaatcatcgtattgaggttattcatgttatccgtgaaatctcaggaagaaccagtgaatatgtcaataacctgctggctcaaccaaccccattcaaagtatttgattggctcacagagacgcaggctaaagagtttgtaagacgtctgaataacactcagggtgttatctctgtctataacaaactggaagacggtattcctgttaaggttgctgtaaaggccacagagccaaccaataaggaaaagctggaagctgcatcaactaagctgaaagctatgggtgctgtcgctactgatgcttatgagtttcatactgacttgaatgagaatgaagagactattgtagctgtagtgaatgataaggtggttcctgacgttcagaacctacaccgtcacatccgtcaatctgcaaacctgaaagactataaaggctttactaagttccttgaacgtctgtctactgtaattgataaacgtcgccactctgttgaagacctgatgaagtttatggaaaaaggtgacctgcccattgcagatgatggctccattgttatcttcaaacgtctggaaagcaaagacaatcctgaacatctcaaagacgtaatggatgatgtatttgttgattgccattctaagaagattgagcaatgcgttggtatgcgtgtaatggttaaagaaaaccttgtagaccagaaccgtcgtaaagactgttctcatggtctgcacgtagcttctctgcaatacattcgtaatttctcaggcaacgtaaccattattggtaaagttgctccagaggatgtatttgcagtaccagaatacgatgttactaagatgcgtgtatctgcttatcacatcattaccaagctacctgatgctattcgtgaccatgttaataatggcaatccaatctccaccattgagggtggtacggaaatcctgaacatggttctcagtggtaatcaccctgaaccttcccgtcaggtactagttggtggtcattatggaaccaatctgacttattcagaactcactcgtaattatctggatgatgatgaagacagcgttattccagatgaaccagtaattaagaaaactgccttgaatatggaagagagctttacggcaactaatcctaaagctgaaccagtgaaggcaacggatgttaaacctattaagaagactaagatggaaattcttaaagacctttggaaccagttcctgaaagcagagacttctaatgaagctattacactggctgatgaaatcattgctgctaagggcaaatgtaagaaatcatgggcttctttaggcttcagtggtgacatggttcagaaactgattgatgctcgtgctaataaacctaagccagaaaaagcagtcaaacaggataaaaccgttgcacctaagaaaactacagtcactcgtagtcggaatgctgatgttattcgtagttatctaaatgacaaaggtatgtctgattactgtaaagctcatgccattcacgatgtgaaacgtgctgctaagaaatcttatgctgcactgggtctgactcctgaagaatgcagccaaattgataaactgaagcatcacctgaagaaactgctcatgaacgattcctcaaaagatacgttggtacaaactcagaactggtttctgaaggcagtacccagcccaacgagtaaaaacattagtacccaaattggttgtcatctggaagaagtagttgagatgctggaagaattggctccaaattctgaagaagcatacgatacacttcataatgccattgcagctttgactgaattgtcagaattaatgaagtcctctgataaagaagtttatgcacctaacagcaatcgcttagctattctggatgcactggcagaccagattgttacagcaactggcatcggtactttcttgggtatgaacgtacccggagcactcactgaagtgaaccgttctaattattcaaaatttgaagacggtgagcctgttttcaatgagaataagaaagtaatgaaaggaacttcttcccctgtctacaatgacagtagcattaaagagtttatgctgacccaacagatgcgtactgatgtccctgaactccatgcactgcatgaacagcttcgtggaaccattgaaggtaagcacggattcctgcctattaaagcagttccaggtattatcgactggattaaagatggtgatgaaatgagaaaagaagtcgaaggtcatttcatgactaagactgacactcgtattgttgcctataccaaccaacaggttgttaactataacaccttcattcgagccatgaatggattccacggagagttctgtattggtgaagagttagtaagtaactctgctattcagattggtgctggtgaccgccttagtattgaacaggaatgccagattgttgaccaggattctgctactcgtaagattctgattgattcctctggcatcgaattagaagtacgtgattgcaccctggatactggttatggtggtgtctttgaaggtatccctattccggtagatatggattatttcattcgtttgcaaaagtactatgcacaccaaaagaactgggaacgtcacttctatttgaaagaaacattccctgaacttcgagcattacatgcttctactgtgcataagtctcaaggttctacctacgacaccatctttattgatgctactgatttatctacttgccgtcagcctgatgtagtagcacgtctgctttacgtagcagtatctcgtgctcgtcatcgtgttgtgttctatggctctttggcagagaaatttggtg

SEQ ID NO: 23316 - DNA, 5736 bp, Homo sapiens
  SIMILAR (4048)..(4806): 991254mologous to Bacteriophage N4 single-stranded DNA- binding protein,accession number U29728,Smith-Waterman Score=1298.
atgtctgaaaaactatcaggtggttttaataactactatctggttcaggtaaccaaccctcaacgtatggaacagcctccatatcaggccgagtgtgaggatattatccaagcactgaatatgacctttgatgaagggtgtctgttcaaggcattgtggcgtaatgctgctgctcgtttaggtaatggtaaaccaggtaacaatgccgtttatgatgcagagaagatggttcattatgctaaccgcatttttattaaagaatccggtgggcagaaaaaagaagcagaagaaccagtttctgcggctctgaagaagggtgaagagattcatatgtctctgtctgaattattcaccctgttaactggtgaagcagcagaaggtgaagtaatgagccttgccggttggcatactcacgtaccaaaccgtttgggtgttatgcctattgctgttgcaatgagcaaagcagaacaagttgatgtagtacgtgccgatggaacgactattactcatgtatttcctcatgagattgactggtctgataagattgccccctttgctcgaatcactgcatggcgtttcactgtctggcttttgcatgacgagtatgattatgtgaaggataaaaagtatctttctgtgactaccctgcttaagccaattaagcacattgtcatgaagcatcgtgtagacctttctgtagaaagtatggacatcatggatttggtgtccacttctatgggtacaggcttacatgattctattgagaaggcatggcataacggacaccacaatgcattacgcaagttagggtatcctgagcgtgtcgttcagaatgttgtcatcaaccctacccctgagcagattgcatcaaatccaaacttaattcctgtatggatagaacaacgagcaactaaaaagattgctggttggactattgggggcaagttcgacattgttactgaaggtcttcttcaggatgtaaaatccacctccacttacacatgggtaaagggtggacgtgatgaagaacatagacttcaggggtcaatgtatcgttggttacatgacgacaagattaccgaagatgtgattcgtattaactacatcttcactgactggatgaaagcattagctacatctcaagaaaactatccaaagcatcgtgtgctgcataaagacattccattgatgtcttatgaagcgactgaagaatggattaaagccaagctggctctcattgataagtactgggatgctcctgaaagcgagattccagaatgtactgatgaagagttatggcgttctgacccagtgtttaaatactttgctgacccagagaaggcaaagcaacctggtgctcgttctaccaaaaacttccctactctctttgaggctcggaagttcatggcagagaaaggcaaaggcactattcttcatgttcctgagatatttcccatgattgacctgaccggagtctcacatcatccggcgattgaagaaatcgttgatgtgttatgtaacaagacgcaaaacactgaccgtggttttttccgtgtagaagtggcctatttccttgcgaaaatggcttcatgtatgggtgcaactatcatcactaaagaccgtggtgaaattccagtaaacatctatgcagtggctcttgctacttcaggcttcggtaaaggccattcggtcaacattgttgaagacggttttatggctggctttaagaagcggtttatggaagacaccatgcctgctttagcagaagaccgtctgtggaaaattgctaacgaacgttctgctcgtaatgctactgaccagaaggaagagtttgacaaggtggaagctgaatacagacgtactggtgcttatccatttacgtttgactcaggtacacctcctgctgtgaaacagttacgtcataaactcttattagctggatgtggtgctattaacttacagattgatgagattggttcaaaccttctcgctaatgctgatgtattaactgtgttccttgagttgtacgaccaaggcaagattaaacagaaacttactaagaatactgctgaaagtattcgtagtgaggaagttgatggtaaaactccagctaaccttcttctgtttggtacaccgagcaaacttctcaatgggagccagactgaggaactcttctatgacttacttgatactggctattctcgtcgttgtctgtttgctgtaggtcaggcagataaacgtgcatatctgagccagagtgctgaagaaatctatcgtaatctgattaagcaggataacaatgctgttgtgaataagtgggctaaccactttcatagccttgcagatgcatccaagtttggttggaaaatgacagttgaagatgatgttggtattgcactaatcgactacaagattcagtgtgaaaaacaagcagcagctttagctgaccacgaagagattcgtaaagcagaactggaacatcgctattttaaggcactgaaattggcaggtgcatttgcatttgttgataacagtatcatggtagagatggaacatctgaagcaagcaattcttctggtggaagagtctggtgttgcattccagactatcctcaatcgtgaaaaagcctacgttaaattagccaagtatattgcatctgttggtactgaagttactcatgcagatttgcttgaagctttaccattctataagagtgggaatgctgcacgtaatgagatgatgactttagctactgcatggggctataagcagcatatcatcattaagaagacatacaacgaaggtattgagttcttccgtggtgaaacactgaaagagactgatactaacgaaatgattgtttcttatggtgagaactttgcttatgactatattgcagagaaagttccatttgaccagttacatgtactgacccagcaagcaggttatcactgggctaaccaccatttccgtcgagggcatcgtgctgaagagaatgctattgctggcttcaatatgattgtcattgatgtggatggtacgtgtagtttggacgtgtgccatgaattgatgaaagaataccgattcatgacatatacaaccaaacgccatactgatgaagaaaaccgtttccggttaattatcccaatgaactatcagcttgaactgatggtgctgaatataaagagttcatggataacgttatggcatggctcccatttaaaacggacgagtctgctaatcaacgagccaagaaatgggaatcatgtgctaagggactgtcagttaaaagaggaaactatgtcagaagaatttgaacatggcgaaatgaatgaccagctaatcctgattgtaggattttctgctgctggtaaatcggcctcacttcgtaacatccgtaaccaggaacgttgggtatatctgaatacagaagctggtaaacgtctgccatttaaaaataacttcaatggtgttcgtattactgacccataccaaatcctggaatactttgaccaatgcattgaacatcgtgatgacgtggacggaatcattgtagattccctgactttcatgatggatatgctggaaactcagtatgtactcactgctgcaaacactcagaaggcttggggtgaatttgcacagttcttcaaaattctccttcaggagaaagtagttaaatttgccaagccagttatcttcactgctcacgtcaaagacgaagtagatgaacgtgcaatggaactgaagactttcgttccagtaaaaggttctctgaagaacaatggcattgaagcatacttctctactgttgtatcagcagaacgtatcgaccttaaagaacttgaaaagtattccaatggaatgttggaaattactgaggatgagcaagagttggggtacaaacacgtattccagactcgacctactaagaaaacagtaggtaaacgtattcgttctcctatgggtatgttcagtaagcaagagacttatatggacaatgatgcccaaaaacttctcgaccatctggcagagtattactctaccggtcaggcagctaaagcagagaaagcaacggataacctgggtggtggatttggtgcaaaagaatctgatatttatctggctaatctgaaagtagcttatgcaggtaaagcagcttctggtgctaacttcattcagattattgcagacctgactgaccttgatggacacagtgctggtgaatatcgtgagcaactgtacatcacttctggtactgaaaaaggctgcaagtgtacttatgaaaagaatggtaaggaatacttcctgccaggctacactgtaatcaatgacatcctggtaatgacttctggtgagactattcctgaagcagtcttcgaagagaaagtcgttaacgtatatgacttcgatgagaagaaagaagttgccaaatctgtcatggttccagtcaatgctatcggtggtaagtttgctgtagctattctgaaatctgaagaagataagcagactaaagatggctccggtaactatgtgtctactggtgaaactcgtttcactaataccatcgaaaaagtattccaccctgacctgcatctgactgttgttgaagcagaagaactgactgaacgtggtaaagaactgaccgttgaagaagcagtcttttgggacaaatggctggagaaaaacaaaggcgttacccgtgacaaaaccactaaaggcggtgcttccggtaaagctggtcagccaccaaaaccaggtgctactaatactggtgcgggtgcttctgctgcaaaatctctgttcgaaataatgcagatacctgtgcttggagttgaccccagttttcgtaactggggactagcacggggaatgctcgacttagagacgggaatactctctggattagacctgaagctggtagaaaccaaacctgatggaaccaagcaagtaaggcagaacagcaaagatatgcaagctgctgaggacattactactggtgtcatcgactggttcaaagaagcaaaggtcatctttgtagaggttcccgttggctcacaaagtgccaatggaatgaaatcctatggtgtttgtgtaggcatcttaggagcactcagggcactaggacatgagattattgaagttactcctatcgagaacaaagtagctctgtccggtattaagactgcttctaaagatgtgatgattagagcagctacaggattttatccagaggccaactggctcaaggataccaaagaatttaatgagaattttatcaaaggtataacaatgcaagtaattctgactcaacctgaaatcgaagctgctctgactggttatgtaaacgacctgatgtctgtacgtgaaggcatggaaattaaagtaaccttcaaagctactcgtggtgatgatggtgctactgcaatcgtagatattgtccctgctggttcccaatctgttgaagtggttgaggaaccaaagaaagagtcaaaggaacgcaagcatcgtccagtaacccagaccaatactgctgctgtcagtgctctggcttctgctactggtaagaaaaaagaagaagtagttgaagtagaaactactactgaaactgttgatgaaactgttgaagtagctgaagaagctgctgctcaggaagaagaaaaagaagtacaggaagaagaggctaaagaaccagtacaagccaaaccttctctgtttgcaggtctgaaacgttaa

SEQ ID NO: 23317 - DNA, 3121 bp, Homo sapiens
  SIMILAR (2882)..(2724): 331254mologous to Homo sapiens Human 5' EST secreted protein SEQ ID NO:487,accession number Y12456,Smith-Waterman Score=73.
ttaaccggaaacgttttcttcatcagtatggcgtttggttgtatatgtcatgaatcggtattctttcatcaattcatggcacacgtccaaactacacgtaccatccacatcaatgacaatcatatcgaagccagcaatagcattctcttcagcacgatgccctgcttgctgggtcagtacatgtaactggtcaaatggaactttctctgcaatatagtcataagcaaagttctcaccataagaaacaatcatttcgttagtatcagtctctttcagtgtttcaccacggaagaactcaataccttcgttgtatgtcttcttaatgatgatatgctgcttatagccccatgcagtagctaaagtcatcatctcattacgtgcagcattcccactcttatagaatggtaaagcttcaagcaaatctgcatgagtaacttcagtaccaacagatgcaatatacttggctaatttaacgtaggctttttcacgattgaggatagtctggaatgcaacaccagactcttccaccagaagaattgcttgcttcagatgttccatctctaccatgatactgttatcaacaaatgcaaatgcacctgccaatttcagtgccttaaaatagcgatgttccagttctgctttacgaatctcttcgtggtcagctaaagctgctgcttgtttttcacactgaatcttgtagtcgattagtgcaataccaacatcatcttcaactgtcattttccaaccaaacttggatgcatctgcaaggctatgaaagtggttagcccacttattcacaacagcattgttatcctgcttaatcagattacgatagatttcttcagcactctggctcagatatgcacgtttatctgcctgacctacagcaaacagacaacgacgagaatagccagtatcaaggaagtcatagaagagttcctcagtctggctcccattgagaagtttgctcggtgtaccaaacagaagaaggttagctggagttttaccatcaacttcctcactacgaatactttcagcagtattcttagtaagtttctgtttaatcttgccttggtcgtacaactcaaggaacacagttaatacatcagcattagcgagaaggtttgaaccaatctcatcaatctgtaagttaatagcaccacatccagctaataagagtttatgacgtaactgtttcacagcaggaggtgtacctgagtcaaacgtaaatggataagcaccagtacgtctgtattcagcttccaccttgtcaaactcttccttctggtcagtagcattacgagcagaacgttcgttagcaattttccacagacggtcttctgctaaagcaggcatggtgtcttccataaaccgcttcttaaagccagccataaaaccgtcttcaacaatgttgaccgaatggcctttaccgaagcctgaagtagcaagagccactgcatagatgtttactggaatttcaccacggtctttagtgatgatagttgcacccatacatgaagccattttcgcaaggaaataggccacttcaggaacatgaagaatagtgcctttgcctttctctgccatgaacttccgagcctcaaagagagtagggaagtttttggtagaacgagcaccaggttgctttgccttctctgggtcagcaaagtatttaaacactgggtcagaacgccataactcttcatcagtacattctggaatctcgctttcaggagcatcccagtacttatcaatgagagccagcttggctttaatccattcttcagtcgcttcataagacatcaatggaatgtctttatgcagcacacgatgctttggatagttttcttgagatgtagctaatgctttcatccagtcagtgaagatgtagttaatacgaatcacatcttcggtaatcttgtcgtcatgtaaccaacgatacattgacccctgaagtctatgttcttcatcacgtccaccctttacccatgtgtaagtggaggtggattttacatcctgaagaagaccttcagtaacaatgtcgaacttgcccccaatagtccaaccagcaatctttttagttgctcgttgttctatccatacaggaattaagtttggatttgatgcaatctgctcaggggtagggttgatgacaacattctgaacgacacgctcaggataccctaacttgcgtaatgcattgtggtgtccgttatgccatgccttctcaatagaatcatgtaagcctgtacccatagaagtggacaccaaatccatgatgtccatactttctacagaaaggtctacacgatgcttcatgacaatgtgcttaattggcttaagcagggtagtcacagaaagatactttttatccttcacataatcatactcgtcatgcaaaagccagacagcacctaaatcaataacttcagtgtttgtagtggaaccagtagatacagtaccagtctgtacctgggtcattgtagtcttacgaataatgattaagcctacttcacttggttcacgaaattctttctcgtaaacatctgagaagttagtccaactaacctgttcttcttcagtattggtactttcctcatcaggtctgccatcagagaatacactcttaatatgagtaactgtcttcagggtagctgacttaggagtatggttctgagatacctgagtccattcagaagtagaaggtaagtcatcagcagatggtacagatacagcaggatgaaccactgggtctgcaacactagtaggctgtatgtagtaatagttcacatacagatacattgcatcctgactgtaattctctggataaaaggataactcactaccatcagtagcagtgagtacaatcctgtcatcatccatgatgtctatttcaaactcttcagtaatacggtctggataattctcatagaggaatttatcagcccattcctcaaaatcaccaaatccaatcctactgctctgaacctgtacctcataacctgctttttgaggaacttgccatttaactacttcagggtctatctgagacagtattgacaagttcccataagcaataccaattgaagggtcatagttagttgcagcccaaccagggaat

SEQ ID NO: 23318 - DNA, 11742 bp, Homo sapiens
  SIMILAR (5518)..(6258): 271254mologous to Bacteriophage T4 DNA helicase,accession number M93048,Smith-Waterman Score=171.
atgggaatgactcccatgaatgcaaacagacgccgagagtgtatgagaacaggattctcaggtggtgcctactggactcagcccatttacagctggagacaggggaacctggattctgactgtgactcagccgatgccagctgtgtcaccatgggggaatccttttccaaacatgactcatatgtgcaggtggtgaaaggggacacttcggtgatgtctacatttctctccttcctggaagagaggcccctggggaagtcacaggtttgggagagatctggtctactggcaagatactgctttcagagatgcagatgccacctgggtaatgcccatgtctgcagtgcaactgactggtggcaaggggtccaggaagagaatatcaatttaaagcaacgggaaggaggagataaactgacatgcaccagggagctacgggctcacaaatggagagtgcagctctacaccccttatggcagaaaggctttcacagccaccttctgtgatctgtgcaatgagctgggagccttaatggaccctcagtgcacctctgacatgatggaaactgcaaagagatggaatttccacactggacagagaacagaagaatgttatttttctcactgcaaccttggaactggcatgctgcccctgggtgggaaaagagataagattcaagaggtctatggggtatatggtgcatctaccaagaaagctaatactgcttccactggtggctttggcttaggatgtaaatcccctatggcctatacagacagttttactgtcacatctatgtgtgacggaaccaagactgtctatcacattgctaaatcttctgttgagactaacggtaaaccagggattattcctattgttagcgtacctactgaagaatccgggcttgaagttaaaattcagcttcagtcagaagatattttagaaattgattcatatattcgagccattgtattacatggtgagattaaatgtatttactgcaatcagtatacaggaccaaatacagtagaattactgcctgtactgggtatgtcttttgaaccaggtagctataacctagaccatagcacatggcataaatattacatgggcagtcattcaatatttatccgttatggtaatgttatgtaccctgctttggatacccctgctacacatgaagcattaaaactggttaaacagtttatgcaggttattaactgtagccgtatcgttgttcaagctgccccatcatcactagctgtagcacctagccgtgaaacactgtcatctcaaaaaatgaccgaagacggtatcgtaaatttggctgtagctttagtagataaaatggaagcagatattaaagctcgtcttccaaatgctattgaatatattgggaaggctattaaagaatatagtcctcaccgttttgaagtaaatagttatttgccttacaccaatttagtgcctgatgttattgtcagtcgttatatgtcctctactttattcagtaagcaatatgctcatctgtgtaagaaatggggaaatatggaaattgaccgtcaactagaacatcctgcactggctcatttctctggttctcaaaaagcccatctccgtaagcatttaaagagggctaaggatttacgtaattacagggaattaactaaagtatttactgatatggctattaagccaatgttcaaaacctttgctaaattggggattactaaaggtatttccctatttcattatcaatatggtgttgaactgtggcgtaataatattgttaatagtgtccgtagaatacactcattaaacttcatgacttatagttctaagaagtgccgtgtatttgttaccccacgtattaccaatattgaagatagtctggctgggtatccagagtttgataatctttctactgagacactggtaaaatataactcaatcattgtcaaagttggaaccaagaaaggtgaagcagaggctatgactaatctgctcactaaagcaggatacgaagtcattaatatggctgaatatcatgagtgggattgtatagctcgcagacgtaaagaggaacaagaggctaaattagccatttccaaattacaagctaagaaggctactaataagaaaaaggttagtcctaatcgtcttattagtatgaatatccttgaaataccaaaagagcatcgtagctattcaagtgaggtatgtggttctcactacgcttctcgttctcatgaccgaatggttgatgtagatactccccagtattacatcatgcaggaagatattaataactacacaggaaggcttggtgttctttctatgtggcaattaacccctgctaccattaaagctgtaactgttgtttgtcgtaataaaattgaacgtaataaagctattaagcgaggtgctgttcatttggatgaatggactgctccgtatattgcttcagttcttacatccaaacaattcattaagtatgtcactaaagaacgtcagaaaacgttaagtgatattggtatttactccaaacacctcagattactgagagaactggatattacatatgccccattgaaaggtctgcgttatgacccagaactggagaatgcttatctcttcttacaaagtagtagctatcctaagctacgtgcattgttagggaagggtctgattactgaagaagagtatcacttcctcagtgatgttgatgtgcattgcaagactttcaacagtcgtaacctcaccttatggcaaccagatggttctactatggtcatcccccaaggggatgcccgtgtaccacgtattgttgctgaagcaaaagaaaagaatcttaccccaggtaagattatcgaagtggatgtcactatcgaagctcagattcgtcaggagtttctggacgctgaacgtgatacaggtggctttgttaaattcttccgtattaccaagaagaagctacaagagttcttcttaggagaagaggaagaacaagtccctcatgtatcacctgtagagttaggtgctaaacccactgctttcaatgcttttattgctaatgctgtgggcaaaactcttgctgtacaacatgcatcattaaaagcacctgaaccagaaatgacagttactcatgagcgtttttacggtaactatgctgtatggattacagatgtagacccacggaatcatcgtattgaggttattcatgttatccgtgaaatctcaggaagaaccagtgaatatgtcaataacctgctggctcaaccaaccccattcaaagtatttgattggctcacagagacgcaggctaaagagtttgtaagacgtctgaataacactcagggtgttatctctgtctataacaaactggaagacggtattcctgttaaggttgctgtaaaggccacagagccaaccaataaggaaaagctggaagctgcatcaactaagctgaaagctatgggtgctgtcgctactgatgcttatgagtttcatactgacttgaatgagaatgaagagactattgtagctgtagtgaatgataaggtggttcctgacgttcagaacctacaccgtcacatccgtcaatctgcaaacctgaaagactataaaggctttactaagttccttgaacgtctgtctactgtaattgataaacgtcgccactctgttgaagacctgatgaagtttatggaaaaaggtgacctgcccattgcagatgatggctccattgttatcttcaaacgtctggaaagcaaagacaatcctgaacatctcaaagacgtaatggatgatgtatttgttgattgccattctaagaagattgagcaatgcgttggtatgcgtgtaatggttaaagaaaaccttgtagaccagaaccgtcgtaaagactgttctcatggtctgcacgtagcttctctgcaatacattcgtaatttctcaggcaacgtaaccattattggtaaagttgctccagaggatgtatttgcagtaccagaatacgatgttactaagatgcgtgtatctgcttatcacatcattaccaagctacctgatgctattcgtgaccatgttaataatggcaatccaatctccaccattgagggtggtacggaaatcctgaacatggttctcagtggtaatcaccctgaaccttcccgtcaggtactagttggtggtcattatggaaccaatctgacttattcagaactcactcgtaattatctggatgatgatgaagacagcgttattccagatgaaccagtaattaagaaaactgccttgaatatggaagagagctttacggcaactaatcctaaagctgaaccagtgaaggcaacggatgttaaacctattaagaagactaagatggaaattcttaaagacctttggaaccagttcctgaaagcagagacttctaatgaagctattacactggctgatgaaatcattgctgctaagggcaaatgtaagaaatcatgggcttctttaggcttcagtggtgacatggttcagaaactgattgatgctcgtgctaataaacctaagccagaaaaagcagtcaaacaggataaaaccgttgcacctaagaaaactacagtcactcgtagtcggaatgctgatgttattcgtagttatctaaatgacaaaggtatgtctgattactgtaaagctcatgccattcacgatgtgaaacgtgctgctaagaaatcttatgctgcactgggtctgactcctgaagaatgcagccaaattgataaactgaagcatcacctgaagatacatactatggccaaagtttatcgtgctaaccgtaaagcccatgatgacgatattattcgtatgaatgcagtcggtttatcattgggaaccattgctaaaacactgggtgttcaccccactacagttaccttacgattacgctctcttggtattgaaccagccgacacacgtcgaacatttatggagaacgtactagcaccattacctactcacgtagctgattggttatcagaacaagtaggaccaaaatatgagattcgacaatacgttcgagacttattactggaagcctacaataatcgtcataatcataaggaaactgctcatgaacgattcctcaaaagatacgttgaagtagttgagatgctggaagaattggctccaaattctgaagaagcatacgatacacttcataatgccattgcagctttaactgaattgtcagaattaatgaagtcctctgataaagaagtttatgcacctaacagcaatcgcttagctattctggatgcactggcagaccagattgttacagcaactggcatcggtactttcttgggtatgaacgtacccggagcactcactgaagtgaaccgttctaattattcaaaatttgaagacggtgagcctgttttcaatgagaataagaaagtaatgaaagaggcagcggcagaaggtttcttcgactttctgctcgaccccaatgcttctgaacttcgtattagtggacctggtggtacaggcaagacatttacaatggctcatatgattgacgagattatgcctcgttatcatgagacatgtagtctgatgggaatccctgctctctataacgaagttattatgactgctactactaataaggcagcagaagtattagcccgtgcaacaggacgtcctacgtctacctatcattcctttcaaggtctgacagtacggaataacctgaagactggggaagcagacctgattccatctaagtccttcagtatcaaaaagaataaggtcatttttattgatgaagcatcaatgattgaccgtaaactgaagaagtttattaacgaaggtactcaccaaagtaagattgtttacttaggcgataaatgccaattgttacctgtaaaggaaacttcttcccctgtctacaatgacagtagcattaaagagtttatgctgacccaacagatgcgtactgatgtccctgaactccatgcactgcatgaacagcttcgtggaaccattgaaggtaagcacggattcctgcctattaaagcagttccaggtattatcgactggattaaagatggtgatgaaatgagaaaagaagtcgaaggtcatttcatgactaagactgacactcgtattgttgcctataccaaccaacaggttgttaactataacaccttcattcgagccatgaatggattccacggagagttctgtattggtgaagagttagtaagtaactctgctattcagattggtgctggtgaccgccttagtattgaacaggaatgccagattgttgaccaggattctgctactcgtaagattctgattgattcctctggcatcgaattagaagtacgtgattgcaccctggatactggttatggtggtgtctttgaaggtatccctattccggtagatatggattatttcattcgtttgcaaaagtactatgcacaccaaaagaactgggaacgtcacttctatttgaaagaaacattccctgaacttcgagcattacatgcttctactgtgcataagtctcaaggttctacctacgacaccatctttattgatgctactgattatctacttgccgctcagcctgatgtactctggcttatcaatctggtgacccaagaaaaggttcaggcagcacaggctcagtatggggatgtattaaaaacccttcctgctggtgttgttatggactacatgaacaaccttcaaggacagggtactgctggtattggtcaacgtcgcagcttattcaacttaggtgttgatatacgtaacgatgcggatactcaggctgctatgcagttactgaataatattcgtcgtggtgcatacagtgctgacgatgctcgtatgcttgcagagggtacgttcgaccaaatgtcaccaggagcagtaagtcgtgcactatctcagttagatagagcatatccaggtgcatatactccgggaactggttctgcatccctatctcctcctggtactcagggtactcggaatggttctgcatatgacactacctataagttcacaccaactgatgtacctattactcagatgaacttaggtgaggtggttcagcatcaagacactatgaagaagacactaggtgcttctcctgttggtgcataccagattaaccaagatactcttaaagactttgctccaaaggtatttggtgaagattggcagaacattcctatgtctccggagaaccaagacaaactgggtgaagctatttttaatgcccgtaagaatggcaatctgaagagtacatgggctgctttaccggatgatactcctggtgcttataagaacttgtcatgggatgaaatgaaggattacattgctcaagcagaaacaggtaattctattaatccattacaggaacaagcattcacttctgttgctggtaatactgttggtactcgtaatatgcagaatattggtaatactctgctgccagaataccaagctgctactgttgacccttctacgactggtcaggtggctaaacgtattattgatagcaatgaactgaaaggcattaaccaaggtgcactggttcgacaaatcaatgaggtagcaaaacagaatgctatttctcccgctatggcaggagcaatcattcaacgtagtatcaccggtaaaccagagggatggtttagtggtattcgaaatgcctttgatactgatgttattgatttgggtggtgattaccaactggataaagcagccgtagaagcaaatgcaaaacttgcaactactggtactgctattgaacagaatgctcgtaatcagcttactgcacaaattcaatcaaacatctatgcagcacagaatacgttagatactgcacttgctgatttacgtgaagtacagcgtcgtattcagaccggtcaggaaaaccttagaagtgtactacctcgctatcaggagcgagttaacactgctaaacgtcttcttgatggtgctcgtagtgctgtagctgctgaccctcagaatttggatattaagagcctacaaaatattaaacaggaagagagcgaggcaaaccggagaagtttaggcagagatgccggacgtcgattggacagcgtaaccaatgcaaagcaagttgacgtctctactgcaaccgcccagaagaaagctgaacaaggtgtcactactcctcttgtttctcctgatgctgcttatcaaatgcaagctgcccgtactggtaatgttggggctaatgcatttgaaccagggacagtgcaatcagatttcatgaatctgactccaatgcaaatcatgaataagtatggggttgagcaaggcttacaacttatcaacgctcgtgctgatgcagggaaccaggtattcaatgattcagttactacaagaactcctggggaagaactgggggatattgctactggtgttggtcttggttttgttaatacccttgggggcattggtgctcttggggcaggcttactcaacgatgatgcaggtgctgttgttgctcaacaattgagtaagtttaatgatgctgtccatgctacccaaagccaagcattacaagataaacgtaagctctttgctgctcgtaacttaatgagtgaagtagagagtgaacgtcagtatcaaacagataagaaagaaggcactaatgacatagtagcttccttatctaaatttggacgtgattttgtaggttcaattgagaacgctgcccaaactgactccattatttctgatgggttagcagaaggggtaggttctctattaggtgctggtcctgtattaaggggtgcatctttactgggtaaagcagttgttccagcaaatactcttcgtagtgctgcattggctggtgctattgatgcaggtactggtactcagtccctggctcgtattgcttctactgtaggcagagctgcaccaggtatagttggtgttggtgcaatggaagctggtggtgcataccaacaaactgctgatgaaattatgaagatgagtcttaaagacttagagaagtctcctgtttatcaacaacatattaaagatggtatgtctccagaacaggctcgtcgtcagactgcatctgaaactggtcttactgctgctgctattcaattacctattgctgctgcaactggtcctctggtatctcgttttgagatggctcctttccgtgctggttctttaggtgctgtaggtatgaaccttgcccgtgaaacagtggaagaaggtgttcagggtgctacaggccaactggctcagaatattgcacagcaacaaaacattgataagaaccaagacctgcttaaaggtgtcggtacacaagctggtttaggtgctctttatggctttggttctgctggtgttgtacaggctccggctggtgctgctcgtttagcaggtgctgcaactgctcctgtattgcgtaccacaatggctggtgttaaagctgctggtagtgtagcaggtaaggttgtttcccctattaagaacactttggtagctcgtggtgagcgggttatgaagcagaatgaagaagcatctcctgttgctgatgactatgttgcacaggcagcacaagaagctatggctcaagcaccagaagcagaagttactattcgtgatgctgttgaagcaactgatgctactccggaacagaaagttgcagcacaccagtatgtttctgacttaatgaatgctactcgttttaatcctgaaaattatcaggaagcaccagagcatattcgtaatgctgtagctggttctactgaccaagtacaggttattcaaaagttagcagacctagttaacacattagatgaatctaatcctcaagcactgatggaagctgcatcttatatgtatgatgctgtttcagagtttgagcaattcattaaccgtgaccctgctgcactggatagtattcctaaagattctccggctattgagttactcaatcgttatacaaatctgacagctaatattcagaacacaccaaaagtaattggtgcactgaatgttattaatcgaatgattaatgaatctgcccagaatggttctttggatgtgactgaagaatccagtccacaggaaatgcagaacgtagcattagctgctgaagtagctcctgaaaagctcaatccagaatctgtaaatgttgttcttaaacatgctgctgatggtcgtattaaactgaataatcgccaaattgctgcccttcagaatgctgctgcaatcctgaagggggcacgggaatatgatgcagaagctgcccgtcttggattacgtcctcaagacattgtgagtaaacagattaaaacggatgagagcagaactcaggaaggacaatactctgcgttgcaacatgcgaataggattcggtctgcgtataactctggtaatttcgagttggcctccgcttacctgaacgactttatgcagttcgcccagcacatgcagaataaggttggagcgttgaatgagcatcttgttacggggaatgcggataagaataagtctgtccactaccaagctcttactgctgacagagaatgggttcgtagccgtaccggattgggggtcaatccctatgacactaagtcggttaaatttgcccagcaagttgctcttgaagcgaaaacggtagcggatattgctaatgccctcgcttcggcttacccggaactgaaggtcagtcatataaaagttactccattggattcacgtcttaacgcccctgctgctgaggtggtcaaggcattccgtcaaggcaatcgagacgttgctttttctcaacagaaagctgactccgtgaatcaggttaaagaaactcctgttacaaaacaggaaccagttacatctactgtacagactaagactcctgttagtgaacctgttaaaacagaacctactactaaagagtctagaccacaggctataaaagaacctgtgagccagtctgaaaaacgggatgttaaccttactaatgaggacaccatcaagcaacctactgaatctgttaaagaaactgaaacttctgcaaaagaaagcacagttacagaagaattaagagaaggtatcgatgctgtttacccctcattggtaggtactgctgattctaaagcagagggtattaagaactatttcaaattgtcctttaccttaccggaagaacagaaatcccgtactgttggttcagaagcacctctaaaagaggtgtataccgatggttacgacgggcatagtctacgtgcatatgcttacttcggtgagatgatgcctgacattgaagatacggtagagtctgttaattctattcaggagaagtacaaagcatatcgtcaggattctaaagcacctacctttgctcttacctatcagggcacgtacatcactttgatgaagaactgtggtttccctgaacagaaagctcgaatggttgaggaacgttatcacacactttataaggtaagtgatgactgggttcaggctaaactagaccaagctgcaaaagatggttatgtaaccgtagcatttggcctgagagtcagaacccccttacttcaacaagttatccgtggaaccagtaaaactccttatgaagctgaagctgaaggacgtactgctggtaatgcattaggccaaagttggtgtcttctgaataaccgtgctggttcagaggtcatgcgtaag

SEQ ID NO: 23319 - DNA, 4623 bp, Homo sapiens
  SIMILAR (4623)..(4075): 621254mologous to Yersinia pestis putative lipoprotein,accession number AL117211,Smith-Waterman Score=615.
tcaatcatgaatttcttccaggttatgagtaggaacagtgaagaatgggtagctgccatcttcctcaagtgttactgaggtatgtgggacaccagtagcacgagtgtcatcatgagcaacgccgtaatcatactgaaggcattcataaacaatgtctcctttctcatgtgactgaccagcagcactacccattacaggcttatcctgagtataaacgtaaatttctgtccatgtggctaatgcattttcccatgtagatgggtcagtaggctcatttaagcctttactcattacatgctgaggagttgcttgatgttcagtaggacttgcgtgaacaggcttactttcaaccaatttagagaacaaacgcaagtcttcttcgatagtagaaggagtacctttaaagttgttataggaagcacgggcacaacgagcagcagagatttttactaacaggcaattaatctcatcactacttggttcatcacgagtaattcgttgatgtttgcaataatcgtaagcatcgaggtaatcactattagtaatgtacggcaaatgccattccccagccaacagggtacggggttttgattggtcatactgttccttcatcttagtagccaattcacaaatctctggttgagcatcgggatgaatgcgtaaaccaaagaagttattccattgagtagctgtcactactacacggatatgcgtgaatggttccagaatacgattaacaatctgcttatgtacttgtccgcgacgaagttgttcagcatatacagcagcagcagaggcagcattttcccaaatgaactcagcatccttaatctccataggagtgagttcttcacttgcctgcattcctttctggttcttaccccaatgtactggcattactggttcattgcgaacttgctcaataaggcgttgggtaggaatagcacgactactggaagcattacgattaagtgctcggtgagtcataaattctgaatgaatgaaacgcggataaaccagttccattgttaccaggcggtcaccagaaagagtaatactatcagcgaggatttttgcattaatcatagaaagccttgaatagcttgaggtggttaaagatgtccttatggaaccaagaacaatcttatgtgctccagtgtaggctagtttaaattctgcttttggtagagtagacagtaattcctgcccttctctaagagcaagtacacaagaaatgccctgccacttatccatagacatttcaaagttgtcagcaaggtctttatacaaccagtacaaagcacctaatgctgttttacaggtttcttgtttaccttcttgtttagctacttgagccagtgtcagagcaactaagatttgctcaacaacaagacgtaaagcaacagcatcctgtttaccttgaaccagggcactaacagccttaatagctttctggttcaaggctaaaccgtcttctgaagtcttttgatacagctttggtgttcgtttttctgcgatgtctttagcaccatcaagtgctttagctacgttacgacggatagagtcataacctacctgggtatcaatggaatcaccgttagtaaaagtaattacaccacggccttcactgttttcagtaacgtaagctacgttacgagcaacaacagtaactttctgaccattaacctgagcaatacctgaaccagcagggatatgaagttttttacgaccgtgataaaccagttctaaagtcagatagcctgaccatcctggttcaataacggtattgaatacagataatgtacgccttgcccatgtagatttgtcatggacaatacctactaggccagcaggtacattgaaacgttccattgcagaagctaatgtgaaagtgccaaacttccacttggtctttccttcatctttaatcttgatgcagggaatcaaaccaagaaatcggtagaaggtaacatcctgtttaatacggatgtcataaccagcttctcccagtccaaatgtagtctcacctgaactgagtttactgttaaccatgcctttcccaaatggaacttgtgcaccagggttacgaataactacccatatgacaggaatgtcaaatggcaatggctccatcggtctgacttctaagtcagtaaagataatggcagcagtaggcttatgcttaataatccactcacgtacaggaaccagactagtaccaccccgtcctttgatagtgacatcagtaaacttatcaccatcttcaatgacttgttcatctacaatctctgtagtgaactgaactagagtcatcttctgaggctgatatttctcttttacataggccacttcagagctaaagcgtaaagcatctttaggtttaatggagccagatgtatcgaggaaataagccagatgttccagtctaccgtcatcatccataggagatggtaggtacatatcagggtatctacgattaggccgttgccatgagtagtaagtttcttgcaggtcattgaagaagcgttcaagtaaaacctgccacggtactactggtttcaggaattgagtaataacttcttccatttttccaggtaataccccaggcaaagagccaccagatagtttctgttggtgcatggctcttactacattattgacaatattcacctgactagccttcgaagtggaaggtttcatgtcaccacctgaaccagtcccaaaagcacctgatgctttaggaggacgtatctgtttgctcatgaggtcatcatagatttgttcttcagcccaaccagcatacttagggtctttccagcaattttcgattcctataaagctgtagccatcctgaataagctgattgttgatataaatatcgcaggcataattccatacttctgggtcacgagaacccatacgaacagaatgcagtaagccaacatgccatagttcatgcataagtactgttacacgagattcaggtaatagactttcaaaccaatcaggattccattcgagatgctcaccatcggtttgtgctgtatcacagccatcttttacccaacggaacttcagagaacataacagtgaaccaaagaatgcagcagttttgcccataaaggctttagcctgacatctgtcatattcacgggttaattgagcatctgtcatggacatatcagttttcctggaacggtagtacaaaaccttgaacgtaaatggcatacgttcaacgtaatcaaagattttcgaatgattatcttcgtcagtattgttaatcagtgaagtgactacagcccacaacaggttattgtcttcaggcatacgagctttcttaggattatccaaaatctcattcaaagacaccatgttgctatagacctgagtaaactggacgaatgatgttgctacaccagaagtgatagtgcctgctaacagtagagtcatttcactattaattggtcctggtgggagaatggaaacaatcttgttaacgaactcccatgtacgagaacaacagaaagtcttctcttgatggtctggttcaaaatcattcagtttatttgggttagcattcaggaatgcaattacacgctcatcccacttattagggatggctacatcttccatgaagacatcaaaatcagtctccatttccagatgaataagacgtgattgcatagctgtagacaggttattagtaatggcacggtcagttgctttgttaccagcacatacgatagctacataaggatgtagcttcttctgaccagtcatacggtcgagtaccaatttataagcagcagcctgaatctctttacgagcggagttaaactcatcgagaaagagaagccagccattaaatccttcaggtacagcatccccttccaatgggaatagctcatcaaatggagcaaattcagcacgaccattttctttaaaacgaggcagacctgacaggtcttctggtgctgaagtagacagacgatggtcaatcagtttcaggccaaaatcttctgcaatctgacgaacaattgcagatttacccataccaggagatgaagtgataaatggaaccaatccattccacttattaatggcttccagttgcattacatttgggttctcggtgagtgcttcaccacgtaaacgaatagcatctgctacacccttagcttgttcacgttccatattagcttcagccacacgttgctgaatctcttgctcacgttgcagagttttctgagtagcttctactttggcattaatggcacgtttaacgttatcagggtattcaggagcaccaatccaggagatagcaataatatcaatccccactggttccatctctttacggattgtgtcagtgacactatccagtagcttagatttaccaccatcaataaaggtatcagtgttaatcaggttaccctgtctgttaagtacatcagcaatacgttgtcgtaaatcctgctcggtaatttcattaactcccttacgatacgtctggaagatattagttaccttagtagggttcactttatagctgatagccatctggtggcctatctgagtaccatcagacagttggaagtagaacagaccgtcataggtcttcat

SEQ ID NO: 23320 - DNA, 19861 bp, Homo sapiens
  SIMILAR (18788)..(18931): 931254mologous to Bacteriophage N4 single-stranded DNA- binding protein,accession number U29728,Smith-Waterman Score=235.
atggctagtattgattctattgccgtatgtaatccacggcaggtacgtaaatttgttgaacactgtatccgttcaggattggttccatttatcacttcatctcctggtatgggtaaatctgcaattgttcgtcagattgcagaagattttggcctgaaactgattgaccatcgtctgtctacttcagcaccagaagacctgtcaggtctgcctcgttttaaagaaaatggtcgtgctgaatttgctccatttgatgagctattcccattggaaggggatgctgtacctgaaggatttaatggctggcttctctttctcgatgagtttaactccgctcgtaaagagattcaggctgctgcttataaattggtactcgaccgtatgactggtcagaagaagctacatccttatgtagctatcgtatgtgctggtaacaaagcaactgaccgtgccattactaataacctgtctacagctatgcaatcacgtcttattcatctggaaatggagactgattttgatgtcttcatggaagatgtagccatccctaataagtgggatgagcgtgtaattgcattcctgaatgctaacccaaataaactgaatgattttgaaccagaccatcaagagaagactttctgttgttctcgtacatgggagttcgttaacaagattgtttccattctcccaccaggaccaattaatagtgaaatgactctactgttagcaggcactatcacttctggtgtagcaacatcattcgtccagtttactcaggtctatagcaacatggtgtctttgaatgagattttggataatcctaagaaagctcgtatgcctgaagacaataacctgttgtgggctgtagtcacttcactgattaacaatactgacgaagataatcattcgaaaatctttgattacgttgaacgtatgccatttacgttcaaggttttgtactaccgttccaggaaaactgatatgtccatgacagatgctcaattaacccgtgaatatgacagatgtcaggctaaagcctttatgggcaaaactgctgcattctttggttcactgttatgttctctgaagttccgttgggtaaaagatggctgtgatacagcacaaaccgatggtgagcatctcgaatggaatcctgattggtttgaaagtctattacctgaatctcgtgtaacagtacttatgcatgaactatggcatgttggcttactgcattctgttcgtatgggttctcgtgacccagaagtatggaattatgcctgcgatatttatatcaacaatcagcttattcaggatggctacagctttataggaatcgaaaattgctggaaagaccctaagtatgctggttgggctgaagaacaaatctatgatgacctcatgagcaaacagatacgtcctcctaaagcatcaggtgcttttgggactggctcaggtggtgacatgaaaccttccacttcgaaggctagtcaggtgaatattgtcaataatgtagtaagagccatgcaccaacagaaactatctggtggctctttgcctggggtattacctggaaaaatggaagaagttattactcaattcctgaaaccagtagtaccgtggcaggttttacttgaacgcttcttcaatgacctgcaagaaacttactactcatggcaacggcctaatcgtagataccctgatatgtacctaccatctcctatggatgatgacggtagactggaacatctggcttatttcctcgatacatctggctccattaaacctaaagatgctttacgctttagctctgaagtggcctatgtaaaagagaaatatcagcctcagaagatgactctagttcagttcactacagagattgtagatgaacaagtcattgaagatggtgataagtttactgatgtcactatcaaaggacggggtggtactagtctggttcctgtacgtgagtggattattaagcataagcctactgctgccattatctttactgacttagaagtcagaccgatggagccattgccatttgacattcctgtcatatgggtagttattcgtaaccctggtgcacaagttccatttgggaaaggcatggttaacagtaaactcagttcaggtgagactacatttggactgggagaagctggttatgacatccgtattaaacaggatgttaccttctaccgatttcttggtttgattccctgcatcaagattaaagatgaaggaaagaccaagtggaagtttggcactttcacattagcttctgcaatggaacgtttcaatgtacctgctggcctagtaggtattgtccatgacaaatctacatgggcaaggcgtacattatctgtattcaataccgttattgaaccaggatggtcaggctatctgactttagaactggtttatcacggtcgtaaaaaacttcatatccctgctggttcaggtattgctcaggttaatggtcagaaagttactgttgttgctcgtaacgtagcttacgttactgaaaacagtgaaggccgtggtgtaattacttttactaacggtgattccattgatacccaggtaggttatgactctatccgtcgtaacgtagctaaagcacttgatggtgctaaagacatcgcagaaaaacgaacaccaaagctgtatcaaaagacttcagaagacggtttagccttgaaccagaaagctattaaggctgttagtgccctggttcaaggtaaacaggatgctgttgctttacgtcttgttgttgagcaaatcttagttgctctgacactggctcaagtagctaaacaagaaggtaaacaagaaacctgtaaaacagcattaggtgctttgtactggttgtataaagaccttgctgacaactttgaaatgtctatggataagtggcagggcatttcttgtgtacttgctcttagagaagggcaggaattactgtctactctaccaaaagcagaatttaaactagcctacactggagcacataagattgttcttggttccataaggacatctttaaccacctcaagctattcaaggctttctatgattaatgcaaaaatcctcgctgatagtattactctttctggtgaccgcctggtaacaatggaactggtttatccgcgtttcattcattcagaatttatgactcaccgagcacttaatcgtaatgcttccagtagtcgtgctattcctacccaacgccttattgagcaagttcgcaatgaaccagtaatgccagtacattggggtaagaaccagaaaggaatgcaggcaagtgaagaactcactcctatggagattaaggatgctgagttcatttgggaaaatgctgcctctgctgctgctgtatatgctgaacaacttcgtcgcggacaagtacataagcagattgttaatcgtattctggaaccattcacgcatatccgtgtagtagtgacagctactcaatggaataacttctttggtttacgcattcatcccgatgctcaaccagagatttgtgaattggctactaagatgaaggaacagtatgaccaatcaaaaccccgtaccctgttggctggggaatggcatttgccgtacattactaatagtgattacctcgatgcttacgattattgcaaacatcaacgaattactcgtgatgaaccaagtagtgatgagattaattgcctgttagtaaaaatctctgctgctcgttgtgcccgtgcttcctataacaactttaaaggtactccttctactatcgaagaagacttgcgtttgttctctaaattggttgaaagtaagcctgttcacgcaagtcctactgaacatcaagcaactcctcagcatgtaatgagtaaaggcttaaatgagcctactgacccatctacatgggaaaatggcattagccacatggacagaaatttacgtttatactcaggaggccatatggctaaaccacgtaaattccgtattaaggataagcctgtaatgggtagtgctgctggtcagtcacatgagaaaggagacattgtttatgaatgccttcagtatgattacggcgttgctcatgatgacactcgtgctactgagctatctaaagaacgccaactatggctatctcctaataaaacaatgattcaggcagatctggcagaagtacaacgtatgctggatgaatggtctgaagaccaaatgttcattgatggcaatgcagaagcaataaccgatgacatggcctctgatatggctgtgtttgtattacaagcaatggctgaaaagcctgactctactgaactgaccacatcagcaacgttaggtgctcaagatgctatggccttcggtatttctgaagacccagcattcttccaaatactcagtgctaacctctattctaatcagaaactggcaatggtacgtgagacattgtgcaatagctgggatgctcatattgaggggaataaaacagatattcctatccatgtaaccattgataaagatggtttccttatcttccgtgactatggttctggtattcctaaagataagattcaagaggtctatggggtatatggtgcatctaccaagaaagctaatactgcttccactggtggctttggcttaggatgtaaatcccctatggcctatacagacagttttactgtcacatctatgtgtgacggaaccaagactgtctatcacattgctaaatcttctgttgagactaacggtaaaccagggattattcctattgttagcgtacctactgaagaatccgggcttgaagttaaaattcagcttcagtcagaagatattttagaaattgattcatatattcgagccattgtattacatggtgagattaaatgtatttactgcaatcagtatacaggaccaaatacagtagaattactgcctgtactgggtatgtcttttgaaccaggtagctataacctagaccatagcacatggcataaatattacatgggcagtcattcaatatttatccgttatggtaatgttatgtaccctgctttggatacccctgctacacatgaagcattaaaactggttaaacagtttatgcaggttattaactgtagccgtatcgttgttcaagctgccccatcatcactagctgtagcacctagccgtgaaacactgtcatctcaaaaaatgaccgaagacggtatcgtaaatttggctgtagctttagtagataaaatggaagcagatattaaagctcgtcttccaaatgctattgaatatattgggaaggctattaaagaatatagtcctcaccgttttgaagtaaatagttatttgccttacaccaatttagtgcctgatgttattgtcagtcgttatatgtcctctactttattcagtaagcaatatgctcatctgtgtaagaaatggggaaatatggaaattgaccgtcaactagaacatcctgcactggctcatttctctggttctcaaaaagcccatctccgtaagcatttaaagagggctaaggatttacgtaattacagggaattaactaaagtatttactgatatggctattaagccaatgttcaaaacctttgctaaattggggattactaaaggtatttccctatttcattatcaatatggtgttgaactgtggcgtaataatattgttaatagtgtccgtagaatacactcattaaacttcatgacttatagttctaagaagtgccgtgtatttgttaccccacgtattaccaatattgaagatagtctggctgggtatccagagtttgataatctttctactgagacactggtaaaatataactcaatcattgtcaaagttggaaccaagaaaggtgaagcagaggctatgactaatctgctcactaaagcaggatacgaagtcattaatatggctgaatatcatgagtgggattgtatagctcgcagacgtaaagaggaacaagaggctaaattagccatttccaaattacaagctaagaaggctactaataagaaaaaggttagtcctaatcgtcttattagtatgaatatccttgaaataccaaaagagcatcgtagctattcaagtgaggtatgtggttctcactacgcttctcgttctcatgaccgaatggttgatgtagatactccccagtattacatcatgcaggaagatattaataactacacaggaaggcttggtgttctttctatgtggcaattaacccctgctaccattaaagctgtaactgttgtttgtcgtaataaaattgaacgtaataaagctattaagcgaggtgctgttcatttggatgaatggactgctccgtatattgcttcagttcttacatccaaacaattcattaagtatgtcactaaagaacgtcagaaaacgttaagtgatattggtatttactccaaacacctcagattactgagagaactggatattacatatgccccattgaaaggtctgcgttatgacccagaactggagaatgcttatctcttcttacaaagtagtagctatcctaagctacgtgcattgttagggaagggtctgattactgaagaagagtatcacttcctcagtgatgttgatgtgcattgcaagactttcaacagtcgtaacctcaccttatggcaaccagatggttctactatggtcatcccccaaggggatgcccgtgtaccacgtattgttgctgaagcaaaagaaaagaatcttaccccaggtaagattatcgaagtggatgtcactatcgaagctcagattcgtcaggagtttctggacgctgaacgtgatacaggtggctttgttaaattcttccgtattaccaagaagaagctacaagagttcttcttaggagaagaggaagaacaagtccctcatgtatcacctgtagagttaggtgctaaacccactgctttcaatgcttttattgctaatgctgtgggcaaaactcttgctgtacaacatgcatcattaaaagcacctgaaccagaaatgacagttactcatgagcgtttttacggtaactatgctgtatggattacagatgtagacccacggaatcatcgtattgaggttattcatgttatccgtgaaatctcaggaagaaccagtgaatatgtcaataacctgctggctcaaccaaccccattcaaagtatttgattggctcacagagacgcaggctaaagagtttgtaagacgtctgaataacactcagggtgttatctctgtctataacaaactggaagacggtattcctgttaaggttgctgtaaaggccacagagccaaccaataaggaaaagctggaagctgcatcaactaagctgaaagctatgggtgctgtcgctactgatgcttatgagtttcatactgacttgaatgagaatgaagagactattgtagctgtagtgaatgataaggtggttcctgacgttcagaacctacaccgtcacatccgtcaatctgcaaacctgaaagactataaaggctttactaagttccttgaacgtctgtctactgtaattgataaacgtcgccactctgttgaagacctgatgaagtttatggaaaaaggtgacctgcccattgcagatgatggctccattgttatcttcaaacgtctggaaagcaaagacaatcctgaacatctcaaagacgtaatggatgatgtatttgttgattgccattctaagaagattgagcaatgcgttggtatgcgtgtaatggttaaagaaaaccttgtagaccagaaccgtcgtaaagactgttctcatggtctgcacgtagcttctctgcaatacattcgtaatttctcaggcaacgtaaccattattggtaaagttgctccagaggatgtatttgcagtaccagaatacgatgttactaagatgcgtgtatctgcttatcacatcattaccaagctacctgatgctattcgtgaccatgttaataatggcaatccaatctccaccattgagggtggtacggaaatcctgaacatggttctcagtggtaatcaccctgaaccttcccgtcaggtactagttggtggtcattatggaaccaatctgacttattcagaactcactcgtaattatctggatgatgatgaagacagcgttattccagatgaaccagtaattaagaaaactgccttgaatatggaagagagctttacggcaactaatcctaaagctgaaccagtgaaggcaacggatgttaaacctattaagaagactaagatggaaattcttaaagacctttggaaccagttcctgaaagcagagacttctaatgaagctattacactggctgatgaaatcattgctgctaagggcaaatgtaagaaatcatgggcttctttaggcttcagtggtgacatggttcagaaactgattgatgctcgtgctaataaacctaagccagaaaaagcagtcaaacaggataaaaccgttgcacctaagaaaactacagtcactcgtagtcggaatgctgatgttattcgtagttatctaaatgacaaaggtatgtctgattactgtaaagctcatgccattcacgatgtgaaacgtgctgctaagaaatcttatgctgcactgggtctgactcctgaagaatgcagccaaattgataaactgaagcatcacctgaagatacatactatggccaaagtttatcgtgctaaccgtaaagcccatgatgacgatattattcgtatgaatgcagtcggtttatcattgggaaccattgctaaaacactgggtgttcaccccactacagttaccttacgattacgctctcttggtattgaaccagccgacacacgtcgaacatttatggagaacgtactagcaccattacctactcacgtagctgattggttatcagaacaagtaggaccaaaatatgagattcgacaatacgttcgagacttattactggaagcctacaataatcgtcataatcataaggaaactgctcatgaacgattcctcaaaagatacgttgaagtagttgagatgctggaagaattggctccaaattctgaagaagcatacgatacacttcataatgccattgcagctttaactgaattgtcagaattaatgaagtcctctgataaagaagtttatgcacctaacagcaatcgcttagctattctggatgcactggcagaccagattgttacagcaactggcatcggtactttcttgggtatgaacgtacccggagcactcactgaagtgaaccgttctaattattcaaaatttgaagacggtgagcctgttttcaatgagaataagaaagtaatgaaagaggcagcggcagaaggtttcttcgactttctgctcgaccccaatgcttctgaacttcgtattagtggacctggtggtacaggcaagacatttacaatggctcatatgattgacgagattatgcctcgttatcatgagacatgtagtctgatgggaatccctgctctctataacgaagttattatgactgctactactaataaggcagcagaagtattagcccgtgcaacaggacgtcctacgtctacctatcattcctttcaaggtctgacagtacggaataacctgaagactggggaagcagacctgattccatctaagtccttcagtatcaaaaagaataaggtcatttttattgatgaagcatcaatgattgaccgtaaactgaagaagtttattaacgaaggtactcaccaaagtaagattgtttacttaggcgataaatgccaattgttacctgtaaaggaaacttcttcccctgtctacaatgacagtagcattaaagagtttatgctgacccaacagatgcgtactgatgtccctgaactccatgcactgcatgaacagcttcgtggaaccattgaaggtaagcacggattcctgcctattaaagcagttccaggtattatcgactggattaaagatggtgatgaaatgagaaaagaagtcgaaggtcatttcatgactaagactgacactcgtattgttgcctataccaaccaacaggttgttaactataacaccttcattcgagccatgaatggattccacggagagttctgtattggtgaagagttagtaagtaactctgctattcagattggtgctggtgaccgccttagtattgaacaggaatgccagattgttgaccaggattctgctactcgtaagattctgattgattcctctggcatcgaattagaagtacgtgattgcaccctggatactggttatggtggtgtctttgaaggtatccctattccggtagatatggattatttcattcgtttgcaaaagtactatgcacaccaaaagaactgggaacgtcacttctatttgaaagaaacattccctgaacttcgagcattacatgcttctactgtgcataagtctcaaggttctacctacgacaccatctttattgatgctactgatttatctacttgccgtcagcctgatgtagtagcacgtctgctttacgtagcagtatctcgtgctcgtcatcgtgttgtgttctatggctctttggcagagaaatttggtggagaacttatgcaactgggtgaaaaacaaatccgtgaaatgactaatagtagtgaactggttcaggaattattcttagccgagttacgtcggctagataaagtgctggatagtatcattacacgtaatggggaaacattcgctgtatacaactcaacagggttcctgtatttaggggagttctattcgagttcccgttcatcacaacaacctccttctggtcatcgtctggctctagctaatcacctactggatgatatgcgggagtatctggaacaagcaggtaaacttctgctagaagtccatatggtgaatcagatggtctttcgtctggttcagggctgtaagacttatcaagacgttcgtgatgcattgccagaatgcctcattgctatggataaacaaggtcatctgaaatccttacagagaaccagaaaggcagcatttactctggataatgatgctatggctctccgtcatatgagaaaatcttgccgattatcgaatactatgcgggaacccatcttatcttttgaggtctgtatgcgttacattacattcaacaatgagggtatctaccctattgctatccttactacaacgttacgtaaggatgatattgtcaaagcatacatggaaccctgggatgtagataaagattcagtaatgattcttgaacttcatacagccccagggaaaaagaaaactcctgctaaagagatgcaggagtttattacccaagaattagtgccagcattcgaagcagcacaaactcagtatatcatctgtggtgattctgaatattacaaacagctaaccaaacaaggtaaagctgatgccaatattggctatgtaatggattgtgcttatgggaaccagaaagttatttacgttcccaattacagacaaatcttttatgacccagataagataaagactaagattgctttatccatgcaggctctgattgattatgtctctggttcttatgttgagccaggaactaagattatccattatgctgattacccattaactccagaagctatatctaagtggttagataagttactggagatggatgttccattagcagtagatatagaaaccttcagtctgaagcattatgactgtggtataggcactattacattctgctggaacaagcacgaagggattgcattccctgtggattatgaaccaattgagggggctactgaagctccttatggtagacaagttcacaacatgcttgttcgttctatgctcagggacttttttattaagtatctgaacaggcagatgtatcacaatattgcctttgacgtatacgcactcatttaccagttatttatgacagaccttctggatacggaagggttgttgcatggcatgagtatcatgctaagaaactgggattgcactaagttaattacctatctggctactaactcttgtgccggtaataagctaagtcttaaagaccaggctcaggaatatgctggtaactatgctcaagaagaaatcaatgacattaccagaatcccattagcagagttgttggaatacaacttagtggatggattatgtacctggtatgtctatgaaaagcattgggatactctggttaatgaccaacagttagatgtttatacaaacatctttaaacctgcatgtgaagatattattcaaatgcagttaactggtatgcctatcaatatgaggacagtattggaggtagaagaggcattaacccaagactataacaatgcgttaaaaacaattgctgacagtaaagtaatcaaagattttacccgtcttcttaatgaagaatgggtagaaaaacagaaccagattctgaagaagaaacgagtgactttagctgatgctaaagagcagtttaatccaaactcaggtattcaattacagaagctactttttgagtttctggggttacctgtactgggtctgactgcaagtaaactacctgctactggtagtggcatactcaagtctttgaagaaccatactcaagataccagtattctggaaattcttgatgctctgattgattacaaagctgtagataaaattctgacagcatttattccagcattaaaaaatgccagacaaggaccagatggttggcattatctctttggtaatctgaacttaggtgggactgtatcaggccgtctatccagtagtgaaccaaacctacagaacctaccttctggttccagatatgccaagatgattaaaaaatgttttgaggctcctcctggatggatattttgtgggctagactttgcttctctcgaagaccgtatatctgctttaacaaccaaagaccctaataaactaaaggtgtataccgatggttacgacgggcatagtctacgtgcatatgcttacttcggtgagatgatgcctgacattgaagatacggtagagtctgttaattctattcaggagaagtacaaagcatatcgtcaggattctaaagcacctacctttgctcttacctatcagggcacgtacatcactttgatgaagaactgtggtttccctgaacagaaagctcgaatggttgaggaacgttatcacacactttataaggtaagtgatgactgggttcaggctaaactagaccaagctgcaaaagatggttatgtaaccgtagcatttggcctgagagtcagaacccccttacttcaacaagttatccgtggaaccagtaaaactccttatgaagctgaagctgaaggacgtactgctggtaatgcattaggccaaagttggtgtcttctgaataaccgtgctggttcagagttcatgcgtaaggtacggaatagtaagcatcgtcttgatattcgtccaagtacccatatccatgatgctcagtatttccttatccgtgatgatatggatgttgtgatatataccaatactcatttggtgaaagcagtacaatggcaagaccatcctgatattgctcatccagatgttcatttggatggtcaggaaggtgctgttattgttcagaacactatgctgcttactgaagagaaacaggtaactttccgtgacctgggacgtgctcagtctgctctgtttcagaatctgaatgaccgttttggtcaagtggtagatgtacgggatattgtattcctgaacgtcagctacttgggtcatatgagccagcctgactttcagcaaaatctggtaaccaaccctcaacgtatggaacagcctccatatcaggccgagtgtgaggatattatccaagcactgaatatgacctttgatgaagggtgtctgttcaaggcattgtggcgtaatgctgctgctcgtttaggtaatggtaaaccaggtaacaatgccgtttatgatgcagagaagatggttcattatgctaaccgcatttttattaaagaatccggtgggcagaaaaaagaagcagaagaaccagtttctgcggctctgaagaagggtgaagagattcatatgtctctgtctgaattattcaccctgttaactggtgaagcagcagaaggtgaagtaatgagccttgccggttggcatactcacgtaccaaaccgtttgggtgttatgcctattgctgttgcaatgagcaaagcagaacaagttgatgtagtacgtgccgatggaacgactattactcatgtatttcctcatgagattgactggtctgataagattgccccctttgctcgaatcactgcatggcgtttcactgtctggcttttgcatgacgagtatgattatgtgaaggataaaaagtatctttctgtgactaccctgcttaagccaattaagcacattgtcatgaagcatcgtgtagacctttctgtagaaagtatggacatcatggatttggtgtccacttctatgggtacaggcttacatgattctattgagaaggcatggcataacggacaccacaatgcattacgcaagttagggtatcctgagcgtgtcgttcagaatgttgtcatcaaccctacccctgagcagattgcatcaaatccaaacttaattcctgtatggatagaacaacgagcaactaaaaagattgctggttggactattgggggcaagttcgacattgttactgaaggtcttcttcaggatgtaaaatccacctccacttacacatgggtaaagggtggacgtgatgaagaacatagacttcaggggtcaatgtatcgttggttacatgacgacaagattaccgaagatgtgattcgtattaactacatcttcactgactggatgaaagcattagctacatctcaagaaaactatccaaagcatcgtgtgctgcataaagacattccattgatgtcttatgaagcgactgaagaatggattaaagccaagctggctctcattgataagtactgggatgctcctgaaagcgagattccagaatgtactgatgaagagttatggcgttctgacccagtgtttaaatactttgctgacccagagaaggcaaagcaacctggtgctcgttctaccaaaaacttccctactctctttgaggctcggaagttcatggcagagaaaggcaaaggcactattcttcatgttcctgagatatttcccatgattgacctgaccggagtctcacatcatccggcgattgaagaaatcgttgatgtgttatgtaacaagacgcaaaacactgaccgtggttttttccgtgtagaagtggcctatttccttgcgaaaatggcttcatgtatgggtgcaactatcatcactaaagaccgtggtgaaattccagtaaacatctatgcagtggctcttgctacttcaggcttcggtaaaggccattcggtcaacattgttgaagacggttttatggctggctttaagaagcggtttatggaagacaccatgcctgctttagcagaagaccgtctgtggaaaattgctaacgaacgttctgctcgtaatgctactgaccagaaggaagagtttgacaaggtggaagctgaatacagacgtactggtgcttatccatttacgtttgactcaggtacacctcctgctgtgaaacagttacgtcataaactcttattagctggatgtggtgctattaacttacagattgatgagattggttcaaaccttctcgctaatgctgatgtattaactgtgttccttgagttgtacgaccaaggcaagattaaacagaaacttactaagaatactgctgaaagtattcgtagtgaggaagttgatggtaaaactccagctaaccttcttctgtttggtacaccgagcaaacttctcaatgggagccagactgaggaactcttctatgacttccttgatactggctattctcgtcgttgtctgtttgctgtaggtcaggcagataaacgtgcatatctgagccagagtgctgaagaaatctatcgtaatctgattaagcaggataacaatgctgttgtgaataagtgggctaaccactttcatagccttgcagatgcatccaagtttggttggaaaatgacagttgaagatgatgttggtattgcactaatcgactacaagattcagtgtgaaaaacaagcagcagctttagctgaccacgaagagattcgtaaagcagaactggaacatcgctattttaaggcactgaaattggcaggtgcatttgcatttgttgataacagtatcatggtagagatggaacatctgaagcaagcaattcttctggtggaagagtctggtgttgcattccagactatcctcaatcgtgaaaaagcctacgttaaattagccaagtatattgcatctgttggtactgaagttactcatgcagatttgcttgaagctttaccattctataagagtgggaatgctgcacgtaatgagatgatgactttagctactgcatggggctataagcagcatatcatcattaagaagacatacaacgaaggtattgagttcttccgtggtgaaacactgaaagagactgatactaacgaaatgattgtttcttatggtgagaactttgcttatgactatattgcagagaaagttccatttgaccagttacatgtactgacccagcaagcaggttatcactgggctaaccaccatttccgtcgagggcatcgtgctgaagagaatgctattgctggcttcaatatgattgtcattgatgtggatggtacgtgtagtttggacgtgtgccatgaattgatgaaagaataccgattcatgacatatacaaccaaacgccatactgatgaagaaaaccgtttccggttaattatcccaatgaactatcagcttgaacttgatggtgctgaatataaagagttcatggataacgttatggcatggctcccatttaaaacggacgagtctgctaatcaacgagccaagaaatgggaatcatgtgctaagggtacgtattactacaatatggatgctcccctgctagacgtaagagatttcattcctagaaccagtaagaatgaggcattccagcaagggatgcagaaggttcaaaatctggataatctcgaacgttggtttgcccaacgaattgctacaggcaatcgtaataaccacatgattaagtatgccctggctctggtagatagtggtataggcttcaatgaagttaaacaacgtgtgcatgagttcaataagaaactcagcaatcccctatctgctgatgaactggattccactgtaatgattactgtggctaaactccttttcttggttgaagaggactgtcagttaaaagaggaaactatgtcagaagaatttgaacatggcgaaatgaatgaccagctaatcctgattgtaggattttctgctgctggtaaatcggcctcacttcgtaacatccgtaaccaggaacgttgggtatatctgaatacagaagctggtaaacgtctgccatttaaaaataacttcaatggtgttcgtattactgacccataccaaatcctggaatactttgaccaatgcattgaacatcgtgatgacgtggacggaatcattgtagattccctgactttcatgatggatatgctggaaactcagtatgtactcactgctgcaaacactcagaaggcttggggtgaatttgcacagttcttcaaaattctccttcaggagaaagtagttaaatttgccaagccagttatcttcactgctcacgtcaaagacgaagtagatgaacgtgcaatggaactgaagactttcgttccagtaaaaggttctctgaagaacaatggcattgaagcatacttctctactgttgtatcagcagaacgtatcgaccttaaagaacttgaaaagtattccaatggaatgttggaaattactgaggatgagcaagagttggggtacaaacacgtattccagactcgacctactaagaaaacagtaggtaaacgtattcgttctcctatgggtatgttcagtaagcaagagacttatatggacaatgatgcccaaaaacttctcgaccatctggcagagtattactctaccggtcaggcagctaaagcagagaaagcaacggataacctgggtggtggatttggtgcaaaagaatctgatatttatctggctaatctgaaagtagcttatgcaggtaaagcagcttctggtgctaacttcattcagattattgcagacctgactgaccttgatggacacagtgctggtgaatatcgtgagcaactgtacatcacttctggtactgaaaaaggctgcaagtgtacttatgaaaagaatggtaaggaatacttcctgccaggctacactgtaatcaatgacatcctggtaatgacttctggtgagactattcctgaagcagtcttcgaagagaaagtcgttaacgtatatgacttcgatgagaagaaagaagttgccaaatctgtcatggttccagtcaatgctatcggtggtaagtttgctgtagctattctgaaatctgaagaagataagcagactaaagatggctccggtaactatgtgtctactggtgaaactcgtttcactaataccatcgaaaaagtattccaccctgacctgcatctgactgttgttgaagcagaagaactgactgaacgtggtaaagaactgaccgttgaagaagcagtcttttgggacacaatggctggagaaaaacaaaggcgttacccgtgacaaaaccactaaaggcggtgcttccggtaaagctggtcagccaccaaaaccaggtgctactaatactggtgcgggtgcttctgctgcaaaatctctgttcgaaataatgcagatacctgtgcttggagttgaccccagttttcgtaactggggactagcacggggaatgctcgacttagagacgggaatactctctggattagacctgaagctggtagaaaccaaacctgatggaaccaagcaagtaaggcagaacagcaaagatatgcaagctgctgaggacattactactggtgtcatcgactggttcaaagaagcaaaggtcatctttgtagaggttcccgttggctcacaaagtgccaatggaatgaaatcctatggtgtttgtgtaggcatcttaggagcactcacggcactaggacatgagattattgaagttactcctatcgagaacaaagtagctctgtccggtattaagactgcttctaaagatgtgatgattagagcagctacaggattttatccagaggccaactggctcaaggataccaaagaatttaatgagaattttatcaaaggtataacaatgcaagtaattctgactcaacctgaaatcgaagctgctctgactggttatgtaaacgacctgatgtctgtacgtgaaggcatggaaattaaagtacccttcaaagctactcgtggtgatgatggtgctactgcaatcgtagatattgtccctgctggttcccaatctgttgaagtggttgaggaaccaaagaaagagtcaaaggaacgcaagcatcgtccagtaacccagaccaatactgctgctgtcagtgctctggcttctgctactggtaagaaaaaagaagaagtagttgaagtagaaactactactgaaactgttgatgaaactgttgaagtagctgaagaagctgctgctcaggaagaagaaaaagaagtacaggaagaagaggctaaagaaccagtacaagccaaaccttctctgtttgcaggtctgaaacgttaa

SEQ ID NO: 23321 - DNA, 414 bp, Homo sapiens
  SIMILAR (3)..(356): 1001254mologous to Homo sapiens A human proliferation and apoptosis related protein,accession number Y84901,Smith-Waterman Score=622.
  misc_feature (1)...(414): n = a,t,c or g
agaggtcatctgagcacatccagcgcatcgaccgggacgtaagcgggacattaaggaagcatatattcttcagggatcgatacggaaccaagcagcgggaactactccacatcctcctggcatatgaggagtataacccggaggtgggctactgcagggacctgagccacatcgccgccttgttcctcctctatcttcctgaggaggatgcattctgggcactggtgcagctgctggccagtgagaggcactccctgcagggatttcacagcccaaatggcgggaccgtccaggggctccaagaccaacaggagcatgtggtagccacgtcacaacccaagaccatggggcatcagatctctctcgggctcaccctgcgnctgtgggacgtgtatctggtagaaggcgaacagg

SEQ ID NO: 23322 - DNA, 384 bp, Homo sapiens
  SIMILAR (158)..(376): 1001254mologous to Homo sapiens A human proliferation and apoptosis related protein,accession number Y84901,Smith-Waterman Score=387.
cacatcctcctggcatatgaggagtataacccgaggaagcccctccttcagaggaagcctctccagtcacctctgccctctccaatgacatgagtcctcccaggtgacctcagccctcccaggtgatgtccttccatggtgactctggctcttgcaggaggtgggctactgcagggacctgagccacatcgccgccttgttcctcctctatcttcctgaggaggatgcattctgggcactggtgcagctgctggccagtgagaggcactccctgcagggatttcacagcccaaatggcgggaccgtccaggggctccaagaccaacaggagcatgtggtagccacgtcacaacccaagaccatggggcatcaggacaatgtatt

SEQ ID NO: 23323 - DNA, 3270 bp, Homo sapiens
  SIMILAR (1)..(3267): 1001254mologous to Homo sapiens oncogene,accession number X63547,Smith-Waterman Score=5887.
atgccccaacggcttccccatgccaggcagcacacacccctccctctgggatcagcagactacaggcgtgtcgtcagtgtcagaccacaggggccacacagagaccccaaggactccagagatgcagccaaacgcgagcaagggtccttggcacccaggcctgtgccggcttcacgtggtgggaagaccctctgcaaggggtataggcaggcccctccaggcccaccagcccagttccagcggcccatttgctcagcttccccgccatgggcatctcgtttttccacgccctgtcctggtggggctgtccgggaagacacgtaccctgtgggcactcagggtgtgcccagcctggccctggctcagggaggacctcagggttcctggagattcctggagtggaagtcaatgccccggctcccaacggacctggatatagggggcccttggttcccccattatgattttgaacggagctgctgggtccgtgccatatcccaggaggaccagctggccacctgctggcaggctgaacactgcggagaggttcacaacaaagatatgagttggcctgaggagatgtcttttacagcaaatagtagtaaaatagatagacaaaaggttcccacagaaaagggagccacaggtctaagcaacctgggaaacacatgcttcatgaactcaagcatccagtgcgttagtaacacacagccactgacacagtattttatctcagggagacatctttatgaactcaacaggacaaatcccattggtatgaaggggcatatggctaaatgctatggtgatttagtgcaggaactctggagtggaactcagaagagtgttgccccattaaagcttcggcggaccatagcaaaatatgctcccaagtttgatgggtttcagcaacaagactcccaagaacttctggcttttctcttggatggtcttcatgaagatctcaaccgagtccatgaaaagccatatgtggaactgaaggacagtgatggccgaccagactgggaagtagctgcagaggcctgggacaaccatctaagaagaaatagatcaattattgtggatttgttccatgggcagctaagatctcaagtcaaatgcaagacatgtgggcatataagtgtccgatttgaccctttcaattttttgtctttgccactaccaatggacagttacatggacttagaaataacagtgattaagttagatggtactacccctgtacggtatggactaagactgaatatggatgaaaagtacacaggtttaaaaaaacagctgagggatctctgtggacttaattcagaacaaatcctactagcagaagtacatgattccaacataaagaactttcctcaggataaccaaaaagtacaactctcagtgagcggatttttgtgtgcatttgaaattcctgtcccttcatctccaatttcagcttctagtccaacacaaatagatttctcctcttcaccatctacaaatggaatgttcaccctaactaccaatggggacctacccaaaccaatattcatccccaatggaatgccaaacactgttgtgccatgtggaactgagaagaacttcacaaatggaatggttaatggtcacatgccatctcttcctgacagcccctttacaggttacatcattgcagtccaccgaaaaatgatgaggacagaactgtatttcctgtcacctcaggagaatcgccccagcctctttggaatgccattgattgttccatgcactgtgcatacccagaagaaagacctatatgatgcggtttggattcaagtatcctggttagcaagaccactcccacctcaggaagctagtattcatgcccaggatcgtgataactgtatgggctatcaatatccattcactctacgagttgtgcagaaagatgggatctcctgtgcttggtgcccacagtatagattttgcagaggctgtaaaattgattgtggggaagacagagctttcattggaaatgcctatattgctgtggattggcaccccacagcccttcaccttcgctatcaaacatcccaggaaagggttgtagataagcatgagagtgtggagcagagtcggcgagcgcaagccgagcccatcaacctggacagctgtctccgtgctttcaccagtgaggaagagctaggggaaagtgagatgtactactgttccaagtgtaagacccactgcttagcaacaaagaagctggatctctggaggcttccacccttcctgattattcaccttaagcgatttcaatttgtaaatgatcagtggataaaatcacagaaaattgtcagatttcttcgggaaagttttgatccgagtgcttttttggtaccacgagacccggccctctgccagcataaaccactcacaccccagggggatgagctctccaagcccaggattctggcaagagaggtgaagaaagtggatgcgcagagttcggctggaaaagaggacatgctcctaagcaaaagcccatcttcactcagcgctaacatcagcagcagcccaaaaggttctccttcttcatcaagaaaaagtggaaccagctgtccctccagcaaaaacagcagccctaatagcagcccacggactttggggaggagcaaagggaggctccggctgccccagattggcagcaaaaataagccgtcaagtagtaagaagaacttggatgccagcaaagagaatggggctgggcagatctgtgagctggctgacgccttgagccgagggcatatgcgggggggcagccaaccagagctggtcactcctcaggaccatgaggtagctttggccaatggattcctttatgagcatgaagcatgtggcaatggctgtggcgatggctacagcaatggtcagcttggaaaccacagtgaagaagacagcactgatgaccaaagagaagacactcatattaagcctatttataatctatatgcaatttcatgccattcaggaattctgagtgggggccattacatcacttatgccaaaaacccaaactgcaagtggtactgttataatgacagcagctgtgaggaacttcaccctgatgaaattgacaccgactctgcctacattcttttctatgagcagcaggggatagactacgcacaatttctgccaaagattgatggcaaaaagatggcagacacaagcagtacggatgaagactctgagtctgattacgaaaagtactctatgttacagtaa

SEQ ID NO: 23324 - DNA, 550 bp, Homo sapiens
  SIMILAR (417)..(548): 771254mologous to Homo sapiens A human proliferation and apoptosis related protein,accession number Y84901,Smith-Waterman Score=164.
caagaggtcatctgagcacatccagcgcatcgaccgggacgtaagcgggacattaaggaagcatatattcttcagggatcgatacggaaccaagcagcgggaactactccacatcctcctggcatatgaggagtataacccggaggtgggctactgcagggacctgagccacatcgccgccttgttcctcctctatcttcctgaggaggatgcattctgggcactggtgcagctgctggccagtgagaggcactccctgcagggatttcacagcccaaatggcgggaccgtccaggggctccaagaccaacaggagcatgtggtagccacgtcacaacccaagaccatggggcatcaggacaagaaagatctatgtgggcagtgttccccgttaggctgcctcatccggatattgattgacgggatctctctcgggctcaccctgcgctctctgggacgtgtatctggtagaaggcgaacaggcgttcatgccgataacaagaatcgcctttaaggttcagcagaagcgcctcacgaagacgtccagggg

SEQ ID NO: 23325 - DNA, 1420 bp, Homo sapiens
  SIMILAR (399)..(581): 1001254mologous to Homo sapiens A human proliferation and apoptosis related protein,accession number Y84901,Smith-Waterman Score=336.
ctggggtggccacaaaaggatccggcaccgcccagtaggagactgaagtggccacggggtatgagctgtgaccattcccaggtaactcccctggcctgatatccaccctgtccctagagcgcctcacgaagacgtccaggtgtggcccgtgggcacgtttttgcaaccggttcgttgatacctgccacccccaggtgggctccggtgccatgtcccctcccatgtcaccctctggggtagtcagtagtaggggagtgcccgggacccgcaaccctactacctgggccttcctcttcaccttttcttcctcctcttcctcctggactctgagttctgactgggggccgtatcccaggcccaacagcctggagatgctgaccgcgtctgttttcctttcagccaaacccgagcaagggtcgtcggcatccaggcctgtgccggcttcacgtggcgggaagaccctctgcaagggggacaggcaggcccctccaggcccaccagcccggttcccgcggcccatttggtcagcttccccgccacgggcacctcgttcttccacaccctgtcctggtggggctgtttgcagagtactagggaaagacaaggtgactttttcatcttcattctgatagttaaatcctgtagcatgtatttccggccccagatcccttcccagcaccagacccaggtctttagccgcgagccctgctgcctccctggcctcaccgtgagatgcccagaacggggccctgcccatcttctcccccgttctcctagggctacagcccccattgtcaccatgccttttcccctcacgggacagtgagggctgtagctttgccgacagaactgctgagcgcccaggggcctgacctagcccagtctccattcccaccggctccctagatgggccccacacctctggcctaacaacctcgggctggacctgcaggggagtcagggaggagttctgtccctggaaaggaggttgacccgacctggtgagacatgtctgtacaatccccaaatgatcgacgttgttgttgtagcttcgaaaaggcttaggccccttgtcctctggcagcccagctcggtgtccaactatgaaggctaagaagcccaaggttgaggagttgcatctggtgagagccttcttgctgatggggactctgaagagtcttttagatggggttgtttttttcttgtaaatttgtttgagttcattgtggattctgaatatcagccctttgtcagatgagtagattgcaaaaattttctcccattctgtaggtttcctgttcactctgatggtagtttgttttgctgtgcggaagctctttagtttaattagatcccatttgtcaattttggcttttgttgccattgcttttggtgttttagacatgaagtccttgcccat

SEQ ID NO: 23326 - DNA, 2838 bp, Homo sapiens; identical to SEQ ID NO: 19813
  SIMILAR (274)..(699): 821254mologous to Homo sapiens A human proliferation and apoptosis related protein,accession number Y84901,Smith-Waterman Score=643.

SEQ ID NO: 23327 - DNA, 2424 bp, Homo sapiens
  SIMILAR (1801)..(2265): 1001254mologous to Homo sapiens A human proliferation and apoptosis related protein,accession number Y84901,Smith-Waterman Score=838.
atgggctggcgggcgcggtggctcatgcctgtaatctcagcgctttgggaggccgaggaccctatcccacctgagctgaccaggctcctgcagcaatcccaggaccccctgctcatggggctgtttcctactaaccccaaagagaagacccaggaggaaccccctggccagagcagggcccctgtgttgaccgtggtgtccaagttcaaggtcctagctggactgctgcaccttggcaatatccagtttgctgcctccgaggatgaagcccagccctgccagccgatggatgatgccaagtgtgagggtcagggtgtaggatgggcaggccctgtcaggaaggcctcactggagcagcttctgcaggtcctacacagcaccacgccccactacattcgctgcatcaagcccaacagccagggccaggcgcagacctttctccaagaggaggcaggagctgggaggaggcggcagcggcggcggcagaaacagcagcggcggcggcggcggcagctgggaggaggtggtgacggtggcaacggcagcgtcggggacgatggcgcgactcgtggcagccgaggctgcgcactggagaaagagtgtgttgcaactcctaggcgaggccttctcttcagcaggccccacaaactcgcctttgcagtgggtggctcggtaacctctgtcggccccaagcccagagctccgatggacgtggtagaggtcgcgggtagttggtgggcacaagagcgagaggacatcattatgaaatacgaaaagggacaccgagctgggctgccagaggacaaggggcctaagccttttcgaagctacaacaacaacgtcgatcatttggggattgtacaggattttgccgatttcggaaccaccatcaaacaggattttcgcctgctggggcaaaccagcgtggaccgcttgctgcaactctctcagggccaggcggtgaagggcaatcagctgttgcccgtctcactggtgaaaagaaaaaccaccctggcgcccaatacgcaaaccgcctctccccgcgcgttggccgattcattaatgcagctggcacgacaggtttcccgactggaaagcgggcacttctatgatgcccacaaccccttcctccctccaccctcaatgtccaagcaggcaaagaagaccggtgtccccagtgaagggctctgcaggccaggcggtgaagggcaatcagctgttgcccgtctcactggtgaaaagaaaaaccaccctggcgcccaatacgcaaaccgcctctccccgcgcgttggccgattcattaatgcagctggcacgacaggtttcccgactggaaagcgggcagtgagcgcaacgcaattaattggtcttcagctcatcctgctgggggaggtgctccagaaagttctaacggcctcctacccagcccagagctcagtgcctctcacttctgggcctgtgcgccagatcatgaaggagaagggcaagaggtcatctgagcacatccagcgcatcgaccgggacataagcgggacattaaggaagcatatgttcttcagggatcgatacggaaccaagcagcgggaactactccacatcctcctggcatatgaggagtataacccggaggtgggctactgcatggacctgagccacatcgccgccttgttcctcctctatcttcctgaggaggatgcattctgggcactggtgcagctgctggccagtgagaggcactccctgcaggctgcccgggctcctgctgccatcggtgcccacgaacgggccgaccaagcccagatctctctcgggctcaccctgcgcctgtgggacgtgtatctggtagaaggcgaacaggcgttgatgccgataacaagaatcgcctttaaggttcagcagaagcgcctcacgaagacgtccaggtgtggcccgtgggcacgtttttgcaaccggttcgttgatacctgggccagggatgaggacactgtgctcaagcatcttagggcctctatgaagaaactaacaagaaagcagggggacctgccacccccagccaaacccgagcaagggtcgtcggcatccaggcctgtgccggcttcacgtggcgggaagaccctctgcaagggggacaggcaggcccctccaggcccaccagcccggttcccgcggcccatttggtcagcttccccgccacgggcacctcgttcttccacaccctgtcctggtggggctgtccgggaagacacctaccctgtgggcactcaggcgtcccgcaaagcaggcgtcaacgccattgttaatgcacggaggaggaacctgactgttagacctgggttttccagggttgcacggcttctgggagacggatgtgaccctgaggacagggcacaggccagtgtaatgccaggatggaatgagctgtga

SEQ ID NO: 23328 - DNA, 908 bp, Homo sapiens
  SIMILAR (21)..(443): 891254mologous to Homo sapiens immunoglobulin light chain variable region,accession number L29162,Smith-Waterman Score=639.
agagctctgaatgtctcaccatggcctggatccctctcctgctccccctcctcattctctgcacagtctctgtggcctcctatgagctgacacagccagcctcagtgtcagtgtctccaggacagacagccagcatcacctgctcaggagatgtattggcaaaaaaaaaatatgctcggtggttccagcagaagccaggccaggcccctgtgctggtgatttataaagacagtgagcggccctcagggatccctgagcgattctccggctccagctcagggaccacagtcaccttgaccatcagcggggcccaggttgaggatgaggctgactattactgttactctgcggctgacaacaatggatgggtgttcggcggaggggaccaagctgacccgtcctcagtcagcccaaggctgcccccctcggtcactctgttcccagccctcctctgaggagcttcaagccaacaaggcccacactggtgtgtctcaataagtgactttctaccccgggagcccgtgacaagtggcctgggaaggcagcatagcagcccccgtcaaggcgggagtggagaccacccacacccctcccaaacaaagcaacaacaaagtacgcggcccagcagctaccttaggcttgacgcctgagcagtgggaagtcccacagaagctacagcttgccagggtcacggcattgaaggggagcaccgtgggagaagacagtgggcccttacagaatgttccataggtttctcaaccccctcactccccccccacgggaaacttagacttccagaatcccaggggaggggtttctctccccatcccaagtcatgccggcccttctccctgcactcaataaaccctcaataaatattctcattgtcaatcagaaaagtcgacgcg

SEQ ID NO: 23329 - DNA, 393 bp, Homo sapiens
  SIMILAR (4)..(312): 991254mologous to Homo sapiens brain ryanodine receptor,accession number AB001025,Smith-Waterman Score=522.
  misc_feature (1)...(393): n = a,t,c or g
tttcgttcaggctcagagctggtgaaggctgggttacgagcattctttgaaaatgctgcagaagatttggagaagacttcagaaaacctgaaacttgggaagttcacccattcccgaacgcagattaaaggcgtttctcagaatattaactacactacagtggctctgctccccatcctgacgtccatctttgagcacgtcactcagcatcagtttggaatggatctactcttgggtgatgtgcagatttcatgctaccacatactgtgcagcctctactcccttgggacgggaaagaacatttatgttgaaagttctggggatgccagacacggtagaagacatgtgtcctgacatcccccagctggaatgcctgatgaaggaaatcaacgn

SEQ ID NO: 23330 - DNA, 508 bp, Homo sapiens
  SIMILAR (388)..(462): 961254mologous to Homo sapiens ryanodine receptor type 3,accession number X74269,Smith-Waterman Score=119.
ttttttgtggcagagagcgcatggcttgatttttatttgttttattttcaatttaaatgcagtgcataaaaaaatcaaggagcaatgtacaaggaagaaagtcaaaataattgttattttcatcccccagagataaaatattagcagtttactctgtaacaccagcatttgtttttgctttcaagtggcatttaaatgtttaagacaaagaaactgctttaacaaaccaaaaaaaaaaaaacattttttttaaaatactgccaccctgttgggggagaggcggcatttgctgaggttattcttctgagaggtcagtgaatagtaggaggtctccatttccttatcaccaacttgggtggtctctggagaatagggaactgttgtgttctattggacatcgcaatgggcttcaagacactgaggaccattctgtcatctgtaactcacaatggcaaacaggtatggtttctactgatgcagaacagaatggacccactcccttttgtgt

SEQ ID NO: 23331 - DNA, 451 bp, Homo sapiens
  SIMILAR (313)..(14): 581254mologous to Mus musculus ryanodine receptor type 3,accession number X83934,Smith-Waterman Score=254.
gtatcccaaggccaaggtagaaaaagggagttgtcatgtaaaaaacagctccaagcttccagatatggtacttcatgtctatggaacttagccatgacaccagagaagtcgcttctgcctttggtctcttcctactgggctaaagtcaagagcatttttgtcccaaacccagaagttccagcaatgcgttcctgctccgtagagatctcccatacttgttgatcacctttctctttacaaacttgtcccagtagttattaggaaaagatctgaaaaacaaaacgaaaaaggttggttcttcattcttaacatcaaggaaaacacatcaagaaacgtttcagtttgagtgcctggatctggcatctttctggtttgtgtcctgctcaccaaagaattttaagatctgattgaagttcacagtcttctcaggccagtcggtcgtacacgagag

SEQ ID NO: 23332 - DNA, 639 bp, Homo sapiens; identical to SEQ ID NO: 12306
  SIMILAR (46)..(201): 841254mologous to Homo sapiens ryanodine receptor 3,accession number AJ002512,Smith-Waterman Score=214.

SEQ ID NO: 23333 - DNA, 486 bp, Homo sapiens
  SIMILAR (232)..(426): 901254mologous to Homo sapiens brain ryanodine receptor,accession number AB001025,Smith-Waterman Score=300.
atgcatccacagctgtttatgcaacttgaagaatcaaaagaagatttagaaaccctagaaaattgtgccatgaaaccagagaacggaaagaacatacagtttggtgggtgtgtcctgctgcaggttctggatatcctgtgctccctctgtctctgcaatggggttgcagtgagagccaaccagaatctgatctgtgacaacttgctgccccggagaaacctactcctgcagacacgactgattaacgatgtaaccagcggaaacaatcgcacagctgcccccatcaccctgcctatagaagaagtcctgcagaccctacaggacttgatcgcctacttccagcccccagaggaggagatgcgacatgaagacaagcagaacaagctccgctcactcaaaaacagacaaaatcttttcaaggaagagctgtgtgtgaccacagacaagccacaagccttttccagactcggagatgtgatgatttag
